United States Patent Application Publication US 2018/0126003 A1 - sequence listing, part 93

SEQ ID NO: 169069 - DNA, 1053 bp, Artificial Sequence
  derived and/or modified sequence
atgggctgcttcttcagcaagagaagaaaggccgacaaggagagcagacccgagaacgaggaggagagacccaagcagtacagctgggaccagagagagaaggtggaccccaaggactacatgttcagcggcctgaaggacgagaccgtgggcagactgcccggcaccgtggccggccagcagttcctgatccaggactgcgagaactgcaacatctacatcttcgaccacagcgccaccgtgaccatcgacgactgcaccaactgcatcatcttcctgggccccgtgaagggcagcgtgttcttcagaaactgcagagactgcaagtgcaccctggcctgccagcagttcagagtgagagactgcagaaagctggaggtgttcctgtgctgcgccacccagcccatcatcgagagcagcagcaacatcaagttcggctgcttccagtggtactaccccgagctggccttccagttcaaggacgccggcctgagcatcttcaacaacacctggagcaacatccacgacttcacccccgtgagcggcgagctgaactggagcctgctgcccgaggacgccgtggtgcaggactacgtgcccatccccaccaccgaggagctgaaggccgtgagagtgagcaccgaggccaacagaagcatcgtgcccatcagcagaggccagagacagaagagcagcgacgagagctgcctggtggtgctgttcgccggcgactacaccatcgccaacgccagaaagctgatcgacgagatggtgggcaagggcttcttcctggtgcagaccaaggaggtgagcatgaaggccgaggacgcccagagagtgttcagagagaaggcccccgacttcctgcccctgctgaacaagggccccgtgatcgccctggagttcaacggcgacggcgccgtggaggtgtgccagctgatcgtgaacgagatcttcaacggcaccaagatgttcgtgagcgagagcaaggagaccgccagcggcgacgtggacagcttctacaacttcgccgacatccagatgggcatctag

SEQ ID NO: 169070 - DNA, 3803 bp, Artificial Sequence
  derived and/or modified sequence
ggggtgctgggcctggcgggcaaactaaggctgcggaccgttgggcggttccgcggggcgttgtccggagagctgcgaggccggggttcccagggttcacgccacactctaggaagtgcctgagctagtgagctggccaacgagctccgcgggctgggaccatgggctgcttcttctccaagagacggaaggctgacaaggagtcgcggcccgagaacgaggaggagcggccaaagcagtacagctgggatcagcgcgagaaggttgatccaaaagactacatgttcagtggactgaaggatgaaacagtaggtcgcttacctgggacggtagcaggacaacagtttctcattcaagactgtgagaactgtaacatctatatttttgatcactctgctacagttaccattgatgactgtactaactgcataatttttctgggacccgtgaaaggcagcgtgtttttccggaattgcagagattgcaagtgcacattagcctgccaacaatttcgtgtgcgagattgtagaaagctggaagtctttttgtgttgtgccactcaacccatcattgagtcttcctcaaatatcaaatttggatgttttcaatggtactatcctgaattagctttccagttcaaagatgcagggctaagtatcttcaacaatacatggagtaacattcatgactttacacctgtgtcaggagaactcaactggagccttcttccagaagatgctgtggttcaggactatgttcctatacctactaccgaagagctcaaagctgttcgtgtttccacagaagccaatagaagcattgttccaatatcccggggtcagagacagaagagcagcgatgaatcatgcttagtggtattatttgctggtgattacactattgcaaatgccagaaaactaattgatgagatggttggtaaaggctttttcctagttcagacaaaggaagtgtccatgaaagctgaggatgctcaaagggtttttcgggaaaaagcacctgacttccttcctcttctgaacaaaggtcctgttattgccttggagtttaatggggatggtgctgtagaagtatgtcaacttattgtaaacgagatattcaatgggaccaagatgtttgtatctgaaagcaaggagacggcatctggagatgtagacagcttctacaactttgctgatatacagatgggaatatgaagtgcaatgtggaaccaggacttggtattaagcctttcccaacttgtgaatatagaatttgataatacacttttgtgtattagcaatggtttttactaatgctaaaacttttaaagtttattttttaataaattgttgagtattacatcatttacttgaggttcaaaaataattcattttaaattaagtagttttaatcagcttaaaagctatttaacccattttaataagcttgcagttttgtttctctgcatatgatattcttattagaaaacagaagtagctaaaagtttattattttaatcctatttaaatgttctttcaaatctctaataatttaaactttcctcagtgctccatgatactttttttgagactccatatcattgcttattttacctttttcaatttagagggatttgttactagtcgatcaattagaatgaacctatgcacatttttatgtacacatatccagttatataattgcttcctagttgcattatatggcaaatgagattttgtacatggagttgacataatactttgtaaattgaattttttaaagaaataggcatttgataaccagcttggcaagtaactctactaacagatgttggtatagctatttaaagactacttcgtaagtagtatgattatttgaataaattacacattgtttagttttttaatacaactgctatatgactcttctgcttcctgataagaaaaggtatatgcaatgctaaaactgtagaagcccaatcaccagcagtttttaaaaaggtgataacttttattagctcttgtgggctatcaagagaattggaacaaaaccttgtgacttttaggtaagaaataggcatgatgataagctatgcagattattaaaaagcttgatacatttgatttttcattagatatgccattcatatcaagtaatgttcaagtatgataaaattattttggttgctttaaagcactgtttcccaaatctacctgatcataataatttaccaggaagcagaggagagctacttgtttaaaaatccacattcttggacccaatcctcagatgcacggattcagtcttcaggggaaactctgttttaaggggtatgttgtaatctaaagtaattggttcaggaggtgtcaataggttgaacttgtgagaaggcactgaatctgccatccacatcacatatagcagctattatgaaatcagctttcataggcctatttttaaaaggaatctgaaatttaattctattttgataaaactaagactgaaaataaccacttgtaaacattcctatgattgttactaaaatgtattttcatgtttaaaatgtttttggatatttttgggttaataactactacattgaattgcatgttaaggtgcagaaataatacattaaaagattttcactttaaattaattagtaatattgagcgctcaccctgtgcgtggccttgtgctaaccattagcactgcatcatttcaattcttttataagggcattcaatactacaaaatcaacatgatttcataaggtgcaaataaaagttggtgacagatttaatataattttgatcacaatttacaaatgatctttgcaaatagtggtcagacggcattagtttttcccttagttaagctaaattaaagggactccatcctgttatgattatattattattattattattattatttttgaggtggagtttcactcttgttgcccaagctggagtgcaatggcgcgatctcggctcaccacaacatccgcctcctgggttcaagcgattctcctgcctcagcctcctgagtagctgggaatacaggcatgcgccactacacctggctaatttttgtatttttagttgagatggggtttttccacgttggtcaggctggtctcgaactcctgacctcaggtgatccgtccacctcagcctcccaaagagctgggattacaggtgtgagctaccgcgcctggccatgatgatattattaaacaccattattcacatttcaaataataacaatactttttgtttttcaaaaataaaatgcaatgttatataaagctataaactaagttctttatgatatttgagcaacaactcaggaatataacatataagggagatgttaatttaaaaatttccactacacttattatctattaaccaaagcttaaaattttgtattcttctgttagataagaccttttacccatttaatttgtctttaaggacagtcatttggcttctgaatgtttgaaacgattttaaaaaataagtagtgctatggttgtttctataattctaacctttgatagtaatcagaatgtattacatttcatttctgaatagcttttgaatttatgaaaaattattaacaatgaaaaattggtaattttattaagttatatgtgtttaaatattatattagcttatttctcttgcattaatagtactgctgtttttgttttgcttctttatatttatgtctagcttttatatgtaatttatctagtgtttataaaatgtgatttgtaataaatgttgttaaaatgaaaa

SEQ ID NO: 169071 - protein, 178 aa, Artificial Sequence
  derived and/or modified sequence
MHMMVSKPEQWVKPMAVAGANQYTFHLEATENPGALIKDIRENGMKSCSVTQAEVQWHSQGPLQVGLAIKPGTSVEYLAPWANQIDMALVMTVEPGFGGQKFMEDMMPKVHWLRTQFPSLDIEVDGGVGPDTVHKCAEAGANMIVSGSAIMRSEDPRSVINLLRNVCSEAAQKRSLDR

SEQ ID NO: 169072 - protein, 94 aa, Artificial Sequence
  derived and/or modified sequence
MHMMVSKPEQWVKPMAVAGANQYTFHLEATENPGALIKDIRENGMKSCSVTQAEVQWHSQGPLQVGLAIKPGTSVEYLAPWANQIDMALVMTVE

SEQ ID NO: 169073 - DNA, 537 bp, Artificial Sequence
  derived and/or modified sequence
atgcacatgatggtttctaaaccggagcagtgggtgaagccaatggccgtggctggggcaaatcaatacacttttcatctcgaggcgacggagaatcctggagccctgatcaaagacattcgagagaacggcatgaaatcttgtagtgtcacccaggcggaagtccaatggcactcacaggggcccctccaggttggattggctatcaagcctggcacctcagtggagtatttggctccctgggccaaccagatcgatatggctctggtgatgactgtggaacccggtttcggcgggcaaaagttcatggaggacatgatgccaaaagttcactggttgaggacccagttcccttctctagatatcgaggtagatgggggtgttgggcctgacacagttcacaaatgcgcggaagccggagcaaatatgattgttagtggttctgctattatgagaagcgaggacccccgttcggttatcaacctcctcagaaacgtctgcagcgaggctgcccaaaagaggtcactggaccgctag

SEQ ID NO: 169074 - DNA, 537 bp, Artificial Sequence
  derived and/or modified sequence
atgcacatgatggtatcaaaacctgagcaatgggtcaagccaatggcagtggctggggctaatcagtacaccttccacttggaagcgactgagaatccaggtgcacttattaaagatataagggagaacggcatgaaatcttgtagcgttacacaggctgaggtccagtggcactcccaaggaccacttcaagttgggctcgcaatcaagcccggaacatccgttgagtatttggcgccgtgggccaatcaaatagatatggccctggtcatgacagtcgagccagggtttggcgggcagaaattcatggaggacatgatgccaaaggtacactggctgaggacccagtttccgagtttggacatcgaagtagacggaggcgtgggacccgacactgttcacaagtgcgccgaggctggcgccaacatgatcgtttccggctccgcaatcatgaggagcgaggatccccgaagtgtgataaacttgctccgcaacgtctgtagcgaggcagcacagaagagatctctggatcgatag

SEQ ID NO: 169075 - DNA, 285 bp, Artificial Sequence
  derived and/or modified sequence
atgcacatgatggtttccaaacctgaacaatgggtcaaaccaatggcagtcgccggtgctaatcagtatacgtttcacctggaggccaccgaaaacccgggcgccttgatcaaggacatacgcgaaaacggaatgaagagttgctctgtgacgcaagctgaggtgcaatggcacagccagggtccgctccaggtgggattggcaataaagcctggcacctcagtggaatacctggctccatgggctaaccagatcgatatggcactggtcatgacagtggagtag

SEQ ID NO: 169076 - DNA, 537 bp, Artificial Sequence
  derived and/or modified sequence
atgcatatgatggtttccaaaccggagcagtgggtaaagccaatggctgtggccggtgctaaccagtacacatttcatctggaagcgaccgaaaatcctggagcactaataaaagatataagggaaaacggaatgaaaagttgcagcgtgactcaggcggaggtccagtggcacagtcagggcccacttcaggtgggcctggcgataaagccgggaacatccgttgaatatcttgcgccctgggcaaaccagattgatatggctctagtaatgaccgttgagcccgggtttgggggacaaaagtttatggaggacatgatgccaaaagtccattggctacggactcaatttcccagtctggacatcgaggtggatggtggggtggggcccgacactgtacataaatgtgcagaggccggtgcaaacatgattgtatccggaagtgctatcatgaggtccgaagatccgaggtccgttattaacctgctgcggaacgtatgtagcgaagctgcccagaagcggtctctggacaggtag

SEQ ID NO: 169077 - DNA, 537 bp, Artificial Sequence
  derived and/or modified sequence
atgcacatgatggtgtccaagccagagcagtgggtgaagcccatggctgtggccggggccaaccagtacaccttccacctggaggccacagaaaatcctggggccctgatcaaggacatccgggagaatggcatgaagagctgcagcgtgacccaggccgaggtgcagtggcacagccagggccccctgcaggtgggcctggccatcaagccaggcacctctgtggagtacctggccccctgggccaaccagattgacatggccctggtgatgacagtggagcccggctttggaggccagaagttcatggaggacatgatgcccaaggtgcactggctgcggacccagttccccagcctggacatcgaggtggatggaggagtgggccctgacacagtgcacaagtgtgccgaggccggggccaacatgattgtgtctggcagcgccatcatgaggtctgaggaccccaggagcgtcatcaacctgctgagaaatgtgtgcagcgaggccgcccagaagaggagcctggacagatag

SEQ ID NO: 169078 - DNA, 285 bp, Artificial Sequence
  derived and/or modified sequence
atgcacatgatggtgtccaagccagagcagtgggtgaagcccatggctgtggccggggccaaccagtacaccttccacctggaggccacagaaaatcctggggccctgatcaaggacatccgggagaatggcatgaagagctgcagcgtgacccaggccgaggtgcagtggcacagccagggccccctgcaggtgggcctggccatcaagccaggcacctctgtggagtacctggccccctgggccaaccagattgacatggccctggtgatgacagtggagtag

SEQ ID NO: 169079 - DNA, 537 bp, Artificial Sequence
  derived and/or modified sequence
atgcacatgatggtgagcaagcccgagcagtgggtgaagcccatggcagtcgcaggagcaaaccagtatacgtttcatctggaagccacagaaaatcccggcgctctgatcaaggacatccgcgagaacggcatgaaatcttgcagtgtgactcaggccgaagtccagtggcacagtcaaggccccctgcaggtgggactggccatcaagcccggtacctctgtagaatacctagcaccctgggctaaccagatcgatatggcgctggtgatgaccgtcgagcctgggttcggtggccagaaattcatggaagatatgatgcctaaagttcattggttaagaacacagtttccatctctagacatcgaggttgacggaggcgtggggcctgacacagtgcacaagtgtgctgaagcgggagcgaatatgatcgtgagcgggagcgccatcatgaggagcgaagatccccggtccgttattaacctgcttcgaaacgtctgttcagaagctgctcagaaacggtccttagataggtag

SEQ ID NO: 169080 - DNA, 537 bp, Artificial Sequence
  derived and/or modified sequence
atgcacatgatggtgagcaagcccgagcagtgggtgaagcccatggccgtcgcaggcgcaaatcaatatacctttcacctggaggccacagaaaatcctggtgcactaatcaaggacatccgagaaaatggtatgaagtcctgcagtgtcacgcaagctgaagtgcagtggcactcccagggtcctcttcaggttggactcgcaataaaacctggaacctcggtggaatatttggcgccatgggccaaccagatcgacatggctttagttatgactgttgagccaggtttcggaggtcagaagtttatggaagatatgatgcctaaagttcactggctgaggacacagttcccttcactagatatcgaggtagatgggggagtcggccctgatactgtgcacaagtgcgctgaggctggggccaatatgatagtgtccgggagtgctatcatgagaagcgaggaccctaggtccgtgatcaacctgttgcgcaatgtatgttccgaggcggcacagaaacggtctttggaccgatag

SEQ ID NO: 169081 - DNA, 285 bp, Artificial Sequence
  derived and/or modified sequence
atgcacatgatggtgagcaagcccgagcagtgggtgaagcccatggcggtggccggggctaaccagtatacctttcacttggaagccaccgaaaaccctggcgctttgattaaagacataagggaaaatgggatgaagtcatgttctgttactcaggcagaagtgcagtggcacagtcagggacctcttcaggtaggactggccatcaaaccaggcaccagtgtggagtacctcgctccttgggcgaaccagattgatatggcccttgttatgactgttgagtag

SEQ ID NO: 169082 - DNA, 537 bp, Artificial Sequence
  derived and/or modified sequence
atgcacatgatggtgagcaagcccgagcagtgggtgaagcccatggcggtggctggtgcgaaccaatataccttccatctcgaagctaccgagaaccccggagcactgattaaggacattagagaaaacggaatgaagtcctgctccgtgactcaggcagaggttcaatggcactcccaaggacctctgcaggtcggcctggcaattaagcccggaacgtctgttgagtaccttgctccctgggctaaccagattgacatggcactggtaatgactgttgaaccaggctttggcggccaaaagtttatggaggacatgatgccgaaagtccactggttgaggactcagttcccatctctggacatcgaagttgatgggggggtcggccccgacaccgtccataagtgtgcagaggccggagctaatatgattgtgtcgggtagtgcaattatgagatcagaggatccccgcagtgtgatcaatttgctgcgcaatgtctgctcagaagcagcacagaaaaggtccctcgatcgctag

SEQ ID NO: 169083 - DNA, 537 bp, Artificial Sequence
  derived and/or modified sequence
atgcatatgatggtgagtaaacccgagcagtgggttaaaccaatggccgttgccggtgctaaccaatataccttccacctggaagccacagaaaatcccggagctctgataaaagacatacgggagaacgggatgaaatcttgttccgtcactcaagcagaggtccagtggcactcccagggccctctccaggttgggctggctatcaagcctggcacaagcgtggaatatctggccccttgggccaaccagatcgatatggctctggtcatgacggtggagcccggtttcggtggccagaagtttatggaggatatgatgcctaaagtgcactggcttaggacacaatttccatccctggacatagaagtcgatggaggtgtcggccctgacactgttcacaagtgcgctgaggccggagccaacatgatcgtcagcggtagtgcaatcatgagaagtgaggatccacggtcggtgatcaacctgttgcgaaatgtgtgctctgaggctgctcagaaaaggagtctggaccgttag

SEQ ID NO: 169084 - DNA, 537 bp, Artificial Sequence
  derived and/or modified sequence
atgcatatgatggtgagcaagcctgagcaatgggttaagcctatggctgtcgcgggtgcaaatcagtatacatttcacctggaggcaactgaaaatcccggagctctgataaaggacattcgagaaaacggaatgaagagctgctcagtgacgcaggccgaggtccaatggcattcccaggggcctcttcaggtgggcctggcaattaagcccggtacttcggtcgagtatctcgcaccctgggccaatcagattgacatggccctggtaatgacagtggagcctgggtttggtggccagaaattcatggaggacatgatgccaaaagtgcattggctgcgaacccagttcccatcactggacatcgaggtcgacggaggagtgggccctgatacggtacacaaatgcgccgaggctggagctaacatgatcgtgtctggctctgctataatgcgttccgaggacccaaggtcagtcattaacctactccgcaatgtgtgtagcgaggccgctcaaaagaggagcctggaccgatag

SEQ ID NO: 169085 - DNA, 285 bp, Artificial Sequence
  derived and/or modified sequence
atgcatatgatggtctccaaacctgagcagtgggtgaagcctatggcggttgccggagccaatcagtataccttccacctggaggcgactgagaatcccggtgcactgatcaaagatatcagagaaaatggaatgaagagctgcagtgtcacacaggctgaagtgcaatggcacagccagggccctttgcaagtgggattggctattaaaccaggcacttcggtggaatacctggccccttgggccaatcaaatcgatatggcactcgttatgactgtcgagtag

SEQ ID NO: 169086 - DNA, 537 bp, Artificial Sequence
  derived and/or modified sequence
atgcatatgatggtgtccaaacccgaacaatgggtcaagcctatggccgttgccggagcgaaccagtatacgttccacctggaggcaacagaaaacccaggtgcactcatcaaagacatccgtgaaaatggcatgaagtcttgtagtgtaactcaggcagaggtacagtggcactctcagggtcctctgcaggtcggattggccattaagcctggcacctctgtcgaatatctggccccatgggccaaccagattgatatggctcttgtgatgacagtagagccgggattcggaggacagaagttcatggaggatatgatgccaaaggttcactggctgcgcacccagttcccttctctagacatcgaggttgacggaggcgttggccctgatactgtgcacaagtgcgccgaggcaggcgctaacatgatagtgagcggatcagcaataatgcgctctgaggacccacgaagtgtgattaatttgcttagaaatgtgtgttccgaagccgctcagaagagaagcctggatcgttag

SEQ ID NO: 169087 - DNA, 2511 bp, Artificial Sequence
  derived and/or modified sequence
actcgtgggtaacttgcttttgggagccagcggtatggcgtcgggctgcaagattggcccgtccatcctcaacagcgacctggccaatttaggggccgagtgcctccggatgctagactctggggccgattatctgcacctggacgtaatggacgggcaccctgctcttcagggaggtcagttttttacatgcacatgatggtgtccaagccagaacagtgggtaaagccaatggctgtagcaggagccaatcagtacacctttcatctcgaggctactgagaacccaggggctttgattaaagacattcgggagaatgggatgaagtcttgctctgtcacccaggctgaagtgcagtggcacagtcagggcccattgcaggttggccttgccatcaaaccaggaacctcagttgagtatttggcaccatgggctaatcagatagatatggccttggttatgacagtggaaccggggtttggagggcagaaattcatggaagatatgatgccaaaggttcactggttgaggacccagttcccatctttggatatagaggtcgatggtggagtaggtcctgacactgtccataaatgtgcagaggcaggagctaacatgattgtgtctggcagtgctattatgaggagtgaagaccccagatctgtgatcaatctattaagaaatgtttgctcagaagctgctcagaaacgttctcttgatcggtgaaaccataaggagcccagtgttcctgttcatgaaatctcccttttactggaaaacaggaatattgactaccaaatcacaatgcaattgaagccgtactgcttttttgagcagttattcattccagtgattaaaactgattgtgcagaatattctaagaggtcagaaattggtgtgtataactacatttttagtgatgcaatttattgattagtgagtaagatactgtttttattgagagatttgatttttataaagtaaaaatacggctgcattagggttacaaacagaaaagtgtcttaatgtctaaggagggcatattagctacactacaaaaacaaattttgtctgtacttctgaaaagaattttgttgtttctcagctgttttccaaaagcaaaggaagtctttatggtttttttctatttcatgttattgtgatttgtttataagtttgggtggggtgcataccatattcttggttcttaaaatctatcacttttcaccttacacttgatgtgtgaaaactataaaaacaatgtgtgaaacccaggggttctaaaatacaagcatagattttatcagggtgttttgtcaaagcaggttattcagtgattcctccccaccattcttaagaacgttaaataatgctgttgtgttagctctgagtagaaaggaaaaagtaaaacctctgtttggaggtaatattgggttgaattctgactgcccctttctagctggacctttaacaaatcacccaatcttttttgtgtttctctaaagtcatttatacattaaatgtaattatagcaactgtggggttctgttgagaattaagagctaacactatatatgtaaagtttccagtactagtcccagaatttagaatatgctcaacacaaagtaaacagcattatataagtttatatttttgtgagttataaagtactttgatatattctcattaaatctgtaaatcacctctataagtaagtggtaataataaagcagatatttttgtccccatttaaaaaatgaagaaattaatgcttaatagggtggtaccctggaaaggatctgggaagtggtagaatttctggtctgtacttttacaaatggagcccttgggaggtgggttaggtaaaagaagctttttacttaacgttgtcttatttccagtctaattttacgctgtagcagaaccagatggctgagaaaattctggaactatggatcttgaccccaaggatatattattttattccaagaaagatcaggtaggcgaaaagatgacaggatacagagtcaatccataaactaaatatttataactgttctgaattatacagagtctaaaaatatgtgtcagctacttcattcctgtaaatactcttgctgtgttataaatatggcaagaaataaacatgaccaatatcaatagacttcttgaggctactataagttttgagaaataaggttcaaaaaataagaatgctaacacttaagcacagactagagcttgcttgggtttcttcctgcattacaaggtaaaaatttgttaatgtttgtttttattcagcttgggaaagctttgtgccatgaatacgtcgcatttaataacaagcaacacacggcatatagaaataactttaattaaaaaacttacatagaagattataatatcagacgtgacaaagatttgagtttatttgcctggacaacttgggtttgtctggcttttgttttctttttctttaaaaataaatgtacagtaaaactacaagcaaaa

SEQ ID NO: 169088 - DNA, 2130 bp, Artificial Sequence
  derived and/or modified sequence
actcgtgggtaacttgcttttgggagccagcggtatggcgtcgggctgcaagattggcccgtccatcctcaacagcgacctggccaatttaggggccgagtgcctccggatgctagactctggggccgattatctgcacctggacgtaatggacggacatgcacatgatggtgtccaagccagaacagtgggtaaagccaatggctgtagcaggagccaatcagtacacctttcatctcgaggctactgagaacccaggggctttgattaaagacattcgggagaatgggatgaagtcttgctctgtcacccaggctgaagtgcagtggcacagtcagggcccattgcaggttggccttgccatcaaaccaggaacctcagttgagtatttggcaccatgggctaatcagatagatatggccttggttatgacagtggaaccggggtttggagggcagaaattcatggaagatatgatgccaaaggttcactggttgaggacccagttcccatctttggatatagaggtcgatggtggagtaggtcctgacactgtccataaatgtgcagaggcaggagctaacatgattgtgtctggcagtgctattatgaggagtgaagaccccagatctgtgatcaatctattaagaaatgtttgctcagaagctgctcagaaacgttctcttgatcggtgaaaccataaggagcccagtgttcctgttcatgaaatctcccttttactggaaaacaggaatattgactaccaaatcacaatgcaattgaagccgtactgcttttttgagcagttattcattccagtgattaaaactgattgtgcagaatattctaagaggtcagaaattggtgtgtataactacatttttagtgatgcaatttattgattagtgagtaagatactgtttttattgagagatttgatttttataaagtaaaaatacggctgcattagggttacaaacagaaaagtgtcttaatgtctaaggagggcatattagctacactacaaaaacaaattttgtctgtacttctgaaaagaattttgttgtttctcagctgttttccaaaagcaaaggaagtctttatggtttttttctatttcatgttattgtgatttgtttataagtttgggtggggtgcataccatattcttggttcttaaaatctatcacttttcaccttacacttgatgtgtgaaaactataaaaacaatgtgtgaaacccaggggttctaaaatacaagcatagattttatcagggtgttttgtcaaagcaggttattcagtgattcctccccaccattcttaagaacgttaaataatgctgttgtgttagctctgagtagaaaggaaaaagtaaaacctctgtttggaggtaatattgggttgaattctgactgcccctttctagctggacctttaacaaatcacccaatcttttttgtgtttctctaaagtcatttatacattaaatgtaattatagcaactgtggggttctgttgagaattaagagctaacactatatatgtaaagtttccagtactagtcccagaatttagaatatgctcaacacaaagtaaacagcattatataagtttatatttttgtgagttataaagtactttgatatattctcattaaatctgtaaatcacctctataagtaagtggtaataataaagcagatatttttgtccccatttaaaaaatgaagaaattaatgcttaatagggtggtaccctggaaaggatctgggaagtggtagaatttctggtctgtacttttacaaatggagcccttgggaggtgggttaggtaaaagaagctttttacttaacgttgtcttatttccagtctaattttacgctgtagcagaaccagatggctgagaaaattctggaactatggatcttgaccccaaggatatattattttattccaagaaagatcaggtaggcgaaaagatgacaggatacagagtcaatccataaactaaatatttataactgttctgaattatacagagtctaaaaatatgtgtcagctacttcattcctgtaaatactcttgctgtgttataaatatggcaagaaataaacatgaccaatatcaat

SEQ ID NO: 169089 - DNA, 537 bp, Artificial Sequence
  derived and/or modified sequence
atgcacatgatggtgagcaagcccgagcagtgggtgaagcccatggccgtggccggcgccaaccagtacaccttccacctggaggccaccgagaaccccggcgccctgatcaaggacatcagagagaacggcatgaagagctgcagcgtgacccaggccgaggtgcagtggcacagccagggccccctgcaggtgggcctggccatcaagcccggcaccagcgtggagtacctggccccctgggccaaccagatcgacatggccctggtgatgaccgtggagcccggcttcggcggccagaagttcatggaggacatgatgcccaaggtgcactggctgagaacccagttccccagcctggacatcgaggtggacggcggcgtgggccccgacaccgtgcacaagtgcgccgaggccggcgccaacatgatcgtgagcggcagcgccatcatgagaagcgaggaccccagaagcgtgatcaacctgctgagaaacgtgtgcagcgaggccgcccagaagagaagcctggacagatag

SEQ ID NO: 169090 - DNA, 285 bp, Artificial Sequence
  derived and/or modified sequence
atgcacatgatggtgagcaagcccgagcagtgggtgaagcccatggccgtggccggcgccaaccagtacaccttccacctggaggccaccgagaaccccggcgccctgatcaaggacatcagagagaacggcatgaagagctgcagcgtgacccaggccgaggtgcagtggcacagccagggccccctgcaggtgggcctggccatcaagcccggcaccagcgtggagtacctggccccctgggccaaccagatcgacatggccctggtgatgaccgtggagtag

SEQ ID NO: 169091 - protein, 463 aa, Artificial Sequence
  derived and/or modified sequence
MYGNYSHFMKFPAGYGGSPGHTGSTSMSPSAALSTGKPMDSHPSYTDTPVSAPRTLSAVGTPLNALGSPYRVITSAMGPPSGALAAPPGINLVAPPSSQLNVVNSVSSSEDIKPLPGLPGIGNMNYPSTSPGSLVKHICAICGDRSSGKHYGVYSCEGCKGFFKRTIRKDLIYTCRDNKDCLIDKRQRNRCQYCRYQKCLVMGMKREAVQEERQRSRERAESEAECATSGHEDMPVERILEAELAVEPKTESYGDMNMENSTNDPVTNICHAADKQLFTLVEWAKRIPHFSDLTLEDQVILLRAGWNELLIASFSHRSVSVQDGILLATGLHVHRSSAHSAGVGSIFDRVLTELVSKMKDMQMDKSELGCLRAIVLFNPDAKGLSNPSEVETLREKVYATLEAYTKQKYPEQPGRFAKLLLRLPALRSIGLKCLEHLFFFKLIGDTPIDTFLMEMLETPLQIT

SEQ ID NO: 169092 - DNA, 1856 bp, Artificial Sequence
  derived and/or modified sequence
gtggcaagagtagcggtgacggcggcggcggcggcggcggcagcattatgcgtgattactgacaggcaccagctgctgccgccacagccgtctcaaacgcactatgtggactctccgatctagaggcagattcctgactaatcccagagggctggcccagcctgtgctccccgggctgctaggaagcgatgaccactcttgttagcccaagttgaagaaagccgggctgtgcctgggagccgagagaggcggtaatatttagaagctgcacaggagaggaacatgaactgacgagtaaacatgtatggaaattattctcacttcatgaagtttcccgcaggctatggaggctcccctggccacactggctctacatccatgagcccatcagcagccttgtccacagggaagccaatggacagccaccccagctacacagataccccagtgagtgccccacggactctgagtgcagtggggacccccctcaatgccctgggctctccatatcgagtcatcacctctgccatgggcccaccctcaggagcacttgcagcgcctccaggaatcaacttggttgccccacccagctctcagctaaatgtggtcaacagtgtcagcagttcagaggacatcaagcccttaccagggcttcccgggattggaaacatgaactacccatccaccagccccggatctctggttaaacacatctgtgccatctgtggagacagatcctcaggaaagcactacggggtatacagttgtgaaggctgcaaagggttcttcaagaggacgataaggaaggacctcatctacacgtgtcgggataataaagactgcctcattgacaagcgtcagcgcaaccgctgccagtactgtcgctatcagaagtgccttgtcatgggcatgaagagggaagctgtgcaagaagaaagacagaggagccgagagcgagctgagagtgaggcagaatgtgctaccagtggtcatgaagacatgcctgtggagaggattctagaagctgaacttgctgttgaaccaaagacagaatcctatggtgacatgaatatggagaactcgacaaatgaccctgttaccaacatatgtcatgctgctgacaagcagcttttcaccctcgttgaatgggccaagcgtattccccacttctctgacctcaccttggaggaccaggtcattttgcttcgggcagggtggaatgaattgctgattgcctctttctcccaccgctcagtttccgtgcaggatggcatccttctggccacgggtttacatgtccaccggagcagtgcccacagtgctggggtcggctccatctttgacagagtcctaactgagctggtttccaaaatgaaagacatgcagatggacaagtcggaactgggatgcctgcgagccattgtactctttaacccagatgccaagggcctgtccaacccctctgaggtggagactctgcgagagaaggtttatgccacccttgaggcctacaccaagcagaagtatccggaacagccaggcaggtttgccaagctgctgctgcgcctcccagctctgcgttccattggcttgaaatgcctggagcacctcttcttcttcaagctcatcggggacacccccattgacaccttcctcatggagatgttggagaccccgctgcagatcacctgagccccaccagccacagcctccccacccaggatgacccctgggcaggtgtgtgtggacccccaccctgcactttcctccacctcccaccctgacccccttcctgtccccaaaatgtgatgcttataataaagaaaacctttctacacatgaaaaaaaaaaaaaaa

SEQ ID NO: 169093 - DNA, 1392 bp, Artificial Sequence
  derived and/or modified sequence
atgtatggcaattactcccacttcatgaagttcccggccggttatggaggatccccggggcacaccggcagcactagtatgtcacctagcgccgcactgtctacagggaagccaatggattctcacccctcatataccgacactccggtgagtgcccccagaacactgagcgccgtcggcaccccactgaatgctctcggtagtccgtacagggtcatcacctccgccatggggcccccttccggcgccttggcagctccaccaggcatcaatttagttgctccgccttcatcgcagttaaatgtggtcaactctgtctcctcttcagaggacataaagccattgcctgggcttcccgggattggcaatatgaactatccatctacttcgcctggcagtcttgtgaaacatatttgcgcgatctgtggtgacagatcctcgggcaagcattacggagtgtacagctgtgagggatgcaaaggtttttttaagagaacaatcaggaaagacttgatatatacctgcagagacaataaagattgcctcatcgataagagacagaggaaccggtgccagtactgtaggtaccagaagtgtctcgttatgggcatgaagagggaggctgtacaggaggaacgtcagcgcagccgggaacgtgccgaatctgaggctgagtgcgccacgtccggtcacgaggatatgcctgtcgagagaatcctggaggccgagctggccgtggagcctaagaccgagtcctatggagacatgaatatggagaactcaactaatgacccagttactaatatctgccatgctgcagacaaacagctcttcactctggtggagtgggcgaagagaataccccatttttccgacctgaccttggaagatcaggtgattcttcttagggccggctggaatgaactgctgatcgcctctttctcccatagatccgtgagtgtgcaggacggcatcctactagctactggtttgcacgtgcaccgaagttccgctcacagcgccggcgtgggctctattttcgaccgcgtcctgaccgagttggtgtcaaagatgaaggatatgcaaatggataagagcgagttaggctgtttaagggctatcgtgctgtttaatccagacgctaaaggcctgagcaatccatcggaagtggagacactgcgcgaaaaagtatacgcgactttggaggcttatactaaacaaaaatatccagagcagcctgggaggtttgccaagcttctgctccggttgccggctctgcggagtatcggacttaaatgcctcgagcacttattttttttcaaacttatcggcgatacccccattgacacttttcttatggaaatgctggagacccccctccagattacttag

SEQ ID NO: 169094 - DNA, 1392 bp, Artificial Sequence
  derived and/or modified sequence
atgtatggcaactacagccacttcatgaagtttcctgctggctatggaggcagccctggccacacaggcagcacctccatgagccccagcgctgccctgagcacaggcaagcccatggacagccaccccagctacacagacacccctgtgtctgcccccaggaccctgtctgctgtgggcacccccctgaatgccctgggcagcccctacagagtcatcaccagcgccatgggccccccatctggggccctggccgcccctcctggcatcaacctggtggccccacccagcagccagctgaatgtggtgaacagcgtgagcagcagcgaggacatcaagcccctgcccggcctgcccggcatcggcaacatgaactaccccagcaccagccctggcagcctggtgaagcacatctgtgccatctgtggggacaggagcagcggcaagcactatggagtgtacagctgtgagggctgcaagggcttcttcaagaggaccatcaggaaggacctgatctacacctgccgggacaacaaggactgcctgattgacaagaggcagaggaaccgctgccagtactgccgctaccagaagtgcctggtgatgggcatgaagcgggaggccgtgcaggaggagcggcagaggagccgggagcgggcagagagcgaggctgaatgtgccaccagcggccacgaggacatgcctgtggagcgcatcctggaggccgagctggccgtggagcccaagacagagagctatggagacatgaacatggagaacagcaccaatgaccctgtgaccaacatctgccacgccgctgacaagcagctgttcaccctggtggagtgggccaagaggatcccccacttcagtgacctgaccctggaggaccaggtgatcctgctgcgggccggctggaatgagctgctgattgccagcttcagccacaggtctgtgtctgtgcaggacggcatcctgctggccaccggcctgcacgtgcacaggagcagcgcccacagcgctggggtgggcagcatctttgacagagtgctgacagagctggtgtccaagatgaaggacatgcagatggacaagtctgagctgggctgcctgcgggccatcgtgctcttcaacccagatgccaagggcctgagcaaccccagcgaggtggagaccctgcgggagaaggtgtatgccaccctggaggcctacaccaagcagaagtacccagagcagcccggccgctttgccaagctgctgctgcggctgcctgccctgcggagcatcggcctgaagtgcctggagcacctgttcttcttcaagctgattggagacacccccatcgacaccttcctgatggagatgctggagacccccctgcagatcacctag

SEQ ID NO: 169095 - DNA, 1392 bp, Artificial Sequence
  derived and/or modified sequence
atgtacggcaactacagccacttcatgaagttccccgccggctacggaggttcgcctgggcatacgggaagcaccagcatgagcccgtccgcagccctgtcaacaggcaagcccatggactcccacccttcttacaccgatacccccgtgtcagccccccgtacgctgagtgcagttggcacacccctaaacgcattaggatctccatacagggtcataacttcagccatggggcctccaagtggcgcgcttgctgcacctcctggcatcaacttggtcgcacccccttccagtcagctgaatgttgttaacagtgtcagttccagcgaggacattaagcccctgcccgggctgcccggcattggtaacatgaattaccccagcacatctccaggctcactagtcaaacacatctgcgctatctgcggagatcggagcagcggcaagcactacggagtatacagctgcgaggggtgcaagggattcttcaaacggactattcgcaaggatctcatctatacatgccgcgataacaaagattgtcttatcgataagcgacagcggaacagatgtcaatactgcaggtaccagaagtgtcttgttatgggaatgaaacgcgaggctgtgcaagaggagagacagcggagtagggagcgagctgaaagcgaggcggagtgcgcgacgtccggacatgaagatatgcccgtggaacggattctcgaggccgagttggccgtcgaacctaagactgaatcctacggtgacatgaacatggaaaattctaccaacgatcccgtaaccaacatctgtcatgccgcggataagcagctcttcacccttgtggagtgggcaaagcgtataccccacttttccgacttaactctcgaggaccaggtgattctcctcagggcaggttggaatgagcttctcatcgcctccttttcacatcgcagcgtctccgttcaggatggcatactgttagctacagggctgcatgtccatcgctcgagtgcccactccgccggggtgggctcaatatttgacagagtgctgacagagcttgtgagcaaaatgaaggacatgcagatggataagtcagaactgggctgccttcgcgccattgtgctgttcaatcctgatgctaagggactgtctaatcccagcgaggtcgaaacactgcgcgagaaagtctacgctaccctggaagcctatactaagcagaagtatccagagcagcccggaaggttcgctaaactgctgctgcggttgcctgcccttagaagtataggcctaaagtgcttagagcacctctttttttttaagctcattggagacacacccatcgatacattcttgatggagatgctggaaacgccactgcagatcacttag

SEQ ID NO: 169096 - DNA, 1392 bp, Artificial Sequence
  derived and/or modified sequence
atgtatggcaactattcccattttatgaagttcccagccggatacggcggttctcccggacacacagggtcaacctccatgtctccttctgccgcattgtctaccggaaagccaatggactcccatcctagctacaccgacacacctgtgtctgcacctaggaccctgagcgcggtcggcactcctctgaatgccctgggctccccttaccgggtaatcacgtccgctatgggtccaccaagcggtgccctggccgcaccgccaggtattaatcttgtcgctccaccaagctctcaactgaacgtagtgaacagtgtaagcagcagtgaggatattaagcctttgcctgggctccccggtatcggcaatatgaactacccaagtacgtcacccggtagcctggtgaagcacatatgcgctatctgtggcgatcgctcgtcagggaagcactatggggtgtatagctgtgagggatgcaaaggcttctttaaaagaaccatccgcaaggatctgatctacacatgcagggacaacaaggactgcctgattgataagagacagaggaacagatgtcagtactgccggtaccagaaatgcttagtgatgggaatgaagcgggaggccgtccaggaggagaggcagcgctcccgggaacgggctgagtcagaagcagaatgcgctactagcggtcacgaggacatgccggtcgaaagaatactggaggctgaattggctgtcgagccgaagaccgagtcctacggggatatgaatatggaaaattccactaacgatcctgtaactaatatctgccacgctgctgataagcagctatttacattagtggagtgggccaaacgtatcccgcacttcagcgacctgacactcgaagatcaggtgatcctgctcagagccggttggaacgaactactgattgccagctttagccaccgctcggttagcgtccaggatggtatcttactcgccaccggacttcacgtgcataggtcatccgctcactctgccggtgtcggctcaatttttgatagagtcctgaccgagctcgtgtccaagatgaaggacatgcagatggataagagtgaactggggtgtctgcgcgctattgtgttgttcaaccccgacgcaaaaggcttgagcaaccccagcgaagtcgaaaccctccgtgagaaagtgtatgcgaccctcgaggcttacaccaaacagaagtaccctgagcagccaggtagattcgctaaactgctgctccgcctccccgctttgcgctctatcggactgaagtgtttggagcatttgttcttctttaagttaattggggacacacccatagatactttcttgatggagatgttagaaacccccctgcagataacctag

SEQ ID NO: 169097 - DNA, 2036 bp, Artificial Sequence
  derived and/or modified sequence
gcggtggcaagagtagcggtgacggcggcggcggcggcggcggcagcattatgcgtgattactgacaggcaccagctgctgccgccacagccgtctcaaacgcactatgtggactctccgatctagaggcagattcctgactaatcccagagggctggcccagcctgtgctccccgggctgctaggaagcgatgaccactcttgttagcccaagttgaagaaagccgggctgtgcctgggagccgagagaggcggtaatatttagaagctgcacaggagaggaacatgaactgacgagtaaacatgtatggaaattattctcacttcatgaagtttcccgcaggctatggaggctcccctggccacactggctctacatccatgagcccatcagcagccttgtccacagggaagccaatggacagccaccccagctacacagataccccagtgagtgccccacggactctgagtgcagtggggacccccctcaatgccctgggctctccatatcgagtcatcacctctgccatgggcccaccctcaggagcacttgcagcgcctccaggaatcaacttggttgccccacccagctctcagctaaatgtggtcaacagtgtcagcagttcagaggacatcaagcccttaccagggcttcccgggattggaaacatgaactacccatccaccagccccggatctctggttaaacacatctgtgccatctgtggagacagatcctcaggaaagcactacggggtatacagttgtgaaggctgcaaagggttcttcaagaggacgataaggaaggacctcatctacacgtgtcgggataataaagactgcctcattgacaagcgtcagcgcaaccgctgccagtactgtcgctatcagaagtgccttgtcatgggcatgaagagggaagctgtgcaagaagaaagacagaggagccgagagcgagctgagagtgaggcagaatgtgctaccagtggtcatgaagacatgcctgtggagaggattctagaagctgaacttgctgttgaaccaaagacagaatcctatggtgacatgaatatggagaactcgacaaatgaccctgttaccaacatatgtcatgctgctgacaagcagcttttcaccctcgttgaatgggccaagcgtattccccacttctctgacctcaccttggaggaccaggtcattttgcttcgggcagggtggaatgaattgctgattgcctctttctcccaccgctcagtttccgtgcaggatggcatccttctggccacgggtttacatgtccaccggagcagtgcccacagtgctggggtcggctccatctttgacagagtcctaactgagctggtttccaaaatgaaagacatgcagatggacaagtcggaactgggatgcctgcgagccattgtactctttaacccagatgccaagggcctgtccaacccctctgaggtggagactctgcgagagaaggtttatgccacccttgaggcctacaccaagcagaagtatccggaacagccaggcaggtttgccaagctgctgctgcgcctcccagctctgcgttccattggcttgaaatgcctggagcacctcttcttcttcaagctcatcggggacacccccattgacaccttcctcatggagatgttggagaccccgctgcagatcacctgagccccaccagccacagcctccccacccaggatgacccctgggcaggtgtgtgtggacccccaccctgcactttcctccacctcccaccctgacccccttcctgtccccaaaatgtgatgcttataataaagaaaacctttctacacatgagacttttataggtggacttttgtatagatgttaaaggtaatacgctttgctgtctacagggctgggagactttctggaagttcttgggaaaactaatcaagcctctgtacatacaattggtttaaattattttttcacttgccctggaaagcaaacaaatgagtaataaaataatatgtgtgaaattggca

SEQ ID NO: 169098 - DNA, 1392 bp, Artificial Sequence
  derived and/or modified sequence
atgtacggcaactacagccacttcatgaagttccccgccggctacggcggcagccccggccacaccggcagcaccagcatgagccccagcgccgccctgagcaccggcaagcccatggacagccaccccagctacaccgacacccccgtgagcgcccccagaaccctgagcgccgtgggcacccccctgaacgccctgggcagcccctacagagtgatcaccagcgccatgggcccccccagcggcgccctggccgccccccccggcatcaacctggtggccccccccagcagccagctgaacgtggtgaacagcgtgagcagcagcgaggacatcaagcccctgcccggcctgcccggcatcggcaacatgaactaccccagcaccagccccggcagcctggtgaagcacatctgcgccatctgcggcgacagaagcagcggcaagcactacggcgtgtacagctgcgagggctgcaagggcttcttcaagagaaccatcagaaaggacctgatctacacctgcagagacaacaaggactgcctgatcgacaagagacagagaaacagatgccagtactgcagataccagaagtgcctggtgatgggcatgaagagagaggccgtgcaggaggagagacagagaagcagagagagagccgagagcgaggccgagtgcgccaccagcggccacgaggacatgcccgtggagagaatcctggaggccgagctggccgtggagcccaagaccgagagctacggcgacatgaacatggagaacagcaccaacgaccccgtgaccaacatctgccacgccgccgacaagcagctgttcaccctggtggagtgggccaagagaatcccccacttcagcgacctgaccctggaggaccaggtgatcctgctgagagccggctggaacgagctgctgatcgccagcttcagccacagaagcgtgagcgtgcaggacggcatcctgctggccaccggcctgcacgtgcacagaagcagcgcccacagcgccggcgtgggcagcatcttcgacagagtgctgaccgagctggtgagcaagatgaaggacatgcagatggacaagagcgagctgggctgcctgagagccatcgtgctgttcaaccccgacgccaagggcctgagcaaccccagcgaggtggagaccctgagagagaaggtgtacgccaccctggaggcctacaccaagcagaagtaccccgagcagcccggcagattcgccaagctgctgctgagactgcccgccctgagaagcatcggcctgaagtgcctggagcacctgttcttcttcaagctgatcggcgacacccccatcgacaccttcctgatggagatgctggagacccccctgcagatcacctag

SEQ ID NO: 169099 - protein, 299 aa, Artificial Sequence
  derived and/or modified sequence
MDLVLRVADYYFFTPYVYPATWPEDDIFRQAISLLIVTNVGAYILYFFCATLSYYFVFDHALMKHPQFLKNQVRREIKFTVQALPWISILTVALFLLEIRGYSKLHDDLGEFPYGLFELVVSIISFLFFTDMFIYWIHRGLHHRLVYKRLHKPHHIWKIPTPFASHAFHPIDGFLQSLPYHIYPFIFPLHKVVYLSLYILVNIWTISIHDGDFRVPQILQPFINGSAHHTDHHMFFDYNYGQYFTLWDRIGGSFKNPSSFEGKGPLSYVKEMTEGKRSSHSGNGCKNEKLFNGEFTKTE

SEQ ID NO: 169100 - DNA, 900 bp, Artificial Sequence
  derived and/or modified sequence
atggacctggtgctgagagtggccgactactacttcttcaccccctacgtgtaccccgccacctggcccgaggacgacatcttcagacaggccatcagcctgctgatcgtgaccaacgtgggcgcctacatcctgtacttcttctgcgccaccctgagctactacttcgtgttcgaccacgccctgatgaagcacccccagttcctgaagaaccaggtgagaagagagatcaagttcaccgtgcaggccctgccctggatcagcatcctgaccgtggccctgttcctgctggagatcagaggctacagcaagctgcacgacgacctgggcgagttcccctacggcctgttcgagctggtggtgagcatcatcagcttcctgttcttcaccgacatgttcatctactggatccacagaggcctgcaccacagactggtgtacaagagactgcacaagccccaccacatctggaagatccccacccccttcgccagccacgccttccaccccatcgacggcttcctgcagagcctgccctaccacatctaccccttcatcttccccctgcacaaggtggtgtacctgagcctgtacatcctggtgaacatctggaccatcagcatccacgacggcgacttcagagtgccccagatcctgcagcccttcatcaacggcagcgcccaccacaccgaccaccacatgttcttcgactacaactacggccagtacttcaccctgtgggacagaatcggcggcagcttcaagaaccccagcagcttcgagggcaagggccccctgagctacgtgaaggagatgaccgagggcaagagaagcagccacagcggcaacggctgcaagaacgagaagctgttcaacggcgagttcaccaagaccgagtag

SEQ ID NO: 169101 - DNA, 900 bp, Artificial Sequence
  derived and/or modified sequence
atggatcttgtgctaagggtggctgattattactttttcactccttacgtgtatccagctacgtggccagaagacgatatattccggcaagctatctctctgctgatcgtaaccaacgtgggcgcctacatcctttacttcttctgtgcaacactgtcatactacttcgtgtttgaccatgccctgatgaagcacccgcaattcctaaagaaccaagtacgacgggagataaagttcacagtgcaagccctgccatggatctccatcttgacagtagccttgtttttgctggagattcgcggatactcgaaactccacgatgaccttggcgaattcccatatggcctctttgagttggtggtttcaattattagctttctgttcttcacggatatgttcatctactggatccatcgcggtttacaccaccggctcgtctacaaaaggttgcacaaacctcaccacatctggaagataccaacccccttcgcctcacacgctttccatcccatagacggctttcttcaaagcctaccttaccatatttacccatttatctttcccctgcacaaggtggtgtaccttagcctttacatcttggtgaatatctggaccatcagtatccacgacggcgacttcagggtgcctcagatcctgcagccatttatcaatggttcggctcaccacactgaccaccacatgttcttcgactacaactatgggcagtatttcacactttgggatcgaatcggcggatcatttaagaacccaagctcctttgagggtaagggacctcttagttacgttaaagaaatgaccgaagggaaaaggagttctcactcaggcaatggttgcaagaacgagaaactttttaacggcgaatttacaaagaccgagtag

SEQ ID NO: 169102 - DNA, 900 bp, Artificial Sequence
  derived and/or modified sequence
atggacctggtcctgcgagtggccgactactattttttcacaccatatgtgtaccccgctacgtggccagaagacgacatttttcgtcaggccatttctctgctaatagtgacaaacgtcggcgcatatatcctgtacttcttctgcgccacgttaagttactacttcgtgtttgaccacgcactgatgaagcatcctcagtttctgaagaaccaggttcgccgggaaatcaagtttactgtccaagccctgccatggatctccattttgacggtagccttattcctattggaaattcgaggctacagcaagctgcacgacgacctcggcgagttcccttacggcctgttcgaactggtggtcagcattattagtttcctatttttcaccgacatgttcatttactggatccacagaggactgcatcatagactggtgtataagagactgcacaagccacatcacatctggaagatcccaaccccctttgcaagccatgcattccaccctattgacggattcctgcagagcttaccctaccacatatacccttttatatttcctctgcacaaagtggtgtacctgtccctgtatatacttgtgaacatctggactatatcaattcacgatggggatttcagagtgccacaaattctgcagccgtttatcaacggaagcgcacaccacacagatcaccacatgttcttcgattacaattacggccagtacttcactctctgggacaggatcggtggctcctttaagaaccctagctcgttcgagggtaaggggccacttagctacgttaaggaaatgacagaggggaagcggagctctcattccggaaacggttgcaagaatgaaaaactctttaatggggaatttaccaaaacagagtag

SEQ ID NO: 169103 - DNA, 900 bp, Artificial Sequence
  derived and/or modified sequence
atggacctggtgctgcgggtggccgactactacttcttcaccccctacgtgtacccagccacctggccagaagatgacatcttccggcaggccatcagcctgctgattgtgaccaacgtgggcgcctacatcctgtacttcttctgtgccaccctgagctactactttgtgtttgaccacgccctgatgaagcacccccagttcctgaagaaccaggtgcggcgggagatcaagttcaccgtgcaggccctgccctggatcagcatcctgactgtggccctcttcctgctggagatccggggctacagcaagctgcatgatgacctgggggagttcccctacggcctgtttgagctggtggtgtccatcatctccttcctgttcttcacagacatgttcatctactggatccaccggggcctgcaccaccggctggtgtacaagaggctgcacaagccccaccacatctggaagatccccaccccatttgccagccacgccttccaccccattgatggcttcctgcagagcctgccctaccacatctaccccttcatcttccccctgcacaaggtggtgtacctgagcctgtacatcctggtgaacatctggaccatcagcatccatgatggagacttccgggtgccccagatcctgcagcccttcatcaatggcagcgcccaccacacagaccaccacatgttctttgactacaactacggccagtacttcaccctgtgggaccgcatcggcggcagcttcaagaaccccagcagctttgagggcaagggccccctgtcctatgtgaaggagatgacagagggcaagaggagcagccacagcggaaatggctgcaagaatgagaagctgttcaacggggagttcaccaagacagaatag

SEQ ID NO: 169104 - DNA, 900 bp, Artificial Sequence
  derived and/or modified sequence
atggacctggtgctgcgggtggccgactactacttcttcaccccctacgtttatcctgctacctggccagaagacgacattttccgacaggcaatctcattgttgatcgtgaccaacgttggggcttacatactgtactttttttgtgcgacactttcttactatttcgtgttcgatcatgccttgatgaaacaccctcaatttttaaagaatcaggttagacgcgaaattaagtttacggtacaggcgctaccatggatctccattctgactgtggcattgttcctgctggagatccgggggtattccaagctgcacgacgatctgggggaattcccttacggactgtttgaattagtcgtctctatcatctcttttctattctttaccgacatgtttatatactggatccacagggggctccatcaccgtttagtgtataaacgacttcataagcctcatcacatttggaagatccctacgcctttcgcaagtcatgctttccatccgatcgatggctttctccagagtcttccctaccatatatacccattcatctttcctctgcataaagtggtatatctttctctgtatatactggttaacatctggacaatttcaatccatgacggggacttccgcgtacctcaaatcctccagccttttataaacggctctgcacaccacacagaccaccatatgttttttgactacaactatggccaatactttaccttatgggaccgcattggaggatcatttaagaacccaagctcttttgagggtaaggggcccttatcctatgtcaaagaaatgacagagggaaagcggtcatcgcattcaggcaatggatgtaagaatgaaaagctcttcaacggcgaattcaccaagacggagtag

SEQ ID NO: 169105 - DNA, 900 bp, Artificial Sequence
  derived and/or modified sequence
atggacctggtgctgcgggtggccgactactacttcttcaccccctatgtgtacccggcaacgtggcctgaggatgacatctttcgccaagcaatctcactcctcattgtcactaacgtcggcgcatacattttatatttcttttgtgccacactgtcgtattatttcgtgtttgatcatgctctaatgaagcatcctcagtttctcaaaaatcaggtgaggagagagataaaattcactgtgcaggctctgccgtggatatctatactgaccgtcgcactattcctgctcgagatccgcggctattccaaacttcacgacgacctgggcgaattcccctatggcttattcgagttggtggtttcgataattagtttcctgttttttaccgatatgtttatttactggatacatcgtggtcttcaccatcgcttagtgtataaaaggctccataagccccatcatatctggaagatccccacaccttttgcctctcatgcttttcacccaattgatggctttttgcagagcctgccctaccacatctacccgttcattttccctttgcataaagtggtgtacctctctctctacatactcgtgaacatctggaccatcagcatccacgacggcgattttcgcgttccacagatactacagcccttcattaacggcagcgcacaccacaccgaccaccacatgtttttcgattataattacgggcagtacttcacactgtgggatagaatcggaggctccttcaagaacccgtcaagcttcgagggaaagggccccctcagttatgttaaagaaatgactgaagggaagaggagtagtcacagcggtaacggctgtaaaaatgaaaaactgtttaacggagagttcaccaagactgaatag

SEQ ID NO: 169106 - DNA, 900 bp, Artificial Sequence
  derived and/or modified sequence
atggacctggtccttcgcgtggcagattactatttcttcaccccatacgtctaccctgcgacttggcccgaggatgacatctttcgccaggctatcagcctcctgatcgtaaccaatgtaggggcttatatcctctacttcttttgtgctacactttcatactattttgtgttcgaccatgctcttatgaaacacccccagtttctgaagaaccaggtccgcagagaaattaagttcacagtccaggcactcccatggatcagcattctgacggtggcgctttttttgttagaaatccgcggatacagcaagctgcacgatgatctcggggaatttccatacgggctttttgagttggtggtgtctatcattagcttcttgtttttcaccgacatgtttatatactggatccacaggggcttacatcataggcttgtgtacaaaagactccataagcctcaccatatttggaaaatccctacaccgttcgcctcacatgctttccaccccatcgacgggtttctccagagtctgccatatcatatctatcctttcatcttccccctccacaaagtggtatatctctcgctctacatcctggtaaacatttggacaataagtattcatgacggtgactttagggttccccagatactgcagcccttcattaacggctctgctcatcacactgatcatcacatgttctttgattacaactacggccaatacttcactctgtgggatagaatcgggggaagctttaagaacccatctagctttgaagggaaggggcctctatcctatgtgaaggagatgacagagggtaaacggtcatcacattctggcaatgggtgcaagaatgaaaagctctttaacggggaattcaccaaaaccgagtag

SEQ ID NO: 169107 - DNA, 900 bp, Artificial Sequence
  derived and/or modified sequence
atggatctggtgttaagagtcgctgattattacttctttactccatacgtttaccccgcaacttggccggaggatgacatttttcggcaggcaataagtctgttaatcgtaacgaatgtgggtgcttacatcctgtacttcttctgtgccaccctgtcatactattttgttttcgaccatgctcttatgaaacatccacagtttctgaagaaccaagttcgccgtgagataaagtttaccgtgcaggctctgccttggatcagcatcctgacggttgcactctttctgctagagattagggggtactccaagctccatgacgacctcggggagttcccatacggactgttcgagctggtagtgtctatcatctcatttcttttcttcacagacatgttcatatattggatccacagaggcctgcatcataggttggtgtacaaacgtctccacaagccgcatcacatttggaagattccgaccccgttcgcatcacatgctttccacccgatagatgggttcttacagtctctgccctaccatatataccctttcatcttccccctacacaaagtggtgtatctctccctgtacatcctggtcaatatctggaccatttccatccacgacggggatttccgcgtgccccagattctgcagcccttcatcaatggaagcgcccatcacacagatcaccacatgttctttgattacaactatggacagtactttacactgtgggatcggattggcggtagtttcaagaacccaagctcttttgagggtaagggcccactgtcatatgtgaaggagatgacagaaggaaagcgctcatcccattctggcaatggttgtaagaatgaaaaattgtttaacggcgagtttacgaaaactgagtag

SEQ ID NO: 169108 - DNA, 2456 bp, Artificial Sequence
  derived and/or modified sequence
atgtttgtataaacaccgtaaacctgcctggtaccaccatgaatgacacaagagctagtttaaaaagaaagcaaagaaacaaacgcaaaacccgaaaccgcatcctccaccgcaaaggtactcggatggggcgcccgccctccccttagtcagaggacaaagggggcgtggccgagcgcgcggcgcccacgtgaccgcggagagctgcgcgcaggcccttcgcgcgatctgccgtcatatcagcttatggcgccggtcgctgattggctggccgctccagcctcccggcccgcttgctggctgcccagctgctaggacagtttgcagagcagtggcgtgcggagcggcggcggaccacctccaggggctaagtgatggatcttgtactccgtgttgcagattactatttttttacaccatacgtgtatccagccacatggccagaagatgacatcttccgacaagctattagtcttctgattgtaacaaatgttggtgcttacatcctttatttcttctgtgcaacactgagctattattttgtcttcgatcatgcattaatgaaacatccacaatttttaaagaatcaagtccgtcgagagattaagtttactgtccaggcattgccatggataagtattcttactgttgcactgttcttgctggagataagaggttacagcaaattacatgatgacctaggagagtttccatatggattgtttgaacttgtcgttagtataatatctttcctctttttcactgacatgttcatctactggattcacagaggccttcatcatagactggtatataagcgcctacataaacctcaccatatttggaagattcctactccatttgcaagtcatgcttttcaccctattgatggctttcttcagagtctaccttaccatatatacccttttatctttccattacacaaggtggtttatttaagtctgtacatcttggttaatatctggacaatttccattcatgacggtgattttcgtgtcccccaaatcttacagccatttattaatggctcagctcatcatacagaccaccatatgttctttgactataattatggacaatatttcactttgtgggataggattggcggctcattcaaaaatccttcatcctttgaggggaagggaccgctcagttatgtgaaggagatgacagagggaaagcgcagcagccattcaggaaatggctgtaagaatgaaaaattattcaatggagagtttacaaagactgaatagattattgcccagttattcttaagtaaggacaaagaaggaaatatcatcgtatttcttttttttaataaggaaaaaataatatccatacagtcaagatacatagtaaatggtatcatttggaaatcagcatcgtgggcactgctgaggaatgatcctagtggtaggtcagaagaagatgctgtgaacaccaggactttaatcttatgcttaaaatgccagatgttgttcgggggacaacttgtatctttctagcagcagatctgtagtttgtatagcctcaacaacaattttaaataagatggagaataaattattgaggggactaggctatatgcatttgccttcatccacccatgtttattaagaatcattgtgcttaataataccaagactaagcaccataaccaagaaatactaatgtaaagattgtttcttgtttcaggaatggttaattcttcaacgttggtatgataatgataacttgttttgacttgaataaagtactacatcagtgtggaaaaaaattctgatacattagcagctatgtaaatgacctaattgatagcaggtgtaataagactatcgtcttcctacacataggaggctcattctctggacacactatcacctattacattttactgattaacaaataaattggaatttaaaaatatcgatatcaccatgatttaatccagatctgggattatgtagctaaacattgtgatgattattatttaaaaccattatttaataagagtaaaaatatgtgaatctggatatatttaaaaaaagaaatttgatgcccagataatatattaggcactactgattttttagttaaattgatgcactacacttttgatgtttgaagttacaaacctgtaatttttttgtaaaggaaataattgccaaatacctaggcccattgctgacgattagttctaaaatcttattcctcctcttctcccctcacttttccctacttcctctgcaaaaagatttaacaaatacattcataaggaaatgtgtgttgtaacaaatatattgcaaaaacatagtttgtaaaggcattctataagctatttatgtaaaatcaataaaagttgatcataattaaactgtatcagttgagtattatagcagcacaaagtattctttgtacagattttgtgccaattt

SEQ ID NO: 169109 - DNA, 2258 bp, Artificial Sequence
  derived and/or modified sequence
tacacctgagcgggctgggccggggggcgatggaataaaagaagatggagagacttcagcgcctgggactcgggtgggcgaggcggaaggtgtcctcgcagcacggcttttctccgcgccgcggttggttagcgagtgccctctgggtgctaggcgttgggcggatggtaggatcgcggtagcatacggatccgagtcctgcgccgagtgagaggagaggctggcaggggctaagtgatggatcttgtactccgtgttgcagattactatttttttacaccatacgtgtatccagccacatggccagaagatgacatcttccgacaagctattagtcttctgattgtaacaaatgttggtgcttacatcctttatttcttctgtgcaacactgagctattattttgtcttcgatcatgcattaatgaaacatccacaatttttaaagaatcaagtccgtcgagagattaagtttactgtccaggcattgccatggataagtattcttactgttgcactgttcttgctggagataagaggttacagcaaattacatgatgacctaggagagtttccatatggattgtttgaacttgtcgttagtataatatctttcctctttttcactgacatgttcatctactggattcacagaggccttcatcatagactggtatataagcgcctacataaacctcaccatatttggaagattcctactccatttgcaagtcatgcttttcaccctattgatggctttcttcagagtctaccttaccatatatacccttttatctttccattacacaaggtggtttatttaagtctgtacatcttggttaatatctggacaatttccattcatgacggtgattttcgtgtcccccaaatcttacagccatttattaatggctcagctcatcatacagaccaccatatgttctttgactataattatggacaatatttcactttgtgggataggattggcggctcattcaaaaatccttcatcctttgaggggaagggaccgctcagttatgtgaaggagatgacagagggaaagcgcagcagccattcaggaaatggctgtaagaatgaaaaattattcaatggagagtttacaaagactgaatagattattgcccagttattcttaagtaaggacaaagaaggaaatatcatcgtatttcttttttttaataaggaaaaaataatatccatacagtcaagatacatagtaaatggtatcatttggaaatcagcatcgtgggcactgctgaggaatgatcctagtggtaggtcagaagaagatgctgtgaacaccaggactttaatcttatgcttaaaatgccagatgttgttcgggggacaacttgtatctttctagcagcagatctgtagtttgtatagcctcaacaacaattttaaataagatggagaataaattattgaggggactaggctatatgcatttgccttcatccacccatgtttattaagaatcattgtgcttaataataccaagactaagcaccataaccaagaaatactaatgtaaagattgtttcttgtttcaggaatggttaattcttcaacgttggtatgataatgataacttgttttgacttgaataaagtactacatcagtgtggaaaaaaattctgatacattagcagctatgtaaatgacctaattgatagcaggtgtaataagactatcgtcttcctacacataggaggctcattctctggacacactatcacctattacattttactgattaacaaataaattggaatttaaaaatatcgatatcaccatgatttaatccagatctgggattatgtagctaaacattgtgatgattattatttaaaaccattatttaataagagtaaaaatatgtgaatctggatatatttaaaaaaagaaatttgatgcccagataatatattaggcactactgattttttagttaaattgatgcactacacttttgatgtttgaagttacaaacctgtaatttttttgtaaaggaaataattgccaaatacctaggcccattgctgacgattagttctaaaatcttattcctcctcttctcccctcacttttccctacttcctctgcaaaaagatttaacaaatacattcataaggaaatgtgtgttgtaacaaatatattgcaaaaacatagtttgtaaaggcattctataagctatttatgtaaaatcaataaaagttgatcataattaaa

SEQ ID NO: 169110 - protein, 390 aa, Artificial Sequence
  derived and/or modified sequence
MNSLSEANTKFMFDLFQQFRKSKENNIFYSPISITSALGMVLLGAKDNTAQQIKKVLHFDQVTENTTGKAATYHVDRSGNVHHQFQKLLTEFNKSTDAYELKIANKLFGEKTYLFLQEYLDAIKKFYQTSVESVDFANAPEESRKKINSWVESQTNEKIKNLIPEGNIGSNTTLVLVNAIYFKGQWEKKFNKEDTKEEKFWPNKNTYKSIQMMRQYTSFHFASLEDVQAKVLEIPYKGKDLSMIVLLPNEIDGLQKLEEKLTAEKLMEWTSLQNMRETRVDLHLPRFKVEESYDLKDTLRTMGMVDIFNGDADLSGMTGSRGLVLSGVLHKAFVEVTEEGAEAAAATAVVGFGSSPTSTNEEFHCNHPFLFFIRQNKTNSILFYGRFSSP

SEQ ID NO: 169111 - DNA, 1173 bp, Artificial Sequence
  derived and/or modified sequence
atgaactctcttagcgaggccaacactaagtttatgttcgatttatttcaacagtttcggaaatcgaaagagaataacattttctacagccctattagtatcaccagcgctctgggtatggttttactgggcgctaaagacaatactgcccagcagatcaagaaagttctccatttcgatcaagtgaccgagaataccacgggcaaagctgccacctaccatgtggaccggtccggcaatgtgcaccaccagtttcaaaagctcctgactgaattcaacaaatctacggacgcctacgagttaaaaatcgctaataaattgttcggcgaaaagacatacctgtttttgcaagaatacctcgacgcaattaagaaattttaccagacgtctgtagaaagtgtggatttcgctaatgccccggaggagagtaggaagaagataaattcttgggtggaatctcagaccaacgagaaaatcaagaacttgattccagaggggaacatcggctcaaacaccacactggtactcgtcaatgccatctattttaaggggcagtgggagaaaaagttcaataaggaggacactaaggaggaaaagttctggccaaacaagaacacctataagagtatccagatgatgcgtcagtacactagcttccacttcgcatccctcgaagatgtgcaggcaaaagtcctggagatcccttataagggtaaagatctctcaatgatagtcctgctgccaaacgagatcgacggactgcagaaactggaggagaaattaaccgccgaaaaactgatggagtggacctctttgcaaaatatgcgagagacccgggtggacttacacttgccgcggttcaaggtggaggaatcctatgacctcaaggatactctgagaactatgggaatggtggacatcttcaacggagacgctgatctcagcggaatgaccggctctcggggtctagttttatccggcgtactgcacaaggccttcgtcgaggtaaccgaggagggagccgaagccgcagccgcgaccgccgtggtcgggttcggatcttcccccacatctacgaatgaggaatttcactgcaatcatccattcctgtttttcataagacaaaacaagacgaatagtatcttgttctacggtcggtttagctctccctag

SEQ ID NO: 169112 - DNA, 1173 bp, Artificial Sequence
  derived and/or modified sequence
atgaacagcctgtctgaggccaacaccaagttcatgtttgacctcttccagcagttcaggaagagcaaggagaacaacatcttctacagccccatcagcatcaccagcgccctgggcatggtgctgctgggcgccaaggacaacacagcccagcagatcaagaaggtgctgcactttgaccaggtgacagagaacaccaccgggaaggccgccacctaccacgtggacagaagtggaaatgtgcaccaccagttccagaagctgctgacagagttcaacaagagcacagatgcctatgagctgaagatcgccaacaagctgtttggagagaagacctacctgttcctgcaggagtacctggatgccatcaagaagttctaccagacctctgtggagagcgtggactttgccaatgcccctgaggagagcaggaagaagatcaacagctgggtggagagccagaccaatgagaagatcaagaacctgatccctgagggcaacatcggcagcaacaccaccctggtgctggtgaatgccatctacttcaagggccagtgggagaagaagttcaacaaggaggacaccaaggaggagaagttctggcccaacaagaacacctacaagagcatccagatgatgaggcagtacaccagcttccactttgccagcctggaggatgtgcaggccaaggtgctggagatcccctacaagggcaaggacctgtccatgattgtgctgctgcccaatgaaattgatggcctgcagaagctggaggagaagctgacagctgagaagctgatggagtggaccagcctgcagaacatgagggagaccagggtggacctgcacctgccccgcttcaaggtggaggagagctatgacctgaaggacaccctgcggaccatgggcatggtggacatcttcaatggagatgctgacctgagcggcatgacaggcagccggggcctggtgctgagcggcgtgctgcacaaggcctttgtggaggtgacagaggagggcgctgaggccgctgctgccacagctgtggtgggcttcggcagcagccccaccagcaccaatgaggagttccactgcaaccaccccttcctgttcttcatccggcagaacaagaccaacagcatcctcttctacggccgcttcagcagcccctag

SEQ ID NO: 169113 - DNA, 1173 bp, Artificial Sequence
  derived and/or modified sequence
atgaacagcctgagcgaggccaacaccaagttcatgttcgacctgtttcagcaatttcgtaaatcaaaggaaaataacattttttacagtccgatcagcatcacctccgctctgggcatggtactgctgggcgctaaggacaacacagcacagcagattaagaaagtgctgcacttcgaccaggtcaccgaaaacaccactggcaaggccgccacttaccacgttgaccgctccggcaacgtacaccatcagttccagaaactgctcacagaatttaataagtccaccgacgcatacgaactgaagattgctaacaaactctttggggagaaaacctatctgttcctccaagagtatctggatgcaataaaaaagttttatcagacatcggtggagtcagtagactttgccaacgccccagaagagagtaggaaaaagatcaatagttgggtggaatcgcagactaacgagaagatcaaaaacctcattccagagggaaatatcggaagcaataccacgctggtgctggtgaatgcaatctattttaaggggcagtgggagaaaaagtttaacaaagaagacacgaaggaggagaagttttggccaaacaaaaatacctataagtctatccagatgatgcggcaatacactagttttcatttcgccagccttgaagacgtgcaggctaaagtacttgagataccatataaaggaaaggatttgagcatgatcgttttattgcctaacgaaatagacggtctccagaagcttgaggaaaagttgacagccgaaaaactaatggagtggaccagcttgcagaatatgagagagacccgcgtggatctccacctgccacgtttcaaagttgaggaatcctatgatttgaaagatactctgagaaccatggggatggtagatatcttcaatggagacgccgatctcagtggcatgacagggtctagagggctggtgctgtcgggtgtcctgcacaaggcctttgtggaggtaacggaagaaggagccgaggctgctgcagctacagcagtggtggggtttggttcctctcccacctccaccaatgaggaatttcattgcaaccatccatttctgttttttattcggcaaaacaaaactaacagtatcttgttttacggaaggttcagcagcccatag

SEQ ID NO: 169114 - DNA, 1173 bp, Artificial Sequence
  derived and/or modified sequence
atgaattccctctccgaagccaacaccaagttcatgttcgacttgtttcagcagtttcgtaagtcaaaggagaacaacatcttctacagcccaataagtatcacatccgccctgggaatggtgctgctgggcgcaaaggacaacacagctcagcagatcaaaaaagtcctgcattttgatcaggtgactgagaataccacagggaaggcagcaacctatcacgtcgacaggagcggtaatgtgcaccaccagtttcagaaactgcttactgaattcaataaaagcactgatgcctacgaactcaagatcgctaacaagctgttcggcgagaagacctatctgtttctccaggaatatctcgatgcgatcaaaaaattctatcagacttctgtggagagcgttgactttgcgaatgccccagaggagagtcgtaagaagatcaactcgtgggtggaatcacagacgaatgagaaaattaagaatctaatccctgaggggaacatcgggagtaatacaactctggtgcttgttaatgccatttactttaaaggtcagtgggagaaaaagtttaataaagaagacactaaggaggagaaattctggcccaacaagaacacctataaaagtatccagatgatgagacaatatacttcatttcatttcgcctccctggaggacgtccaggccaaggtgctggagatcccatataaaggcaaggacctgtcaatgatcgtccttctgcccaacgagatagatggattacaaaagctcgaggagaaactgacagcggagaagctcatggagtggacatcattacagaatatgagagagacaagggtggatctgcatttgcccaggttcaaagtggaggagtcctatgacctgaaagacacactgagaaccatgggcatggtggacatcttcaatggagacgccgacttatccgggatgacagggtcccggggattagtcttgagcggcgtcctgcacaaagccttcgttgaggtgacagaggagggcgcagaagctgctgcagctacggcggtggtagggtttggtagtagccccacatccaccaacgaagaatttcactgtaatcatccctttctatttttcatcaggcagaataaaaccaattccatcctgttttacggccgattcagttcgccgtag

SEQ ID NO: 169115 - DNA, 1777 bp, Artificial Sequence
  derived and/or modified sequence
aaatactaaccacagagggagaggcagcaagaggagaggcataaattcaggatctcacccttcattccacagacacacatagcctctctgcccacctctgcttcctctaggaacacaggagttccagatcacatcgagttcaccatgaattcactcagtgaagccaacaccaagttcatgttcgacctgttccaacagttcagaaaatcaaaagagaacaacatcttctattcccctatcagcatcacatcagcattagggatggtcctcttaggagccaaagacaacactgcacaacagattaagaaggttcttcactttgatcaagtcacagagaacaccacaggaaaagctgcaacatatcatgttgataggtcaggaaatgttcatcaccagtttcaaaagcttctgactgaattcaacaaatccactgatgcatatgagctgaagatcgccaacaagctcttcggagaaaaaacgtatctatttttacaggaatatttagatgccatcaagaaattttaccagaccagtgtggaatctgttgattttgcaaatgctccagaagaaagtcgaaagaagattaactcctgggtggaaagtcaaacgaatgaaaaaattaaaaacctaattcctgaaggtaatattggcagcaataccacattggttcttgtgaacgcaatctatttcaaagggcagtgggagaagaaatttaataaagaagatactaaagaggaaaaattttggccaaacaagaatacatacaagtccatacagatgatgaggcaatacacatcttttcattttgcctcgctggaggatgtacaggccaaggtcctggaaataccatacaaaggcaaagatctaagcatgattgtgttgctgccaaatgaaatcgatggtctccagaagcttgaagagaaactcactgctgagaaattgatggaatggacaagtttgcagaatatgagagagacacgtgtcgatttacacttacctcggttcaaagtggaagagagctatgacctcaaggacacgttgagaaccatgggaatggtggatatcttcaatggggatgcagacctctcaggcatgaccgggagccgcggtctcgtgctatctggagtcctacacaaggcctttgtggaggttacagaggagggagcagaagctgcagctgccaccgctgtagtaggattcggatcatcacctacttcaactaatgaagagttccattgtaatcaccctttcctattcttcataaggcaaaataagaccaacagcatcctcttctatggcagattctcatccccgtagatgcaattagtctgtcactccatttggaaaatgttcacctgcagatgttctggtaaactgattgctggcaacaacagattctcttggctcatatttcttttctttctcatcttgatgatgatcgtcatcatcaagaatttaatgattaaaatagcatgcctttctctctttctcttaataagcccacatataaatgtactttttcttccagaaaaattctccttgaggaaaaatgtccaaaataagatgaatcacttaataccgtatcttctaaatttgaaatataattctgtttgtgacctgttttaaatgaaccaaaccaaatcatactttttctttgaatttagcaacctagaaacacacatttctttgaatttaggtgatacctaaatccttcttatgtttctaaattttgtgattctataaaacacatcatcaataaaatagtgacataaaatca

SEQ ID NO: 169116 - DNA, 1173 bp, Artificial Sequence
  derived and/or modified sequence
atgaacagcctgagcgaggccaacaccaagttcatgttcgacctgttccagcagttcagaaagagcaaggagaacaacatcttctacagccccatcagcatcaccagcgccctgggcatggtgctgctgggcgccaaggacaacaccgcccagcagatcaagaaggtgctgcacttcgaccaggtgaccgagaacaccaccggcaaggccgccacctaccacgtggacagaagcggcaacgtgcaccaccagttccagaagctgctgaccgagttcaacaagagcaccgacgcctacgagctgaagatcgccaacaagctgttcggcgagaagacctacctgttcctgcaggagtacctggacgccatcaagaagttctaccagaccagcgtggagagcgtggacttcgccaacgcccccgaggagagcagaaagaagatcaacagctgggtggagagccagaccaacgagaagatcaagaacctgatccccgagggcaacatcggcagcaacaccaccctggtgctggtgaacgccatctacttcaagggccagtgggagaagaagttcaacaaggaggacaccaaggaggagaagttctggcccaacaagaacacctacaagagcatccagatgatgagacagtacaccagcttccacttcgccagcctggaggacgtgcaggccaaggtgctggagatcccctacaagggcaaggacctgagcatgatcgtgctgctgcccaacgagatcgacggcctgcagaagctggaggagaagctgaccgccgagaagctgatggagtggaccagcctgcagaacatgagagagaccagagtggacctgcacctgcccagattcaaggtggaggagagctacgacctgaaggacaccctgagaaccatgggcatggtggacatcttcaacggcgacgccgacctgagcggcatgaccggcagcagaggcctggtgctgagcggcgtgctgcacaaggccttcgtggaggtgaccgaggagggcgccgaggccgccgccgccaccgccgtggtgggcttcggcagcagccccaccagcaccaacgaggagttccactgcaaccaccccttcctgttcttcatcagacagaacaagaccaacagcatcctgttctacggcagattcagcagcccctag

SEQ ID NO: 169117 - protein, 1998 aa, Artificial Sequence
  derived and/or modified sequence
MEQTVLVPPGPDSFNFFTRESLAAIERRIAEEKAKNPKPDKKDDDENGPKPNSDLEAGKNLPFIYGDIPPEMVSEPLEDLDPYYINKKTFIVLNKGKAIFRFSATSALYILTPFNPLRKIAIKILVHSLFSMLIMCTILTNCVFMTMSNPPDWTKNVEYTFTGIYTFESLIKIIARGFCLEDFTFLRDPWNWLDFTVITFAYVTEFVDLGNVSALRTFRVLRALKTISVIPGLKTIVGALIQSVKKLSDVMILTVFCLSVFALIGLQLFMGNLRNKCIQWPPTNASLEEHSIEKNITVNYNGTLINETVFEFDWKSYIQDSRYHYFLEGFLDALLCGNSSDAGQCPEGYMCVKAGRNPNYGYTSFDTFSWAFLSLFRLMTQDFWENLYQLTLRAAGKTYMIFFVLVIFLGSFYLINLILAVVAMAYEEQNQATLEEAEQKEAEFQQMIEQLKKQQEAAQQAATATASEHSREPSAAGRLSDSSSEASKLSSKSAKERRNRRKKRKQKEQSGGEEKDEDEFQKSESEDSIRRKGFRFSIEGNRLTYEKRYSSPHQSLLSIRGSLFSPRRNSRTSLFSFRGRAKDVGSENDFADDEHSTFEDNESRRDSLFVPRRHGERRNSNLSQTSRSSRMLAVFPANGKMHSTVDCNGVVSLVGGPSVPTSPVGQLLPEGTTTETEMRKRRSSSFHVSMDFLEDPSQRQRAMSIASILTNTVEELEESRQKCPPCWYKFSNIFLIWDCSPYWLKVKHVVNLVVMDPFVDLAITICIVLNTLFMAMEHYPMTDHFNNVLTVGNLVFTGIFTAEMFLKIIAMDPYYYFQEGWNIFDGFIVTLSLVELGLANVEGLSVLRSFRLLRVFKLAKSWPTLNMLIKIIGNSVGALGNLTLVLAIIVFIFAVVGMQLFGKSYKDCVCKIASDCQLPRWHMNDFFHSFLIVFRVLCGEWIETMWDCMEVAGQAMCLTVFMMVMVIGNLVVLNLFLALLLSSFSADNLAATDDDNEMNNLQIAVDRMHKGVAYVKRKIYEFIQQSFIRKQKILDEIKPLDDLNNKKDSCMSNHTAEIGKDLDYLKDVNGTTSGIGTGSSVEKYIIDESDYMSFINNPSLTVTVPIAVGESDFENLNTEDFSSESDLEESKEKLNESSSSSEGSTVDIGAPVEEQPVVEPEETLEPEACFTEGCVQRFKCCQINVEEGRGKQWWNLRRTCFRIVEHNWFETFIVFMILLSSGALAFEDIYIDQRKTIKTMLEYADKVFTYIFILEMLLKWVAYGYQTYFTNAWCWLDFLIVDVSLVSLTANALGYSELGAIKSLRTLRALRPLRALSRFEGMRVVVNALLGAIPSIMNVLLVCLIFWLIFSIMGVNLFAGKFYHCINTTTGDRFDIEDVNNHTDCLKLIERNETARWKNVKVNFDNVGFGYLSLLQVATFKGWMDIMYAAVDSRNVELQPKYEESLYMYLYFVIFIIFGSFFTLNLFIGVIIDNFNQQKKKFGGQDIFMTEEQKKYYNAMKKLGSKKPQKPIPRPGNKFQGMVFDFVTRQVFDISIMILICLNMVTMMVETDDQSEYVTTILSRINLVFIVLFTGECVLKLISLRHYYFTIGWNIFDFVVVILSIVGMFLAELIEKYFVSPTLFRVIRLARIGRILRLIKGAKGIRTLLFALMMSLPALFNIGLLLFLVMFIYAIFGMSNFAYVKREVGIDDMFNFETFGNSMICLFQITTSAGWDGLLAPILNSKPPDCDPNKVNPGSSVKGDCGNPSVGIFFFVSYIIISFLVVVNMYIAVILENFSVATEESAEPLSEDDFEMFYEVWEKFDPDATQFMEFEKLSQFAAALEPPLNLPQPNKLQLIAMDLPMVSGDRIHCLDILFAFTKRVLGESGEMDALRIQMEERFMASNPSKVSYQPITTTLKRKQEEVSAVIIQRAYRRHLLKRTVKQASFTYNKNKIKGGANLLIKEDMIIDRINENSITEKTDLTMSTAACPPSYDRVTKPIVEKHEQEGKDEKAKGK

SEQ ID NO: 169118 - DNA, 5997 bp, Artificial Sequence
  derived and/or modified sequence
atggagcagaccgtgttggtaccgccaggcccggactcgttcaacttttttaccagagaatccctagcggccatagaaagacgcattgcagaggagaaagctaagaaccctaaaccagacaaaaaggacgatgacgagaatggtcccaagcccaactctgatcttgaggccggcaagaatcttcccttcatctatggggatatacctcctgagatggtgtcagagccgctcgaggacctggatccctattacattaacaaaaagacgttcatcgtgttaaacaagggaaaggcaatcttccggtttagtgctacttctgcactgtatatactgaccccatttaaccctctgcgcaaaattgcgattaaaatcctggttcactccttgtttagtatgttgattatgtgtaccatcctgaccaattgcgtgtttatgactatgtccaacccgcccgactggactaagaacgtagaatatacttttaccggaatatacacatttgaatctctgatcaagattatcgcgagaggcttttgtctggaagattttacctttctgagagatccctggaattggctggacttcacagtgatcacctttgcttacgtgaccgagttcgtggatcttgggaatgttagtgccctaagaacttttcgcgtgttgagagccttaaaaactatctctgttatccccgggctcaaaaccattgtcggcgcccttattcaatccgtgaagaagctgtcggatgttatgatcctaacagtcttctgtttgtccgtattcgcacttatcggactgcagcttttcatggggaacctgcggaataagtgcatacagtggccaccgacaaatgcatcattggaggagcacagcattgaaaagaacatcacagtgaactataatggtactctgattaatgaaactgtgttcgaattcgattggaagtcctacatccaggactcgcgataccactactttctcgaggggtttctcgatgctctgctatgcggaaattcctccgatgccgggcagtgtccagagggctatatgtgcgtgaaggccggcagaaaccccaactacggatacaccagttttgacacgttctcgtgggcttttctttccctgtttcgactgatgacacaggacttctgggagaatctgtatcagcttaccttgagggccgccggcaaaacgtatatgatatttttcgttctcgtcattttccttggatccttctacctgattaacctgattctggccgtcgtcgcaatggcctatgaggagcaaaatcaggccacactggaagaagccgaacaaaaggaagcagaattccagcagatgatcgagcagttgaagaagcagcaagaagcagcccagcaggcggcgaccgccaccgcatctgaacactcccgggagccgagcgctgcgggaagactgagcgactcgtcctcagaggcttccaaattgagttccaagtctgccaaggaacgtaggaaccgcagaaagaagagaaagcaaaaagaacagagcggcggggaggagaaggacgaggatgaattccagaagagtgagtccgaggactccatcagacgcaagggtttcaggttcagtattgagggcaacagacttacttatgagaagagatacagctctccacatcagagtctgctcagtatccgcggcagtctcttctcaccccggaggaacagccggactagcttattttcattccggggccgagccaaagacgttgggagtgagaatgattttgcagacgacgaacattctacgtttgaggataatgagagtcgcagagactcattatttgtccccaggagacacggcgaacggagaaactcaaatttgtcacagaccagccgatctagccgtatgctggctgtcttccccgccaacggcaagatgcactcgactgttgactgcaacggtgtggtgtccttggttggaggaccttctgtaccaacttcaccagtggggcagctgctgcccgagggtacaacaacagagactgaaatgaggaagcgcaggtcctcctcatttcacgtgtctatggattttcttgaggacccctctcaaaggcaacgcgccatgagcatagccagtattttgacgaacacggtggaagagctggaagaatcccgacagaagtgtccaccttgttggtataagttcagcaacatcttcctgatatgggactgttcaccctattggctgaaggttaaacacgttgttaaccttgttgtgatggatcccttcgtagatctggccatcaccatttgtattgtactcaatacactgttcatggctatggaacactaccctatgacagatcacttcaacaatgttcttacggtcggaaacttggttttcaccggcattttcacagctgagatgttcctgaagatcattgctatggacccttattattatttccaagagggttggaatatctttgacggctttatcgtgacactgagcctggtagagctcggtttagcaaacgtggaggggctctctgttttaagatcattccgcttattgagggtgttcaaactcgctaagtcgtggccaacgctgaatatgctgataaaaattattggtaacagcgtaggggcccttggaaacctgactttggtcctggctatcattgtcttcatcttcgccgtagtgggaatgcagctgttcggcaaatcctacaaggactgtgtttgtaagattgcctcagattgtcagctgcctcggtggcacatgaatgacttcttccattcctttctgattgtgtttagagtcctgtgcggagagtggatagaaacaatgtgggactgcatggaagtcgctggtcaggcaatgtgccttaccgtttttatgatggtgatggtcataggtaatctggttgtgctcaacctattcctagctttgctcctgtcctcattcagtgctgacaacctggcggccacagatgacgacaatgagatgaacaacctgcaaatagcggtcgacagaatgcacaagggcgtggcatatgttaaacggaagatttatgaattcattcaacaaagctttataaggaagcagaagatactggacgagatcaagcccctcgatgatctcaacaataagaaggattcttgtatgagcaaccatacggccgaaattggaaaggatctggactacttgaaggatgtgaacggcaccacttccggtatagggactggaagcagcgtggagaagtatatcattgacgagtcagactacatgtccttcataaataatcctagtctcacagtgactgtacctattgcagtaggggagagcgatttcgagaatctcaatacagaggatttttctagcgaaagtgacctggaggagagtaaagaaaaactgaacgaatcgtcctcaagctctgagggctcaacagtggatattggcgcaccagtcgaggaacaacctgttgtggaacccgaagagaccctggagccagaggcttgcttcaccgaagggtgcgtgcaacgcttcaagtgttgccagattaacgtggaggagggacggggcaagcagtggtggaatctgagacggacttgttttcgcatcgtcgagcacaattggtttgaaaccttcattgtgtttatgattctgctgtccagtggcgcgctagcttttgaggatatctacatcgaccagcgcaaaaccataaagactatgcttgagtacgctgacaaggtgttcacatacatttttattttagaaatgctgctgaaatgggtagcttacggttatcaaacctacttcactaatgcatggtgttggctggactttcttattgtcgatgtatcactggttagcctgacagcaaacgctctggggtatagcgagttaggggccattaagagcctgcgcactctccgtgccctgcggcctctgagggccttatcccgattcgaagggatgcgcgtggttgttaatgctttactgggggctataccttccattatgaacgttctgctggtgtgcttgatattctggttaatattcagtatcatgggcgtcaacctatttgcaggcaagttctaccactgcattaacacaacaacaggagaccgcttcgatattgaggatgttaacaaccacacagactgtttaaagctcatagagagaaatgagaccgcccgctggaagaacgtgaaggtaaacttcgataatgtgggttttggctatctgtctctcctccaggtcgccacatttaaaggatggatggacataatgtatgcagccgtggattctaggaatgtggaacttcaaccgaaatacgaggagtccttgtatatgtatctgtattttgtgatatttatcatctttggttcatttttcacactgaatctcttcatcggggttatcatcgacaatttcaaccagcaaaaaaaaaagtttgggggccaggacatattcatgaccgaggaacagaagaagtactacaacgccatgaaaaaactggggtccaagaagcctcagaagcccatccctaggcccggcaacaaatttcagggtatggtttttgattttgtcacgcgacaagtgtttgacatctcaatcatgattctaatctgcttgaatatggtgaccatgatggtcgagaccgacgaccaatctgagtatgtgaccacgatcctgagtcgaataaatcttgtatttatcgtactctttaccggtgagtgtgtgcttaagcttatctccctgcgtcattactacttcactatcgggtggaacatctttgatttcgtggtcgtaattctctcgatcgtgggtatgtttctggcagaacttatcgagaaatactttgtgagcccgaccctgttccgggtgatccgcctagccagaattgggcggattctgagactaattaaaggcgcaaaaggaataagaacactcctcttcgccctgatgatgagcctccctgcccttttcaatatcgggctcttactcttcctggtgatgttcatttatgctatctttggaatgtccaatttcgcatacgttaagcgggaagtcggcatcgatgacatgttcaacttcgagacttttggaaacagcatgatttgtctcttccagattacgacaagtgctggctgggatggcctgctggcccccatcctgaactcaaagccccctgactgcgaccctaataaggtaaatcccggctcttccgtgaagggagattgcgggaaccccagcgtaggaatatttttttttgtgtcttacattattatttccttcctggtcgttgtcaacatgtacattgccgttatcctcgaaaacttctcagtagccactgaggaaagcgctgaaccattatccgaagacgatttcgagatgttctatgaggtgtgggagaaattcgaccctgacgcaacccagtttatggagtttgagaagctctctcagtttgccgcggctctcgaaccgcccttgaaccttccacagccgaataagctccaactgattgcaatggacctacccatggtgtccggcgaccgaattcattgtctggacatcctatttgcttttaccaagcgggtactgggtgagtcaggtgaaatggacgcactgcgcatacagatggaggagcgttttatggcctctaatcccagtaaggtgagctaccagcccataactacaacacttaaaaggaagcaggaagaggtctccgccgtgatcatccaacgagcttatcgccgccacttattgaaacgcacagttaaacaggcttcattcacctacaacaagaataaaattaaagggggggccaatcttctgatcaaggaagatatgatcatcgatcggataaacgagaactcgatcaccgaaaaaacagaccttactatgtcgactgctgcctgccccccttcatatgatcgcgtgaccaagcccatcgtagaaaaacatgaacaggaagggaaggatgaaaaagctaagggaaaatag

SEQ ID NO: 169119 - DNA, 5997 bp, Artificial Sequence
  derived and/or modified sequence
atggagcagacagtgctggtgcccccaggccctgacagcttcaacttcttcacccgggagagcctggccgccattgaaagaagaattgctgaggagaaggccaagaaccccaagccagacaagaaggatgatgatgaaaatggccccaagcccaacagcgacctggaggccggcaagaacctgcccttcatctatggagacatccccccagagatggtgtctgagcccctggaggacctggacccctactacatcaacaagaagaccttcatcgtgctgaacaagggcaaggccatcttccgcttcagcgccaccagcgccctgtacatcctgacccccttcaaccccctgaggaagatcgccatcaagatcctggtgcacagcctcttctccatgctgatcatgtgcaccatcctgaccaactgtgtgttcatgaccatgagcaaccccccagactggaccaagaatgtggagtacaccttcaccggcatctacacctttgagagcctcatcaagatcatcgcccggggcttctgcctggaggacttcaccttcctgcgggacccctggaactggctggacttcaccgtcatcacctttgcctacgtgacagaatttgtggacctgggcaatgtgtctgccctgcggaccttccgggtgctgcgggccctgaagaccatcagcgtcatccctggcctgaagaccatcgtgggcgccctgatccagagcgtgaagaagctgagtgatgtgatgatcctgaccgtcttctgcctgtctgtgtttgccctgattggcctgcagctgttcatgggcaacctgaggaacaagtgcatccagtggccacccaccaatgccagcctggaggagcacagcattgagaagaacatcaccgtgaactacaacggcaccctcatcaatgagaccgtgtttgaatttgactggaagagctacatccaggacagccgctaccactacttcctggagggcttcctggatgccctgctgtgtggcaacagcagtgatgctggccagtgcccagagggctacatgtgtgtgaaggccggcaggaaccccaactacggctacaccagctttgacaccttctcctgggccttcctgagcctcttccggctgatgacccaggacttctgggagaacctgtaccagctgaccctgcgggctgctgggaagacctacatgatcttctttgtgctggtgatcttcctgggcagcttctacctgatcaacctgatcctggccgtggtggccatggcctatgaggagcagaaccaggccaccctggaggaggccgagcagaaggaggccgagttccagcagatgattgagcagctgaagaagcagcaggaggccgcccagcaggccgccacagccacagccagcgagcacagccgggagcccagcgctgctggccgcctgagtgacagcagcagcgaggccagcaagctgagcagcaagagcgccaaggagaggaggaacagaaggaagaagaggaagcagaaggagcagagcggcggggaggagaaggatgaagatgagttccagaagtctgagagcgaggacagcatccggaggaagggcttccgcttcagcattgagggcaaccggctgacctatgagaagcgctacagcagcccccaccagagcctgctgagcatccggggcagcctcttcagccccaggaggaacagcaggaccagcctcttctccttccggggccgggccaaggatgtgggctctgaaaatgactttgctgatgatgagcacagcacctttgaagataatgaaagccggcgggacagcctgtttgtgccccggcggcacggggagaggaggaacagcaacctgagccagaccagccgcagcagcaggatgctggccgtgtttcctgccaacgggaagatgcacagcacagtggactgcaatggagtggtgtccctggtgggcggccccagcgtgcccaccagccctgtgggccagctgctgcctgagggcaccaccacagaaacagagatgaggaagagaagaagcagcagcttccacgtgtccatggacttcctggaggaccccagccagaggcagagggccatgagcatcgccagcatcctgaccaacacagtggaggagctggaggagagccggcagaagtgccccccctgctggtacaagttcagcaacatcttcctgatctgggactgcagcccctactggctgaaggtgaagcacgtggtgaacctggtggtgatggacccctttgtggacctggccatcaccatctgcatcgtgctgaacaccctcttcatggccatggagcactaccccatgacagaccacttcaacaacgtgctgactgtgggcaacctggtgttcaccggcatcttcaccgctgagatgttcctgaagatcatcgccatggacccctactactacttccaggagggctggaacatctttgatggcttcatcgtgaccctgagcctggtggagctgggcctggccaacgtggagggcctgtctgtgctgcgctccttccggctgctgcgggtcttcaagctggccaagtcctggcccaccctgaacatgctgatcaagatcatcggcaacagcgtgggcgccctgggcaacctgaccctggtgctggccatcatcgtgttcatctttgctgtggtgggcatgcagctgtttgggaagagctacaaggactgtgtgtgcaagatcgccagtgactgccagctgccccgctggcacatgaatgacttcttccacagcttcctgattgtgttccgggtgctgtgtggggagtggattgagaccatgtgggactgcatggaggtggccggccaggccatgtgcctgactgtgttcatgatggtgatggtgattggcaacctggtggtgctgaacctcttcctggccctgctgctgagcagcttctctgctgacaacctggccgccacagatgatgacaatgagatgaacaacctgcagattgctgtggacaggatgcacaagggcgtggcctacgtgaagaggaagatctatgagttcatccagcagagcttcatcaggaagcagaagatcctggatgagatcaagcccctggatgacctgaacaacaagaaggacagctgcatgagcaaccacacagctgagatcggcaaggacctggactacctgaaggatgtgaatggcaccaccagcggcattggaacaggcagctctgtggagaagtacatcattgatgaaagtgactacatgtccttcatcaacaaccccagcctgactgtgacagtgcccatcgctgtgggggagagtgactttgagaacctgaacacagaggacttcagcagcgagagtgacctggaggagagcaaggagaagctgaatgaaagcagcagcagcagcgagggcagcacagtggacatcggggcccctgtggaggagcagcctgtggtggagcctgaggagaccctggagcctgaggcctgcttcacagagggctgtgtgcagcgcttcaagtgctgccagatcaacgtggaggagggccggggcaagcagtggtggaacctgcggaggacctgcttcagaattgtggagcacaactggtttgagaccttcatcgtgttcatgatcctgctgagcagcggggccctggcctttgaggacatctacatcgaccagaggaagaccatcaagaccatgctggagtatgctgacaaggtgttcacctacatcttcatcctggagatgctgctgaagtgggtggcctacggctaccagacctacttcaccaatgcctggtgctggctggacttcctgattgtggatgtgtccctggtgtccctgacagccaatgccctgggctacagcgagctgggcgccatcaagagcctgcggaccctgcgggccctgcggcccctgcgggccctgagcagatttgagggcatgagggtggtggtgaatgccctgctgggcgccatccccagcatcatgaatgtgctgctggtgtgcctgatcttctggctgatcttcagcatcatgggcgtgaacctgtttgctgggaagttctaccactgcatcaacaccaccaccggggacagatttgatattgaagatgtgaacaaccacacagactgcctgaagctgattgaaagaaatgaaacagcccgctggaagaatgtgaaggtgaactttgacaacgtgggcttcggctacctgagcctgctgcaggtggccaccttcaagggctggatggacatcatgtatgctgctgtggacagcagaaatgtggagctgcagcccaagtatgaggagagcctgtacatgtacctgtacttcgtcatcttcatcatcttcggcagcttcttcaccctgaacctcttcatcggggtcatcatcgacaacttcaaccagcagaagaagaagtttggaggccaggacatcttcatgacagaggagcagaagaagtactacaatgccatgaagaagctgggcagcaagaagccccagaagcccatccccaggcctggcaacaagttccagggcatggtgtttgattttgtgacccggcaggtgtttgacatcagcatcatgatcctgatctgcctgaacatggtgaccatgatggtggagacagatgaccagagtgaatatgtgaccaccatcctgagccgcatcaacctggtgttcatcgtgctcttcaccggggagtgtgtgctgaagctgatcagcctgcggcactactacttcaccatcggctggaacatctttgattttgtggtggtgatcctgagcatcgtgggcatgttcctggccgagctgattgagaagtactttgtgagccccaccctcttccgggtcatccggctggcccgcatcggccgcatcctgcggctcatcaagggggccaagggcatccgcaccctgctgtttgccctgatgatgagcctgcctgccctcttcaacatcggcctgctgctcttcctggtgatgttcatctatgccatcttcggcatgagcaactttgcctacgtgaagcgggaggtgggcattgatgacatgttcaactttgagacctttggaaacagcatgatctgcctcttccagatcaccaccagcgctggctgggatggcctgctggcccccatcctgaacagcaagcccccagactgtgaccccaacaaggtgaaccctggcagctctgtgaagggggactgtggcaaccccagcgtgggcatcttcttctttgtgtcctacatcatcatctccttcctggtggtggtgaacatgtacatcgccgtcatcctggagaacttctctgtggccacagaggagagcgctgagcccctgtctgaagatgactttgagatgttttatgaggtgtgggagaagtttgatcctgatgccacccagttcatggagtttgagaagctgagccagtttgctgctgccctggagccccccctgaacctgccccagcccaacaagctgcagctgattgccatggacctgcccatggtgtctggggaccgcatccactgcctggacatcctgtttgccttcaccaagagggtgctgggggagagcggggagatggatgccctgcgcatccagatggaggagcgcttcatggccagcaaccccagcaaggtgtcctaccagcccatcaccaccaccctgaagaggaagcaggaggaggtgtctgctgtgatcatccagagggcctaccgccgccacctgctgaagaggacagtgaagcaggccagcttcacctacaacaagaacaagatcaagggcggggccaacctgctgatcaaggaggacatgatcatcgaccgcatcaatgaaaattccatcacagagaagacagacctgaccatgagcacagctgcctgcccccccagctatgacagagtgaccaagcccatcgtggagaagcatgagcaggagggcaaggatgagaaggccaagggcaagtag

SEQ ID NO: 169120 - DNA, 5997 bp, Artificial Sequence
  derived and/or modified sequence
atggagcagaccgtgctggtgccccccggccccgacagcttcaacttttttacccgagagtccctcgcagctattgagagacgaatcgcagaagagaaggcaaagaatccaaaaccggataagaaggacgatgacgaaaacggccccaagcccaactcagacctcgaagccggaaaaaacttgccgtttatttatggcgacatccctcctgagatggtgtccgaacctttagaagatctggatccttactatattaataaaaagacttttattgtgttgaacaaagggaaggctattttcaggttttccgccacatcagccttgtatatcctgacccccttcaatcccctccgcaaaatcgctattaagatccttgtgcatagtctgttcagcatgctgattatgtgcacgattttgaccaattgtgtctttatgacaatgagtaatcctcccgattggacaaaaaatgtcgaatatacctttactgggatttacacctttgagtctttaatcaagatcattgcccgcggcttttgccttgaggatttcacatttctaagggacccttggaattggctggactttaccgtgattactttcgcgtatgtcaccgagttcgtggatctgggtaatgtgagcgccctcagaactttccgcgtgctaagggcgctcaaaactatcagtgttattcccggtctcaagaccattgtcggtgccctgattcaatcagtaaaaaagctctccgacgtgatgatcctgacagtgttctgtctttcagtctttgcgctgattggcctgcagctgtttatgggaaaccttcggaacaagtgcatacaatggccccccaccaatgccagtcttgaggaacactcaattgagaaaaatattactgtaaattataacggtacactgattaatgaaaccgtgtttgagttcgactggaagtcatacatccaagactcccgataccattactttttggaggggttcctggacgcactgctgtgtggaaactctagcgatgccggacagtgccccgagggatatatgtgtgtcaaggctggacgcaatccaaattacggatacacatcctttgacacgttttcttgggcatttctgtcattattcagactcatgactcaggacttttgggagaatctctaccagctcacactgcgggctgctggcaagacgtatatgattttcttcgtgcttgtgatttttctcgggtccttctatttgattaacctcatactggctgtcgtggcgatggcttacgaggaacagaaccaggccacgctcgaagaggccgaacagaaggaagctgaattccagcagatgatcgaacagttgaagaaacaacaggaggctgcccagcaggcagctactgctacagcctcggaacatagccgggagccctccgcagccggacgcttgtctgattccagctctgaggcttccaagctgtcgagtaaatctgcaaaggagaggcggaacaggagaaagaagagaaagcagaaagagcagtccggcggcgaggagaaagacgaggatgaatttcaaaaatccgagagtgaagactccattcggaggaaaggtttccgcttcagcattgaaggcaatcggttgacctacgagaaaagatactcttcaccccaccagagcttgctctccattcggggatcattgtttagcccacggagaaattctaggacttcgttgttttcattcagaggacgggctaaagatgttggctccgaaaacgactttgcagatgacgagcactcaacttttgaggacaacgagtcacgtcgagattctcttttcgtcccccgtcggcatggcgagcgccggaattccaacttgagccaaacctctcgttctagccggatgctggccgtctttcctgcaaatgggaaaatgcacagcacggtcgactgtaatggtgtggtcagcttggtaggcggaccatccgtaccgacttcaccggtcggccagctgttgcctgagggcactactaccgaaactgagatgcgcaagcgacggtcatcctctttccatgtgagtatggatttcctagaggacccaagccagcgtcagcgagctatgtccattgcatcaattttgaccaataccgtggaagagctagaggagtcaaggcagaaatgtcccccatgctggtataaatttagcaatatatttctcatttgggactgttccccgtattggctcaaggtgaaacatgtggtgaacttggtggtcatggatccttttgttgatttagctatcaccatctgtatagtacttaacacactgtttatggctatggagcactatcccatgaccgatcatttcaataacgtcctcactgttggtaatttggtgttcacaggcatctttactgcggaaatgtttctcaagattattgccatggacccgtattattattttcaggagggctggaatatctttgatgggttcattgtgaccctttcactggtagagctgggtctcgccaatgtcgaaggactttccgtcctccggtcctttcgattgttgagggtgttcaagctcgcaaaatcctggccaacgctgaacatgctaataaaaattattggtaacagcgttggtgccctgggaaatttgacgcttgtgcttgccattatcgttttcatatttgcagtggtcggaatgcagttattcggcaagtcgtacaaagattgtgtgtgtaagatagcctccgattgtcagttgccacgttggcatatgaatgactttttccacagtttccttatagtctttagagtactctgtggagagtggattgagaccatgtgggattgtatggaggtcgccggccaggctatgtgcctcaccgtttttatgatggtcatggtcattggcaacttggtagtcctcaatttgttcttagctctgctgctgtcctctttcagcgccgacaaccttgccgccaccgatgatgacaatgagatgaataacctccaaatagcggtagatcgaatgcataaaggtgtggcctacgtgaaacgcaaaatttatgagtttattcagcagtcctttatcaggaaacagaagatattggatgagataaaacccctggacgaccttaataataagaaagatagctgtatgtccaatcacacagcggagataggaaaagaccttgattatctgaaggacgtcaatggcactaccagcgggataggcaccgggagtagtgtggagaaatatattattgacgagtcagattatatgtcattcattaacaaccctagcttaactgtaacagtacccattgcagtgggggagagcgacttcgagaatctgaacactgaggacttttcctcggagagtgaccttgaggagagcaaggaaaaattgaacgagtccagttcttcctcagaggggtccactgtggatatcggcgctcccgtagaagaacaacctgtcgtggagcccgaggagaccctggagccagaagcctgctttacggaggggtgtgtgcaaagattcaagtgctgtcagatcaatgttgaggaggggcggggtaagcagtggtggaatctgcgcaggacttgcttcaggattgtggagcacaattggttcgaaaccttcatagtgtttatgatcttgcttagttctggagcccttgcttttgaggacatctatatcgatcaacggaagactattaagacaatgctagaatacgccgataaagtgttcacctacatcttcattctggagatgctgctaaagtgggtggcttacggttatcagacctactttaccaacgcatggtgctggctggattttctaatagttgatgtgtcactggtcagcctgaccgccaatgcccttgggtacagtgagctaggggcgatcaaatccctgcgaacactgcgggccctccggccactacgggccctctcacggtttgagggaatgcgtgtggtggtgaacgctctgctcggtgccataccctctatcatgaatgtgcttctggtctgtctaatcttttggttaattttctcaatcatgggggtcaatttattcgctggcaaattctaccactgtatcaatacaaccacaggcgaccgtttcgatatcgaggacgtcaataatcataccgactgtctgaagctgatagaacgcaatgaaactgctagatggaaaaacgtgaaagtgaatttcgacaacgttgggttcgggtacctgtcgctcctacaggtagctacttttaagggatggatggatataatgtacgctgcagttgattcaagaaatgtggagttacagcctaaatacgaagagagcttgtacatgtacctctactttgtgattttcataattttcgggagcttctttacgctgaatctgttcatcggcgttatcatagacaactttaaccaacagaagaaaaagttcggcgggcaggacatctttatgactgaagagcagaaaaaatattacaacgccatgaaaaagctaggatcgaaaaaaccgcagaagcccatcccccggccaggaaataaatttcagggcatggtgttcgactttgtgactagacaggttttcgacatcagcataatgattctcatctgtctgaatatggtgacaatgatggttgaaactgacgatcaatctgagtacgtcacaaccattctttccagaatcaacctagtattcattgtgctgtttaccggtgagtgtgtgctgaagctaatctccttgcggcattattactttaccatcggctggaatatctttgacttcgttgtcgtcatcctaagcatcgtggggatgttcctcgcagaattaattgagaagtatttcgtgtcgcctactctgtttcgcgtgattcgattagcaaggattgggagaatcctccggctaatcaaaggtgcaaagggaatacgaaccctgctgtttgcactgatgatgagcctgccagcactgtttaatatcggccttcttttattcttggtgatgttcatctacgccatattcgggatgtctaattttgcgtatgtcaagcgggaggttggcattgacgatatgtttaacttcgaaacattcggcaattcaatgatttgcctgtttcaaattaccacatctgcaggttgggatgggctgctcgcccccattctgaattcaaaaccacccgattgcgatcctaacaaggtgaatcccgggagcagcgtgaagggtgactgcggaaatccctcagtgggcatctttttcttcgtctcatacatcattatatcattcctagttgtggtgaacatgtacatcgcagttattctggagaacttctccgtagccactgaggagtctgccgagcccctatctgaagatgacttcgagatgttctatgaggtttgggagaagttcgatcccgatgcgacccagtttatggaatttgaaaagctcagtcagttcgccgccgctcttgaacccccacttaacctgccacagccgaataagctgcagctgattgctatggatctcccgatggtgagtggggataggattcattgcttggacatattatttgcctttacaaagcgagttttaggggagagtggggagatggacgcgctccgcatccagatggaggaaagatttatggctagcaatccctctaaagtgagttatcagccaataacaactacattaaaacggaaacaagaggaagtgtcagccgtgattatccagagagcatatcggcgacatctcctaaagaggaccgtcaagcaggcatcgttcacctataataaaaacaagatcaaaggcggtgccaacctgttgatcaaggaagatatgatcatcgatcgcattaatgaaaactccattacagagaaaacggacctcaccatgtcaactgctgcctgcccgccatcatacgatagggtcacaaagccgatcgtggaaaaacacgagcaagaaggtaaagatgagaaggccaagggcaaatag

SEQ ID NO: 169121 - DNA, 5996 bp, Artificial Sequence
  derived and/or modified sequence
atggaacagaccgtcctggtccctccaggccctgactcgttcaacttttttactcgggagagcttggccgctatagagagacgcatcgccgaggaaaaggcaaagaacccaaagccagacaagaaggatgacgatgagaatgggccaaaacccaattccgaccttgaagccggaaagaacctgcccttcatttatggtgacatcccacccgagatggtttccgaaccgttagaagacctcgatccctactacatcaataaaaaaacgttcatcgtattgaacaagggcaaagcaatctttcgcttctccgccacatccgctctctatatcttgacgcccttcaaccctctgcgaaagattgccattaagatactggtgcacagcttgttttccatgcttataatgtgcacaatcctgacgaattgtgtatttatgaccatgtctaacccgcctgattggactaaaaatgtagaatatactttcacagggatctatacctttgagagcctgataaagattatcgccagaggattttgtctcgaggactttacattcctacgggatccttggaattggcttgatttcaccgtcattaccttcgcttacgtgacggaattcgtagacctgggaaatgtctcagcattaaggacgttccgtgttctgcgggctctgaagactatttcggtgattcctgggctcaaaacaattgtgggggctctgatacaaagtgtgaagaagctctctgacgtcatgatcttaacagtgttctgtctgtcggtatttgccttaataggactccagctgtttatgggaaacctgagaaacaaatgcattcagtggccaccaacgaacgcttccctggaagagcactcaattgaaaaaaatatcacagtgaattataacggcacacttatcaatgagacagtcttcgagtttgactggaagtcttatattcaggattcaagataccattatttcttggagggtttcctggacgccttattgtgcggaaactcctcagatgcaggtcagtgtcccgagggctatatgtgcgtaaaggcaggccgaaatcctaactacgggtataccagctttgatacgtttagttgggcttttcttagcctgttccgactgatgacgcaggacttctgggaaaatctgtatcagctaactctgcgagctgccggaaaaacctacatgatcttcttcgtgctggtgatcttccttgggagtttctatcttattaatctgattctcgcagtagtggccatggcatatgaagaacagaaccaggctacgctggaggaagccgagcagaaagaagctgaatttcagcaaatgattgagcagctcaagaagcagcaagaggcggcacaacaggcggctaccgctacggcttccgagcatagccgcgaacccagcgccgctggcagactgtcagacagctccagtgaggcttccaagctttcaagtaagagcgccaaggagcgtagaaaccgcagaaaaaagcgtaaacagaaagagcagtcaggaggagaggagaaggacgaagatgagttccagaaatctgaatcagaggatagcattcgtaggaaagggttccgcttttcaatagagggaaacagactcacctacgagaaacgctatagttcaccccaccagagcttgttgagtattagaggcagtctcttcagcccccgaagaaacagtagaacaagtctctttagcttccggggaagagctaaagatgttggaagcgaaaatgacttcgcagatgacgaacactcaactttcgaggataatgagtccagacgggattctctctttgtacctcgtcgacatggggaaaggcgtaactccaacctgtcccagacatcacggagctctcgaatgctcgcagtgttccctgctaatggcaagatgcactctaccgtggactgcaacggcgtagtgagcttagtcggagggcctagcgtgcctacatcacccgtcggacagctgctgcctgagggcactaccactgaaacggaaatgcggaagaggcgctcctccagctttcacgtgagtatggattttctcgaagatccctcacagaggcagcgcgctatgtccatcgcctccatcttgaccaatactgtagaggaactggaagagagtaggcagaaatgcccaccttgttggtataagttcagcaatatttttctcatctgggactgcagtccctattggctgaaagttaaacatgtagtaaatcttgtggtcatggatccattcgtggacctggccatcaccatatgcatcgtccttaataccctgtttatggcaatggagcattatcccatgaccgaccattttaacaacgttttaaccgtgggtaatttagtctttacaggcatctttacggccgagatgtttcttaagatcatcgccatggatccatactactacttccaggaaggatggaacatttttgatggattcattgtcactctcagcctcgttgagctcggactggccaacgtggagggtttatcagttctgcgctcttttcgattactaagggtgtttaagttggcaaaaagctggcccacgctcaacatgctaataaaaatcataggcaactcggtcggagctctggggaatctaactctcgtgctcgccattattgtctttatatttgctgttgtgggcatgcagttgtttggcaagagttacaaagattgtgtttgcaagatcgcgtcagattgccagctgccccgttggcacatgaatgatttcttccactctttcctgatcgtcttcagggtcttgtgtggtgagtggatcgagactatgtgggattgtatggaggtcgccggacaagcaatgtgtctcacggtttttatgatggttatggttatagggaatttggtggttttgaatttgtttttggccctcctgctgtcatccttctcagcagacaatctggctgccactgatgacgataacgagatgaataatttgcaaatcgccgttgaccggatgcacaagggtgtagcctacgtcaagcgcaagatttatgaattcattcaacaatctttcattcgaaagcagaagatcctcgatgagataaaaccactggatgatctcaataataagaaagactcttgcatgtcaaatcacactgccgagatcgggaaggatctcgactacctaaaggacgtgaacgggaccacatccggaataggcaccggaagtagcgtcgagaagtatattattgatgagagtgattacatgtcatttattaacaatcccagccttaccgtcactgtgccaattgctgtcggcgagtccgattttgagaatctcaatactgaggacttctctagcgaaagcgacctggaggagagcaaggagaaactcaatgaatcatcctcatcctctgaaggctctacggttgatatcggcgcacccgtggaggagcagcccgtggtggagccggaagaaactttggagcccgaagcctgcttcactgaagggtgtgtgcagagattcaaatgctgtcaaatcaacgtagaagaaggaagaggaaagcaatggtggaatctgcggagaacctgttttagaattgtggaacataactggtttgagaccttcatagtcttcatgattttgctgtccagcggagctttagcatttgaagacatctacattgaccagcgcaagaccatcaaaacgatgttggaatacgctgacaaagtgttcacgtacatatttatcctggaaatgttactgaagtgggtggcatacggataccaaacgtactttaccaatgcttggtgttggctcgattttctgatcgtggatgttagtctggttagcctgaccgccaatgcgctgggctattcagagctgggcgctataaagtcacttaggacgctgcgggcacttcgcccactgagagcactaagccgatttgaaggaatgcgggtggtcgtaaacgctttgctcggggcaattcccagcatcatgaatgtgctgctggtatgcttgattttttggctgatcttctccatcatgggggtgaacctgttcgccggaaagttctatcactgcataaatactactactggggatcgatttgatattgaggatgtcaataatcacactgactgcctcaaactgattgagcggaacgagacagcccgatggaagaacgtgaaggtaaatttcgacaatgttggctttggctacttatcactcctccaggttgccacttttaaaggctggatggacattatgtacgcagccgttgacagcaggaacgtggagctgcagcccaagtatgaggagagcctgtacatgtacctgtacttcgtgatatttatcattttcggcagcttctttacactaaatctgttcatcggcgtgatcatcgacaacttcaaccagcagaaaaaaaagttcggagggcaggacattttcatgactgaggagcagaaaaaatactacaacgcaatgaagaaactgggtagtaaaaagcctcagaagccgattccacggcctggaaataaattccaaggcatggtttttgattttgtaacccggcaggtgttcgacatctctatcatgatcttgatctgtttaaacatggttacaatgatggtggaaactgatgaccagagtgagtacgtcacaaccatattaagccgaattaatttggtctttattgtgttgttcactggtgagtgtgtgctgaaactaatttccctcaggcattattacttcaccatcggatggaatattttcgattttgtggttgtgatcctctctattgtgggcatgtttctggccgaactgattgaaaagtattttgtgtcccccaccctcttcagagtgattagattagccaggatcggacgtattctgcgcctcataaaaggtgccaagggcatacgcacactgttgttcgcgctgatgatgagtctgcctgcactgttcaatataggactgctactcttcttagtgatgtttatttacgctatattcgggatgagtaacttcgcatatgtgaaaagggaagtggggatcgatgatatgttcaactttgaaacattcgggaattccatgatctgtcttttccaaatcactacaagtgctggatgggacggcttgcttgccccaatcctaaactccaaacccccagattgcgaccccaacaaggtgaaccctgggtcttctgtgaaaggtgattgtggaaatccatcagtcggcatattttttttcgttagttacattataattagtttcttggtggtggttaacatgtatatcgctgtgattctggagaacttctccgtcgccacagaggagtcggccgaacctctgtctgaagatgacttcgagatgttctatgaagtgtgggagaagttcgaccctgatgctacccagttcatggaatttgaaaagttgtcccagtttgccgcagccctagaaccacccctcaacctcccacagccaaataaattgcagctgatcgccatggacttgcctatggtctctggtgacaggatacattgcctggatattttattcgcttttaccaagcgcgtcctcggcgagtccggcgaaatggatgcgctacgcatacagatggaagagagattcatggcatcaaatccgtcgaaagtgtcctaccaacctatcaccacaactttgaaaaggaagcaagaagaagtcagcgccgtcataatccagcgtgcatacaggaggcacctgctgaagaggactgttaagcaagctagttttacctataacaaaaacaagatcaaaggtggcgctaacctgctgattaaagaggatatgataattgataggataaatgagaattccattactgaaaaaaccgacctcacaatgagtaccgctgcctgtcctccaagttatgaccgggttacaaagcccatagtcgaaaagcatgagcaagagggaaaggacgagaaagccaaaggcaagta

SEQ ID NO: 169122 - DNA, 8097 bp, Artificial Sequence
  derived and/or modified sequence
aatgtgcaggatgacaagatggagcaaacagtgcttgtaccaccaggacctgacagcttcaacttcttcaccagagaatctcttgcggctattgaaagacgcattgcagaagaaaaggcaaagaatcccaaaccagacaaaaaagatgacgacgaaaatggcccaaagccaaatagtgacttggaagctggaaagaaccttccatttatttatggagacattcctccagagatggtgtcagagcccctggaggacctggacccctactatatcaataagaaaacttttatagtattgaataaagggaaggccatcttccggttcagtgccacctctgccctgtacattttaactcccttcaatcctcttaggaaaatagctattaagattttggtacattcattattcagcatgctaattatgtgcactattttgacaaactgtgtgtttatgacaatgagtaaccctcctgattggacaaagaatgtagaatacaccttcacaggaatatatacttttgaatcacttataaaaattattgcaaggggattctgtttagaagattttactttccttcgggatccatggaactggctcgatttcactgtcattacatttgcgtacgtcacagagtttgtggacctgggcaatgtctcggcattgagaacattcagagttctccgagcattgaagacgatttcagtcattccaggcctgaaaaccattgtgggagccctgatccagtctgtgaagaagctctcagatgtaatgatcctgactgtgttctgtctgagcgtatttgctctaattgggctgcagctgttcatgggcaacctgaggaataaatgtatacaatggcctcccaccaatgcttccttggaggaacatagtatagaaaagaatataactgtgaattataatggtacacttataaatgaaactgtctttgagtttgactggaagtcatatattcaagattcaagatatcattatttcctggagggttttttagatgcactactatgtggaaatagctctgatgcaggccaatgtccagagggatatatgtgtgtgaaagctggtagaaatcccaattatggctacacaagctttgataccttcagttgggcttttttgtccttgtttcgactaatgactcaggacttctgggaaaatctttatcaactgacattacgtgctgctgggaaaacgtacatgatattttttgtattggtcattttcttgggctcattctacctaataaatttgatcctggctgtggtggccatggcctacgaggaacagaatcaggccaccttggaagaagcagaacagaaagaggccgaatttcagcagatgattgaacagcttaaaaagcaacaggaggcagctcagcaggcagcaacggcaactgcctcagaacattccagagagcccagtgcagcaggcaggctctcagacagctcatctgaagcctctaagttgagttccaagagtgctaaggaaagaagaaatcggaggaagaaaagaaaacagaaagagcagtctggtggggaagagaaagatgaggatgaattccaaaaatctgaatctgaggacagcatcaggaggaaaggttttcgcttctccattgaagggaaccgattgacatatgaaaagaggtactcctccccacaccagtctttgttgagcatccgtggctccctattttcaccaaggcgaaatagcagaacaagccttttcagctttagagggcgagcaaaggatgtgggatctgagaacgacttcgcagatgatgagcacagcacctttgaggataacgagagccgtagagattccttgtttgtgccccgacgacacggagagagacgcaacagcaacctgagtcagaccagtaggtcatcccggatgctggcagtgtttccagcgaatgggaagatgcacagcactgtggattgcaatggtgtggtttccttggttggtggaccttcagttcctacatcgcctgttggacagcttctgccagagggaacaaccactgaaactgaaatgagaaagagaaggtcaagttctttccacgtttccatggactttctagaagatccttcccaaaggcaacgagcaatgagtatagccagcattctaacaaatacagtagaagaacttgaagaatccaggcagaaatgcccaccctgttggtataaattttccaacatattcttaatctgggactgttctccatattggttaaaagtgaaacatgttgtcaacctggttgtgatggacccatttgttgacctggccatcaccatctgtattgtcttaaatactcttttcatggccatggagcactatccaatgacggaccatttcaataatgtgcttacagtaggaaacttggttttcactgggatctttacagcagaaatgtttctgaaaattattgccatggatccttactattatttccaagaaggctggaatatctttgacggttttattgtgacgcttagcctggtagaacttggactcgccaatgtggaaggattatctgttctccgttcatttcgattgctgcgagttttcaagttggcaaaatcttggccaacgttaaatatgctaataaagatcatcggcaattccgtgggggctctgggaaatttaaccctcgtcttggccatcatcgtcttcatttttgccgtggtcggcatgcagctctttggtaaaagctacaaagattgtgtctgcaagatcgccagtgattgtcaactcccacgctggcacatgaatgacttcttccactccttcctgattgtgttccgcgtgctgtgtggggagtggatagagaccatgtgggactgtatggaggttgctggtcaagccatgtgccttactgtcttcatgatggtcatggtgattggaaacctagtggtcctgaatctctttctggccttgcttctgagctcatttagtgcagacaaccttgcagccactgatgatgataatgaaatgaataatctccaaattgctgtggataggatgcacaaaggagtagcttatgtgaaaagaaaaatatatgaatttattcaacagtccttcattaggaaacaaaagattttagatgaaattaaaccacttgatgatctaaacaacaagaaagacagttgtatgtccaatcatacagcagaaattgggaaagatcttgactatcttaaagatgtaaatggaactacaagtggtataggaactggcagcagtgttgaaaaatacattattgatgaaagtgattacatgtcattcataaacaaccccagtcttactgtgactgtaccaattgctgtaggagaatctgactttgaaaatttaaacacggaagactttagtagtgaatcggatctggaagaaagcaaagagaaactgaatgaaagcagtagctcatcagaaggtagcactgtggacatcggcgcacctgtagaagaacagcccgtagtggaacctgaagaaactcttgaaccagaagcttgtttcactgaaggctgtgtacaaagattcaagtgttgtcaaatcaatgtggaagaaggcagaggaaaacaatggtggaacctgagaaggacgtgtttccgaatagttgaacataactggtttgagaccttcattgttttcatgattctccttagtagtggtgctctggcatttgaagatatatatattgatcagcgaaagacgattaagacgatgttggaatatgctgacaaggttttcacttacattttcattctggaaatgcttctaaaatgggtggcatatggctatcaaacatatttcaccaatgcctggtgttggctggacttcttaattgttgatgtttcattggtcagtttaacagcaaatgccttgggttactcagaacttggagccatcaaatctctcaggacactaagagctctgagacctctaagagccttatctcgatttgaagggatgagggtggttgtgaatgcccttttaggagcaattccatccatcatgaatgtgcttctggtttgtcttatattctggctaattttcagcatcatgggcgtaaatttgtttgctggcaaattctaccactgtattaacaccacaactggtgacaggtttgacatcgaagacgtgaataatcatactgattgcctaaaactaatagaaagaaatgagactgctcgatggaaaaatgtgaaagtaaactttgataatgtaggatttgggtatctctctttgcttcaagttgccacattcaaaggatggatggatataatgtatgcagcagttgattccagaaatgtggaactccagcctaagtatgaagaaagtctgtacatgtatctttactttgttattttcatcatctttgggtccttcttcaccttgaacctgtttattggtgtcatcatagataatttcaaccagcagaaaaagaagtttggaggtcaagacatctttatgacagaagaacagaagaaatactataatgcaatgaaaaaattaggatcgaaaaaaccgcaaaagcctatacctcgaccaggaaacaaatttcaaggaatggtctttgacttcgtaaccagacaagtttttgacataagcatcatgattctcatctgtcttaacatggtcacaatgatggtggaaacagatgaccagagtgaatatgtgactaccattttgtcacgcatcaatctggtgttcattgtgctatttactggagagtgtgtactgaaactcatctctctacgccattattattttaccattggatggaatatttttgattttgtggttgtcattctctccattgtaggtatgtttcttgccgagctgatagaaaagtatttcgtgtcccctaccctgttccgagtgatccgtcttgctaggattggccgaatcctacgtctgatcaaaggagcaaaggggatccgcacgctgctctttgctttgatgatgtcccttcctgcgttgtttaacatcggcctcctactcttcctagtcatgttcatctacgccatctttgggatgtccaactttgcctatgttaagagggaagttgggatcgatgacatgttcaactttgagacctttggcaacagcatgatctgcctattccaaattacaacctctgctggctgggatggattgctagcacccattctcaacagtaagccacccgactgtgaccctaataaagttaaccctggaagctcagttaagggagactgtgggaacccatctgttggaattttcttttttgtcagttacatcatcatatccttcctggttgtggtgaacatgtacatcgcggtcatcctggagaacttcagtgttgctactgaagaaagtgcagagcctctgagtgaggatgactttgagatgttctatgaggtttgggagaagtttgatcccgatgcaactcagttcatggaatttgaaaaattatctcagtttgcagctgcgcttgaaccgcctctcaatctgccacaaccaaacaaactccagctcattgccatggatttgcccatggtgagtggtgaccggatccactgtcttgatatcttatttgcttttacaaagcgggttctaggagagagtggagagatggatgctctacgaatacagatggaagagcgattcatggcttccaatccttccaaggtctcctatcagccaatcactactactttaaaacgaaaacaagaggaagtatctgctgtcattattcagcgtgcttacagacgccaccttttaaagcgaactgtaaaacaagcttcctttacgtacaataaaaacaaaatcaaaggtggggctaatcttcttataaaagaagacatgataattgacagaataaatgaaaactctattacagaaaaaactgatctgaccatgtccactgcagcttgtccaccttcctatgaccgggtgacaaagccaattgtggaaaaacatgagcaagaaggcaaagatgaaaaagccaaagggaaataaatgaaaataaataaaaataattgggtgacaaattgtttacagcctgtgaaggtgatgtatttttatcaacaggactcctttaggaggtcaatgccaaactgactgtttttacacaaatctccttaaggtcagtgcctacaataagacagtgaccccttgtcagcaaactgtgactctgtgtaaaggggagatgaccttgacaggaggttactgttctcactaccagctgacactgctgaagataagatgcacaatggctagtcagactgtagggaccagtttcaaggggtgcaaacctgtgattttggggttgtttaacatgaaacactttagtgtagtaattgtatccactgtttgcatttcaactgccacatttgtcacatttttatggaatctgttagtggattcatctttttgttaatccatgtgtttattatatgtgactatttttgtaaacgaagtttctgttgagaaataggctaaggacctctataacaggtatgccacctggggggtatggcaaccacatggccctcccagctacacaaagtcgtggtttgcatgagggcatgctgcacttagagatcatgcatgagaaaaagtcacaagaaaaacaaattcttaaatttcaccatatttctgggaggggtaattgggtgataagtggaggtgctttgttgatcttgttttgcgaaatccagcccctagaccaagtagattatttgtgggtaggccagtaaatcttagcaggtgcaaacttcattcaaatgtttggagtcataaatgttatgtttctttttgttgtattaaaaaaaaaacctgaatagtgaatattgcccctcaccctccaccgccagaagactgaattgaccaaaattactctttataaatttctgctttttcctgcactttgtttagccatcttcggctctcagcaaggttgacactgtatatgttaatgaaatgctatttattatgtaaatagtcattttaccctgtggtgcacgtttgagcaaacaaataatgacctaagcacagtatttattgcatcaaatatgtaccacaagaaatgtagagtgcaagctttacacaggtaataaaatgtattctgtaccatttatagatagtttggatgctatcaatgcatgtttatattaccatgctgctgtatctggtttctctcactgctcagaatctcatttatgagaaaccatatgtcagtggtaaagtcaaggaaattgttcaacagatctcatttatttaagtcattaagcaatagtttgcagcactttaacagctttttggttatttttacattttaagtggataacatatggtatatagccagactgtacagacatgtttaaaaaaacacactgcttaacctattaaatatgtgtttagaattttataagcaaatataaatactgtaaaaagtcactttattttatttttcagcattatgtacataaatatgaagaggaaattatcttcaggttgatatcacaatcacttttcttactttctgtccatagtactttttcatgaaagaaatttgctaaataagacatgaaaacaagactgggtagttgtagatttctgctttttaaattacatttgctaattttagattatttcacaattttaaggagcaaaataggttcacgattcatatccaaattatgctttgcaattggaaaagggtttaaaattttatttatatttctggtagtacctgcactaactgaattgaaggtagtgcttatgttatttttgttctttttttctgacttcggtttatgttttcatttctttggagtaatgctgctctagattgttctaaatagaatgtgggcttcataatttttttttccacaaaaacagagtagtcaacttatatagtcaattacatcaggacattttgtgtttcttacagaagcaaaccataggctcctcttttccttaaaactacttagataaactgtattcgtgaactgcatgctggaaaatgctactattatgctaaataatgctaaccaacatttaaaatgtgcaaaactaataaagattacattttttatt

SEQ ID NO: 169123 - DNA, 5997 bp, Artificial Sequence
  derived and/or modified sequence
atggagcagaccgtgctggtgccccccggccccgacagcttcaacttcttcaccagagagagcctggccgccatcgagagaagaatcgccgaggagaaggccaagaaccccaagcccgacaagaaggacgacgacgagaacggccccaagcccaacagcgacctggaggccggcaagaacctgcccttcatctacggcgacatcccccccgagatggtgagcgagcccctggaggacctggacccctactacatcaacaagaagaccttcatcgtgctgaacaagggcaaggccatcttcagattcagcgccaccagcgccctgtacatcctgacccccttcaaccccctgagaaagatcgccatcaagatcctggtgcacagcctgttcagcatgctgatcatgtgcaccatcctgaccaactgcgtgttcatgaccatgagcaacccccccgactggaccaagaacgtggagtacaccttcaccggcatctacaccttcgagagcctgatcaagatcatcgccagaggcttctgcctggaggacttcaccttcctgagagacccctggaactggctggacttcaccgtgatcaccttcgcctacgtgaccgagttcgtggacctgggcaacgtgagcgccctgagaaccttcagagtgctgagagccctgaagaccatcagcgtgatccccggcctgaagaccatcgtgggcgccctgatccagagcgtgaagaagctgagcgacgtgatgatcctgaccgtgttctgcctgagcgtgttcgccctgatcggcctgcagctgttcatgggcaacctgagaaacaagtgcatccagtggccccccaccaacgccagcctggaggagcacagcatcgagaagaacatcaccgtgaactacaacggcaccctgatcaacgagaccgtgttcgagttcgactggaagagctacatccaggacagcagataccactacttcctggagggcttcctggacgccctgctgtgcggcaacagcagcgacgccggccagtgccccgagggctacatgtgcgtgaaggccggcagaaaccccaactacggctacaccagcttcgacaccttcagctgggccttcctgagcctgttcagactgatgacccaggacttctgggagaacctgtaccagctgaccctgagagccgccggcaagacctacatgatcttcttcgtgctggtgatcttcctgggcagcttctacctgatcaacctgatcctggccgtggtggccatggcctacgaggagcagaaccaggccaccctggaggaggccgagcagaaggaggccgagttccagcagatgatcgagcagctgaagaagcagcaggaggccgcccagcaggccgccaccgccaccgccagcgagcacagcagagagcccagcgccgccggcagactgagcgacagcagcagcgaggccagcaagctgagcagcaagagcgccaaggagagaagaaacagaagaaagaagagaaagcagaaggagcagagcggcggcgaggagaaggacgaggacgagttccagaagagcgagagcgaggacagcatcagaagaaagggcttcagattcagcatcgagggcaacagactgacctacgagaagagatacagcagcccccaccagagcctgctgagcatcagaggcagcctgttcagccccagaagaaacagcagaaccagcctgttcagcttcagaggcagagccaaggacgtgggcagcgagaacgacttcgccgacgacgagcacagcaccttcgaggacaacgagagcagaagagacagcctgttcgtgcccagaagacacggcgagagaagaaacagcaacctgagccagaccagcagaagcagcagaatgctggccgtgttccccgccaacggcaagatgcacagcaccgtggactgcaacggcgtggtgagcctggtgggcggccccagcgtgcccaccagccccgtgggccagctgctgcccgagggcaccaccaccgagaccgagatgagaaagagaagaagcagcagcttccacgtgagcatggacttcctggaggaccccagccagagacagagagccatgagcatcgccagcatcctgaccaacaccgtggaggagctggaggagagcagacagaagtgccccccctgctggtacaagttcagcaacatcttcctgatctgggactgcagcccctactggctgaaggtgaagcacgtggtgaacctggtggtgatggaccccttcgtggacctggccatcaccatctgcatcgtgctgaacaccctgttcatggccatggagcactaccccatgaccgaccacttcaacaacgtgctgaccgtgggcaacctggtgttcaccggcatcttcaccgccgagatgttcctgaagatcatcgccatggacccctactactacttccaggagggctggaacatcttcgacggcttcatcgtgaccctgagcctggtggagctgggcctggccaacgtggagggcctgagcgtgctgagaagcttcagactgctgagagtgttcaagctggccaagagctggcccaccctgaacatgctgatcaagatcatcggcaacagcgtgggcgccctgggcaacctgaccctggtgctggccatcatcgtgttcatcttcgccgtggtgggcatgcagctgttcggcaagagctacaaggactgcgtgtgcaagatcgccagcgactgccagctgcccagatggcacatgaacgacttcttccacagcttcctgatcgtgttcagagtgctgtgcggcgagtggatcgagaccatgtgggactgcatggaggtggccggccaggccatgtgcctgaccgtgttcatgatggtgatggtgatcggcaacctggtggtgctgaacctgttcctggccctgctgctgagcagcttcagcgccgacaacctggccgccaccgacgacgacaacgagatgaacaacctgcagatcgccgtggacagaatgcacaagggcgtggcctacgtgaagagaaagatctacgagttcatccagcagagcttcatcagaaagcagaagatcctggacgagatcaagcccctggacgacctgaacaacaagaaggacagctgcatgagcaaccacaccgccgagatcggcaaggacctggactacctgaaggacgtgaacggcaccaccagcggcatcggcaccggcagcagcgtggagaagtacatcatcgacgagagcgactacatgagcttcatcaacaaccccagcctgaccgtgaccgtgcccatcgccgtgggcgagagcgacttcgagaacctgaacaccgaggacttcagcagcgagagcgacctggaggagagcaaggagaagctgaacgagagcagcagcagcagcgagggcagcaccgtggacatcggcgcccccgtggaggagcagcccgtggtggagcccgaggagaccctggagcccgaggcctgcttcaccgagggctgcgtgcagagattcaagtgctgccagatcaacgtggaggagggcagaggcaagcagtggtggaacctgagaagaacctgcttcagaatcgtggagcacaactggttcgagaccttcatcgtgttcatgatcctgctgagcagcggcgccctggccttcgaggacatctacatcgaccagagaaagaccatcaagaccatgctggagtacgccgacaaggtgttcacctacatcttcatcctggagatgctgctgaagtgggtggcctacggctaccagacctacttcaccaacgcctggtgctggctggacttcctgatcgtggacgtgagcctggtgagcctgaccgccaacgccctgggctacagcgagctgggcgccatcaagagcctgagaaccctgagagccctgagacccctgagagccctgagcagattcgagggcatgagagtggtggtgaacgccctgctgggcgccatccccagcatcatgaacgtgctgctggtgtgcctgatcttctggctgatcttcagcatcatgggcgtgaacctgttcgccggcaagttctaccactgcatcaacaccaccaccggcgacagattcgacatcgaggacgtgaacaaccacaccgactgcctgaagctgatcgagagaaacgagaccgccagatggaagaacgtgaaggtgaacttcgacaacgtgggcttcggctacctgagcctgctgcaggtggccaccttcaagggctggatggacatcatgtacgccgccgtggacagcagaaacgtggagctgcagcccaagtacgaggagagcctgtacatgtacctgtacttcgtgatcttcatcatcttcggcagcttcttcaccctgaacctgttcatcggcgtgatcatcgacaacttcaaccagcagaagaagaagttcggcggccaggacatcttcatgaccgaggagcagaagaagtactacaacgccatgaagaagctgggcagcaagaagccccagaagcccatccccagacccggcaacaagttccagggcatggtgttcgacttcgtgaccagacaggtgttcgacatcagcatcatgatcctgatctgcctgaacatggtgaccatgatggtggagaccgacgaccagagcgagtacgtgaccaccatcctgagcagaatcaacctggtgttcatcgtgctgttcaccggcgagtgcgtgctgaagctgatcagcctgagacactactacttcaccatcggctggaacatcttcgacttcgtggtggtgatcctgagcatcgtgggcatgttcctggccgagctgatcgagaagtacttcgtgagccccaccctgttcagagtgatcagactggccagaatcggcagaatcctgagactgatcaagggcgccaagggcatcagaaccctgctgttcgccctgatgatgagcctgcccgccctgttcaacatcggcctgctgctgttcctggtgatgttcatctacgccatcttcggcatgagcaacttcgcctacgtgaagagagaggtgggcatcgacgacatgttcaacttcgagaccttcggcaacagcatgatctgcctgttccagatcaccaccagcgccggctgggacggcctgctggcccccatcctgaacagcaagccccccgactgcgaccccaacaaggtgaaccccggcagcagcgtgaagggcgactgcggcaaccccagcgtgggcatcttcttcttcgtgagctacatcatcatcagcttcctggtggtggtgaacatgtacatcgccgtgatcctggagaacttcagcgtggccaccgaggagagcgccgagcccctgagcgaggacgacttcgagatgttctacgaggtgtgggagaagttcgaccccgacgccacccagttcatggagttcgagaagctgagccagttcgccgccgccctggagccccccctgaacctgccccagcccaacaagctgcagctgatcgccatggacctgcccatggtgagcggcgacagaatccactgcctggacatcctgttcgccttcaccaagagagtgctgggcgagagcggcgagatggacgccctgagaatccagatggaggagagattcatggccagcaaccccagcaaggtgagctaccagcccatcaccaccaccctgaagagaaagcaggaggaggtgagcgccgtgatcatccagagagcctacagaagacacctgctgaagagaaccgtgaagcaggccagcttcacctacaacaagaacaagatcaagggcggcgccaacctgctgatcaaggaggacatgatcatcgacagaatcaacgagaacagcatcaccgagaagaccgacctgaccatgagcaccgccgcctgcccccccagctacgacagagtgaccaagcccatcgtggagaagcacgagcaggagggcaaggacgagaaggccaagggcaagtag

SEQ ID NO: 169124 - protein, 2000 aa, Artificial Sequence
  derived and/or modified sequence
MAQALLVPPGPESFRLFTRESLAAIEKRAAEEKAKKPKKEQDNDDENKPKPNSDLEAGKNLPFIYGDIPPEMVSEPLEDLDPYYINKKTFIVMNKGKAIFRFSATSALYILTPLNPVRKIAIKILVHSLFSMLIMCTILTNCVFMTLSNPPDWTKNVEYTFTGIYTFESLIKILARGFCLEDFTFLRDPWNWLDFSVIVMAYVTEFVDLGNVSALRTFRVLRALKTISVIPGLKTIVGALIQSVKKLSDVMILTVFCLSVFALIGLQLFMGNLRNKCLQWPPSDSAFETNTTSYFNGTMDSNGTFVNVTMSTFNWKDYIGDDSHFYVLDGQKDPLLCGNGSDAGQCPEGYICVKAGRNPNYGYTSFDTFSWAFLSLFRLMTQDYWENLYQLTLRAAGKTYMIFFVLVIFLGSFYLVNLILAVVAMAYEEQNQATLEEAEQKEAEFQQMLEQLKKQQEEAQAVAAASAASRDFSGIGGLGELLESSSEASKLSSKSAKEWRNRRKKRRQREHLEGNNKGERDSFPKSESEDSVKRSSFLFSMDGNRLTSDKKFCSPHQSLLSIRGSLFSPRRNSKTSIFSFRGRAKDVGSENDFADDEHSTFEDSESRRDSLFVPHRHGERRNSNVSQASMSSRMVPGLPANGKMHSTVDCNGVVSLVGGPSALTSPTGQLPPEGTTTETEVRKRRLSSYQISMEMLEDSSGRQRAVSIASILTNTMEELEESRQKCPPCWYRFANVFLIWDCCDAWLKVKHLVNLIVMDPFVDLAITICIVLNTLFMAMEHYPMTEQFSSVLTVGNLVFTGIFTAEMVLKIIAMDPYYYFQEGWNIFDGIIVSLSLMELGLSNVEGLSVLRSFRLLRVFKLAKSWPTLNMLIKIIGNSVGALGNLTLVLAIIVFIFAVVGMQLFGKSYKECVCKINDDCTLPRWHMNDFFHSFLIVFRVLCGEWIETMWDCMEVAGQTMCLIVFMLVMVIGNLVVLNLFLALLLSSFSSDNLAATDDDNEMNNLQIAVGRMQKGIDYVKNKMRECFQKAFFRKPKVIEIHEGNKIDSCMSNNTGIEISKELNYLRDGNGTTSGVGTGSSVEKYVIDENDYMSFINNPSLTVTVPIAVGESDFENLNTEEFSSESELEESKEKLNATSSSEGSTVDVVLPREGEQAETEPEEDLKPEACFTEGCIKKFPFCQVSTEEGKGKIWWNLRKTCYSIVEHNWFETFIVFMILLSSGALAFEDIYIEQRKTIKTMLEYADKVFTYIFILEMLLKWVAYGFQTYFTNAWCWLDFLIVDVSLVSLVANALGYSELGAIKSLRTLRALRPLRALSRFEGMRVVVNALVGAIPSIMNVLLVCLIFWLIFSIMGVNLFAGKFYHCVNMTTGNMFDISDVNNLSDCQALGKQARWKNVKVNFDNVGAGYLALLQVATFKGWMDIMYAAVDSRDVKLQPVYEENLYMYLYFVIFIIFGSFFTLNLFIGVIIDNFNQQKKKFGGQDIFMTEEQKKYYNAMKKLGSKKPQKPIPRPANKFQGMVFDFVTRQVFDISIMILICLNMVTMMVETDDQGKYMTLVLSRINLVFIVLFTGEFVLKLVSLRHYYFTIGWNIFDFVVVILSIVGMFLAEMIEKYFVSPTLFRVIRLARIGRILRLIKGAKGIRTLLFALMMSLPALFNIGLLLFLVMFIYAIFGMSNFAYVKKEAGIDDMFNFETFGNSMICLFQITTSAGWDGLLAPILNSAPPDCDPDTIHPGSSVKGDCGNPSVGIFFFVSYIIISFLVVVNMYIAVILENFSVATEESAEPLSEDDFEMFYEVWEKFDPDATQFIEFSKLSDFAAALDPPLLIAKPNKVQLIAMDLPMVSGDRIHCLDILFAFTKRVLGESGEMDALRIQMEDRFMASNPSKVSYEPITTTLKRKQEEVSAAIIQRNFRCYLLKQRLKNISSNYNKEAIKGRIDLPIKQDMIIDKLNGNSTPEKTDGSSSTTSPPSYDSVTKPDKEKFEKDKPEKESKGKEVRENQK

SEQ ID NO: 169125 - DNA, 6003 bp, Artificial Sequence
  derived and/or modified sequence
atggcccaggccctgctggtgccacccggcccagaaagtttccgcctattcacccgtgaaagtttggcggcaatcgaaaagcgagctgctgaagagaaagccaaaaagcccaagaaagagcaagacaacgatgatgaaaacaaacctaagcctaacagtgacctggaagccggcaaaaatctcccctttatttacggagatatcccccctgagatggtgagcgaacctttagaagatctcgacccctactatattaacaagaagacgtttattgtgatgaataaggggaaagccattttcagattcagcgctaccagtgccctgtacatcttgacgcccctgaaccctgtgagaaaaatcgccataaagattttggtgcactccctcttttccatgctgattatgtgcaccatacttactaactgcgttttcatgaccctttcaaaccctcccgactggaccaagaatgttgagtacacttttaccgggatctatacttttgagagtctgattaaaatactagctaggggattttgtcttgaagacttcacatttctgcgggatccctggaactggcttgacttttcggtgattgtgatggcgtatgtgacagagtttgtggatttgggtaatgtttctgctcttaggactttccgcgtactcagagccttgaaaaccattagtgtcatccccggtctaaaaactattgtgggcgcgctgatacaatcagtaaagaagttgtccgatgtcatgattttaacagtgttctgcctttctgtgtttgctctcattggacttcagctgtttatgggaaacctccgtaataaatgtctgcagtggccgccgagcgactccgcctttgagactaacacaaccagttacttcaatggaaccatggattccaacggtacctttgtgaatgtgacaatgagtacctttaactggaaggattacattggggacgactctcacttctacgtgctggacgggcagaaagaccctctactttgtgggaacggatcagacgcaggacaatgccctgaaggctacatctgtgtcaaggctgggagaaacccgaactacgggtacactagcttcgacacattcagctgggcctttctgtccctgttccggctgatgacacaggactactgggagaatctgtatcagttaaccctgagggcggctggcaagacttacatgatcttctttgtactagtcattttcttgggctccttttacctggtaaatctcatcctggccgtggtcgccatggcgtatgaggaacagaaccaggctaccctggaagaggctgaacagaaagaggcagagttccagcagatgctggagcagcttaagaagcagcaggaggaggcccaagctgtggctgcagcgtcagccgcttcccgggatttttcgggaatagggggtctcggagagctgctggaaagttcatccgaggcctcgaagctctcctccaaatccgcaaaggagtggagaaataggcggaagaagagacgacagcgcgaacacctcgagggcaacaataagggggaacgtgactcgttccccaaatccgagtcggaagattccgtcaagagaagttccttcttgttttctatggatggaaaccgcctgaccagtgacaaaaagttttgctcaccgcaccagtccctcctctccatcaggggatccctgttttccccccggcgaaactcaaagacaagcatcttttcctttcgtggccgcgccaaggatgttggtagcgagaatgactttgcggacgacgaacactctacgttcgaagatagcgagagcagaagggactcccttttcgttcctcaccggcacggtgagaggcgcaattctaatgttagtcaggcatctatgtcatccaggatggtgcctggcctgcccgctaatggcaagatgcacagcaccgtggattgtaatggggtggtgtctctggtaggaggcccaagcgctctgacatcccctacagggcagctaccccccgaggggaccaccacagaaactgaggtccggaaacgccgcctgagctcctaccaaatttctatggagatgctggaagattccagcggccggcagcgtgccgtctctattgctagtattttgaccaatactatggaagagctcgaagagtctcgccaaaaatgtccaccgtgttggtatcggttcgctaatgtgttcctaatctgggactgttgtgatgcttggctaaaggtgaaacatttggtcaatttaattgtgatggatccctttgtcgacctcgccatcacaatttgcattgtgctgaatacactgttcatggccatggagcattaccctatgacggaacagttctcatccgttcttactgtcgggaatctggtcttcacgggtatctttaccgccgagatggtgttgaaaataattgctatggacccatactattacttccaggaaggatggaacatctttgatggcatcatcgtttccctgtctctgatggagctaggattgtctaatgtcgaagggctttcggtgctgagaagctttagactgctccgcgtgttcaagcttgctaagtcctggcctacactgaacatgctgattaaaattatcggaaacagtgtgggcgcactggggaaccttaccttggtgctggccataatcgtgtttattttcgccgtggtcggtatgcagctgttcggtaagagctataaggagtgtgtgtgtaagatcaacgatgattgcacattgcctaggtggcatatgaacgattttttccatagcttcctgatagtgttcagagttctttgtggggaatggattgagaccatgtgggactgtatggaagtggccgggcagactatgtgtctcatcgtcttcatgcttgtgatggtgattggaaatctcgtggtgctgaacttgtttctagccctcctcctgtcatcctttagctccgacaacctagcggctactgatgatgacaatgaaatgaacaatctgcagatcgccgtcggccgaatgcaaaagggcatcgactacgttaaaaacaaaatgagggaatgcttccagaaggcgttctttcgaaagcctaaggtcatcgaaatccatgagggaaataagattgattcttgcatgtccaataacactggcattgagatctccaaagaactgaactatttgagagacggaaatggaactacctccggggtcggtacagggagcagcgttgagaagtatgtcatcgacgagaatgattacatgtccttcataaacaatcctagcttaactgtgacagtgcctatcgccgtgggagaaagcgattttgagaatctaaatacggaggagtttagctccgagagtgagctcgaagagagcaaagagaaattgaatgccacgagtagttcagaaggctccaccgtggacgtcgtactgccacgtgagggcgaacaagcagaaactgagccggaggaagacctgaaacctgaagcatgcttcacagaggggtgcattaaaaagttcccattctgtcaagtgtccacagaggagggaaagggaaaaatctggtggaatcttaggaaaacttgctacagcatcgtcgaacacaactggttcgaaacttttattgtatttatgatactgctgtcctcaggggcactcgcattcgaggacatttatatcgagcaaaggaaaaccatcaagactatgctggaatatgccgataaagtctttacctatatattcatcctggagatgctactcaagtgggttgcttacggtttccagacctattttaccaacgcatggtgttggttggactttctgatcgtggatgtgagtctagtgagcctcgtcgcaaacgctttggggtattccgaattgggggccatcaaatccctgaggacactgagggcccttagacctcttcgagctttgtctcgttttgaagggatgcgggtcgtcgtcaatgccttagttggagccatccctagcatcatgaacgtactgctcgtgtgcctgattttttggctgatcttcagcattatgggagtcaacttatttgcgggaaagttttaccattgtgtcaatatgaccaccggaaacatgtttgacatcagcgacgtgaacaacctgtccgactgccaggccctagggaagcaggcccgctggaagaatgtgaaggtgaactttgacaacgtaggcgccggataccttgctctacttcaggtggccacgttcaagggatggatggacataatgtacgctgctgtggacagtagggacgttaagcttcaacctgtttacgaggagaatctttatatgtatctatactttgtcatctttatcattttcggcagcttcttcacgctcaatctgttcatcggagtgattatcgacaactttaatcagcagaagaagaagttcggaggacaggatatcttcatgaccgaagaacagaagaagtattacaatgccatgaagaagcttggttccaaaaaacctcagaagccgatccctcggccagctaacaagttccaggggatggtgttcgactttgtaacacgtcaggtatttgatatttcgataatgattctcatatgtctgaacatggtgactatgatggtcgagacagatgatcagggcaagtatatgacacttgtactgagtaggattaatctcgtgtttattgtgctgtttacaggggagtttgtcttgaaactagtctcgttgaggcattattacttcaccatcgggtggaacatcttcgactttgtagtcgtgatattgtctattgtgggaatgtttctcgccgaaatgattgagaagtattttgtctccccaacgctgttccgcgttataaggctggctcgcatcggccgtatcctgcggttaatcaagggtgccaaagggattaggacactactgttcgcccttatgatgtccctgcccgccctattcaacatcgggttgctcttattcctggtaatgttcatatatgccatattcggaatgtctaatttcgcttacgtgaagaaggaggcaggtatcgatgatatgtttaacttcgaaacttttggaaactcaatgatatgtctttttcaaattaccacctctgcgggttgggacggtcttttggcaccaattctgaactctgcccctccagattgcgaccccgatacaattcaccctggtagctccgtcaagggcgactgtgggaatcccagcgtcggcattttttttttcgtgagctatatcattattagcttcttagtggtggtgaatatgtatattgcagtgatcttggagaacttctctgttgccacagaagagagtgccgaaccgcttagcgaggatgatttcgagatgttttatgaagtttgggaaaagttcgaccctgatgccacacagtttattgagttctccaagttgtctgattttgccgccgcactggacccacctctcctgattgctaagccaaacaaagtccagctgatcgccatggatctcccaatggtgtcgggcgaccgcatccactgcttagatatattatttgcattcacgaagagagtgctgggggagtcgggagagatggatgcattacggatacagatggaggatcgcttcatggcgagcaacccttcaaaagtttcatatgagcctattactacaacgttaaagaggaaacaggaggaggtcagcgccgcaataattcagcgcaattttcgctgctatttgctcaaacaacggctaaaaaatatatcttccaactacaataaggaagcgatcaaaggccgaattgatctcccgataaaacaggacatgatcatcgataaacttaacggcaatagcacaccagaaaagaccgacggctcatcctctaccacatctcctccctcgtacgactctgttacgaagccagataaagagaaatttgaaaaggacaagccagagaaggagagtaaaggaaaggaggtgcgggaaaaccaaaaatag

SEQ ID NO: 169126 - DNA, 6003 bp, Artificial Sequence
  derived and/or modified sequence
atggcccaggccctgctggtgcccccaggccctgagagcttccgcctcttcacccgggagagcctggccgccatcgagaagagagctgctgaggagaaggccaagaagcccaagaaggagcaggacaatgatgatgagaacaagcccaagcccaacagcgacctggaggccggcaagaacctgcccttcatctatggagacatccccccagagatggtgtctgagcccctggaggacctggacccctactacatcaacaagaagaccttcatcgtgatgaacaagggcaaggccatcttccgcttcagcgccaccagcgccctgtacatcctgacccccctgaaccctgtgaggaagatcgccatcaagatcctggtgcacagcctcttctccatgctgatcatgtgcaccatcctgaccaactgtgtgttcatgaccctgagcaaccccccagactggaccaagaatgtggagtacaccttcaccggcatctacacctttgagagcctcatcaagatcctggcccggggcttctgcctggaggacttcaccttcctgcgggacccctggaactggctggacttcagcgtcatcgtgatggcctacgtgacagaatttgtggacctgggcaatgtgtctgccctgcggaccttccgggtgctgcgggccctgaagaccatcagcgtcatccctggcctgaagaccatcgtgggcgccctgatccagagcgtgaagaagctgagtgatgtgatgatcctgaccgtcttctgcctgtctgtgtttgccctgattggcctgcagctgttcatgggcaacctgaggaacaagtgcctgcagtggcccccaagtgacagcgcctttgagaccaacaccaccagctacttcaacggcaccatggacagcaatggcacctttgtgaatgtgaccatgagcaccttcaactggaaggactacatcggagatgacagccacttctacgtgctggatggccagaaggaccccctgctgtgtggaaatggaagtgatgctggccagtgcccagagggctacatctgtgtgaaggccggcaggaaccccaactacggctacaccagctttgacaccttctcctgggccttcctgagcctcttccggctgatgacccaggactactgggagaacctgtaccagctgaccctgcgggccgccggcaagacctacatgatcttctttgtgctggtgatcttcctgggcagcttctacctggtgaacctgatcctggccgtggtggccatggcctatgaggagcagaaccaggccaccctggaggaggccgagcagaaggaggccgagttccagcagatgctggagcagctgaagaagcagcaggaggaggcccaggccgtggccgccgccagcgctgccagccgggacttctctggaattggaggcctgggggagctgctggagagcagcagcgaggccagcaagctgagcagcaagagcgccaaggagtggaggaacagaaggaagaagaggcggcagcgggagcacctggagggcaacaacaagggggagcgggacagcttccccaagtctgagagtgaagattctgtgaagaggagcagcttcctgttctccatggatggcaaccggctgaccagtgacaagaagttctgcagcccccaccagagcctgctgagcatccggggcagcctcttcagccccaggaggaacagcaagaccagcatcttctccttccggggccgggccaaggatgtgggctctgaaaatgactttgctgatgatgagcacagcacctttgaggacagcgagagcagaagagacagcctgtttgtgccccacagacatggagagaggaggaacagcaatgtgtcccaggcctccatgagcagcaggatggtgcccggcctgcctgccaacgggaagatgcacagcacagtggactgcaatggagtggtgtccctggtgggcggccccagcgccctgaccagccccaccggccagctgcccccagagggcaccaccacagaaacagaggtgaggaagaggcggctgagcagctaccagatctccatggagatgctggaggacagcagcggccggcagagagctgtgtccatcgccagcatcctgaccaacaccatggaggagctggaggagagccggcagaagtgccccccctgctggtacagatttgccaacgtgttcctgatctgggactgctgtgatgcctggctgaaggtgaagcacctggtgaacctgattgtgatggacccctttgtggacctggccatcaccatctgcatcgtgctgaacaccctcttcatggccatggagcactaccccatgacagagcagttcagctctgtgctgactgtgggcaacctggtgttcaccggcatcttcaccgctgagatggtgctgaagatcatcgccatggacccctactactacttccaggagggctggaacatctttgatggcatcatcgtgtccctgagcctgatggagctgggcctgagcaatgtggagggcctgtctgtgctgcggagcttccggctgctgcgggtcttcaagctggccaagtcctggcccaccctgaacatgctgatcaagatcatcggcaacagcgtgggcgccctgggcaacctgaccctggtgctggccatcatcgtgttcatctttgctgtggtgggcatgcagctgtttgggaagagctacaaggaatgtgtgtgcaagatcaatgatgactgcaccctgccccgctggcacatgaatgacttcttccacagcttcctgattgtgttccgggtgctgtgtggggagtggattgagaccatgtgggactgcatggaggtggccggccagaccatgtgcctgattgtgttcatgctggtgatggtgattggcaacctggtggtgctgaacctcttcctggccctgctgctgagcagcttcagcagtgacaacctggccgccacagatgatgacaatgagatgaacaacctgcagattgctgtgggccgcatgcagaagggcattgattatgtgaagaacaagatgagggagtgcttccagaaggccttcttcaggaagcccaaggtgattgagatccacgagggcaacaagattgacagctgcatgagcaacaacacaggaattgagatcagcaaggagctgaactacctgagagatggaaatggcaccaccagcggcgtgggcaccggcagctctgtggagaagtatgtgattgatgaaaatgactacatgtccttcatcaacaaccccagcctgactgtgacagtgcccatcgctgtgggggagagtgactttgagaacctgaacacagaggagttcagcagcgagagcgagctggaggagagcaaggagaagctgaatgccaccagcagcagcgagggcagcacagtggatgtggtgctgccccgggagggggagcaggccgagacagagcctgaggaggacctgaagccagaggcctgcttcacagagggctgcatcaagaagttccccttctgccaggtgtccacagaggagggcaagggcaagatctggtggaacctgaggaagacctgctacagcatcgtggagcacaactggtttgagaccttcatcgtgttcatgatcctgctgagcagcggggccctggcctttgaggacatctacatcgagcagaggaagaccatcaagaccatgctggagtatgctgacaaggtgttcacctacatcttcatcctggagatgctgctgaagtgggtggcctacggcttccagacctacttcaccaatgcctggtgctggctggacttcctgattgtggatgtgtccctggtgtccctggtggccaatgccctgggctacagcgagctgggcgccatcaagagcctgcggaccctgcgggccctgcggcccctgcgggccctgagcagatttgagggcatgagggtggtggtgaatgccctggtgggcgccatccccagcatcatgaatgtgctgctggtgtgcctgatcttctggctgatcttcagcatcatgggcgtgaacctgtttgctgggaagttctaccactgtgtgaacatgaccactggaaacatgtttgacatcagtgatgtgaacaacctgagtgactgccaggccctgggcaagcaggcccgctggaagaatgtgaaggtgaactttgacaacgtgggcgccggctacctggccctgctgcaggtggccaccttcaagggctggatggacatcatgtatgctgctgtggacagcagagatgtgaagctgcagcctgtgtatgaggagaacctgtacatgtacctgtacttcgtcatcttcatcatcttcggcagcttcttcaccctgaacctcttcatcggggtcatcatcgacaacttcaaccagcagaagaagaagtttggaggccaggacatcttcatgacagaggagcagaagaagtactacaatgccatgaagaagctgggcagcaagaagccccagaagcccatccccaggcctgccaacaagttccagggcatggtgtttgattttgtgacccggcaggtgtttgacatcagcatcatgatcctgatctgcctgaacatggtgaccatgatggtggagacagatgaccagggcaagtacatgaccctggtgctgagccgcatcaacctggtgttcatcgtgctcttcaccggggagtttgtgctgaagctggtgtccctgcggcactactacttcaccatcggctggaacatctttgattttgtggtggtgatcctgagcatcgtgggcatgttcctggccgagatgattgagaagtactttgtgagccccaccctcttccgggtcatccggctggcccgcatcggccgcatcctgcggctcatcaagggggccaagggcatccgcaccctgctgtttgccctgatgatgagcctgcctgccctcttcaacatcggcctgctgctcttcctggtgatgttcatctatgccatcttcggcatgagcaactttgcctacgtgaagaaggaggccggcattgatgacatgttcaactttgagacctttggaaacagcatgatctgcctcttccagatcaccaccagcgctggctgggatggcctgctggcccccatcctgaacagcgcccccccagactgtgaccctgacaccatccaccctggcagctctgtgaagggggactgtggcaaccccagcgtgggcatcttcttctttgtgtcctacatcatcatctccttcctggtggtggtgaacatgtacatcgccgtcatcctggagaacttctctgtggccacagaggagagcgctgagcccctgtctgaagatgactttgagatgttttatgaggtgtgggagaagtttgatcctgatgccacccagttcatcgagttcagcaagctgagtgactttgctgctgccctggacccccccctgctgattgccaagcccaacaaggtgcagctgattgccatggacctgcccatggtgtctggggaccgcatccactgcctggacatcctgtttgccttcaccaagagggtgctgggggagagcggggagatggatgccctgcgcatccagatggaggaccgcttcatggccagcaaccccagcaaggtgtcctatgagcccatcaccaccaccctgaagaggaagcaggaggaggtgtctgctgccatcatccagaggaacttccgctgctacctgctgaagcagaggctgaagaacatcagcagcaactacaacaaggaggccatcaagggcagaattgacctgcccatcaagcaggacatgatcatcgacaagctgaatggaaacagcaccccagagaagacagatggcagcagcagcaccaccagccccccatcctatgacagcgtgaccaagccagacaaggagaagtttgagaaggacaagccagagaaggagagcaagggcaaggaggtgcgggagaaccagaagtag

SEQ ID NO: 169127 - DNA, 6003 bp, Artificial Sequence
  derived and/or modified sequence
atggcccaggccctgctggtgccccccggccccgagagcttccggttattcacccgggaatctctggcggccatcgagaagcgggccgccgaagagaaggccaagaaaccgaaaaaggagcaagataatgacgacgagaataaacccaagcctaacagtgacttggaagccgggaagaaccttcctttcatttacggggatattcctcctgaaatggttagtgagccactggaggatctcgatccctattacatcaacaagaaaacatttattgtcatgaataagggcaaggccatcttcagatttagcgcaaccagcgcactgtatatccttacaccccttaatcctgttagaaagattgctatcaaaatcctggttcactccttattcagcatgttaatcatgtgcacaatattgaccaactgtgtattcatgaccttatcaaatccacctgattggacaaaaaatgtggaatacactttcactggtatctacacctttgagtctctgatcaagatcctcgctcgaggattttgcctcgaggattttactttcttaagagacccatggaactggctcgacttttcagtaatcgtaatggcatacgtcacggaattcgttgatctgggcaacgtgagcgcactcaggacgttccgcgtcctccgtgcgttgaagacaatatctgtaataccaggcttgaagaccattgtgggggccctgatacagagtgtgaagaaactatccgatgtaatgatactgacggtgttctgtctgagtgtgtttgccctgatcggcctccaattgttcatggggaacctccgtaataagtgtctccaatggcctccaagtgacagcgctttcgagactaatacaacaagctattttaatggtactatggattccaatggcacattcgtcaatgttacaatgtctacctttaactggaaagactacatcggagacgattctcatttctacgtgctggatggtcagaaagaccctctgctgtgtgggaatggatcagacgctggccaatgtcccgaggggtatatttgtgttaaggcaggcagaaacccaaattacggctatacatcctttgatacattctcatgggcttttctttcactgttccgattaatgacccaggactactgggaaaacttgtatcagctgactctgcgggcggccgggaagacctatatgattttctttgtattggtgattttcttgggttcattttacttggtgaatctcatcttggcagtcgtggctatggcatacgaagagcagaatcaggccaccctcgaagaagcggagcaaaaggaggcagagtttcagcagatgctggagcagctgaagaaacagcaagaggaggcccaagcagtcgccgccgccagcgcagcctccagagacttctccggcataggcggtctcggtgagctccttgaatcatccagcgaggcctcaaagttatccagcaaaagcgcgaaagaatggcggaaccgacgtaagaagcggcgccagagagaacacctggagggtaacaacaaaggtgaacgggactccttcccaaagtccgaatctgaggactcagttaaaaggagcagcttcctgttctcaatggacggaaacagactgacctcagacaaaaagttttgttctcctcaccaaagcctgctgagtattagaggctcactcttctccccacgaagaaactctaagacttccatcttttctttccgcggaagagccaaagacgtaggctcagaaaatgacttcgcggatgacgagcattccacttttgaagattcagagtcacggagggatagtctgtttgtaccccatcgacacggcgagcgacgtaacagtaacgtctctcaagctagcatgagctctcgcatggtgcctggccttcccgctaacggtaagatgcacagcacagtggactgcaacggggtagtctctttagtgggcgggccctcagccctcaccagcccaacgggccagcttccccccgaaggtacgacaacagaaacagaagttcggaaaagaaggctctcaagctatcagatttcaatggaaatgctggaggactcttcaggtcgtcaacgcgctgtctcaatcgcgagcattcttactaatactatggaagagctggaagaaagcaggcagaaatgtcctccctgctggtacagatttgcgaacgtctttttgatctgggactgctgtgatgcatggcttaaagtgaagcatctagtgaatctaatcgtcatggacccatttgtcgatctagcaattacaatttgtattgtccttaacactttattcatggccatggagcattatcccatgaccgaacaatttagctccgttcttaccgtgggaaacctagtgtttaccggtatcttcaccgctgagatggtgctgaaaatcatcgccatggatccgtactattatttccaagaggggtggaacatctttgatggaattattgtttctttatctttgatggaactggggttgtccaacgtggagggactttcagtgttacgctcattccgcctgctccgtgtgtttaagcttgctaagtcttggcctactcttaacatgttaatcaaaattattggaaatagcgtgggcgccctgggcaatttaactctggtgttggccatcattgttttcatcttcgccgtggtggggatgcaacttttcggaaaatcttacaaagagtgcgtatgcaaaattaatgatgattgcactctcccgaggtggcacatgaatgacttcttccacagcttcctgatcgtgttccgagtcctgtgtggtgaatggatagagactatgtgggactgtatggaggtggcgggccagacaatgtgcttaatcgtgtttatgctcgtgatggtgatagggaacctagtagtgttgaaccttttcctcgctttattactctcctcatttagctctgataacctggccgcaacagatgacgataacgaaatgaacaaccttcagatagcggttggcaggatgcagaaaggcatagactacgtcaaaaacaagatgagggagtgctttcagaaagccttcttccggaagccgaaggtgatagagatccacgagggcaacaagatcgattcgtgcatgtcgaacaatacaggaattgaaataagcaaggagttaaattaccttagggatggcaatggaaccaccagcggcgtggggacgggaagctcagttgagaagtacgtgatcgacgagaacgattacatgtcctttatcaataatccaagcctaactgtgactgtgccaatcgctgtcggcgagtctgattttgagaacttaaacacggaggaattctcaagcgaatctgagctggaggagtcaaaagagaagctgaacgccacatccagttctgagggatccactgtggacgtggtactccctagagagggcgagcaggccgagaccgaacctgaggaggatttaaaacccgaggcctgctttacggagggctgcattaaaaagttcccattttgccaggtgagcactgaagaaggcaagggaaagatctggtggaatctgagaaagacctgttattccatcgtggagcataactggtttgaaacgtttatagtttttatgattctcctgtccagtggcgccttggcttttgaagacatctatatagaacagcgcaagactatcaaaaccatgcttgaatacgccgacaaggtgtttacgtacatctttatattggagatgctgttgaagtgggtagcttacggattccagacctattttaccaacgcctggtgctggctagacttcctgattgttgatgtgagcctggttagtctagtggcaaacgccttgggttactccgaacttggtgccattaagagtttgcgaactctgagggccctgaggccactccgagccctgagtcgctttgaagggatgcgggttgtcgtgaacgccctcgtgggagctatcccaagtatcatgaatgtactgcttgtgtgtcttatattttggctcatattctccataatgggagttaacctgttcgctggaaaattctatcattgtgtgaatatgacaactgggaatatgttcgatatcagtgatgttaataacttatctgattgccaggccctgggtaaacaggcacgatggaagaacgttaaagtgaacttcgataacgtgggagctggatacctggctttactgcaagtggcaacgttcaagggatggatggatataatgtacgccgccgtggactcaagggacgttaaactacaacctgtatacgaggaaaatctctacatgtatttatatttcgttatttttatcatttttggatcattctttacgctgaatttgtttatcggagtgatcatcgacaacttcaatcagcagaagaagaagtttggaggccaggatatatttatgaccgaggagcagaagaaatactataacgccatgaagaaacttgggtcgaagaagcctcaaaaacccatccctagacccgctaataaattccaaggcatggtattcgatttcgtgacgcggcaagtttttgacatttctattatgatactgatttgtctgaacatggtgaccatgatggttgagaccgatgaccagggtaagtatatgacactggtcttgtcacggattaacttagtgtttatcgtgttattcactggtgagtttgtactgaagttagtgtcactacggcactactattttactattggctggaatatcttcgattttgttgtggtgattctttccatcgtagggatgttcttggccgagatgatagaaaaatacttcgtcagtcccacactgtttcgcgtgattcgtctagcacggattggaagaattctccgacttatcaagggagctaaggggatccgaaccctgctctttgctctcatgatgtctttacctgccttgtttaacatcggcctgctcctgttcctggtgatgttcatctatgccatctttgggatgtccaattttgcttacgtcaaaaaagaagctggaatagacgacatgttcaactttgagaccttcgggaatagtatgatttgcctgtttcagatcacaacatctgcaggatgggacggtctgctggcccccatcctgaattctgcccctccagactgtgatcctgacacgatccatccaggctcctctgtgaagggcgactgcggtaaccccagtgtgggaatattcttttttgtctcatatatcattatatcattccttgtggtcgttaacatgtatatcgccgttatcttggagaacttctcagtcgccactgaagagagtgctgagcccctgtcagaggatgatttcgaaatgttttacgaagtctgggaaaaattcgaccctgatgccacccagttcattgagttctccaaactcagcgactttgccgcggcacttgaccctcctctgcttattgcaaagcccaacaaggtgcagctgatcgctatggacctgcctatggtgtccggcgatcgcatccactgtctcgatatcctgttcgcattcactaagagggttctgggggagagcggagagatggatgcactgagaatccagatggaggacaggtttatggcatccaaccctagcaaggtgtcttacgagcctatcacaacgacgctcaagaggaagcaggaggaagtctccgccgctattatccagagaaatttcaggtgctatctgctcaagcagaggctgaagaatataagttcaaactacaacaaagaggcaataaaaggtagaattgatctccctattaaacaggatatgataatcgacaagctgaacgggaattccacacctgagaagacagatgggagctcaagcacaaccagtccaccgagttatgattctgtgacaaagcccgataaggagaaatttgaaaaagataagccagaaaaagagtccaaagggaaggaagtgcgggaaaatcagaaatag

SEQ ID NO: 169128 - DNA, 6003 bp, Artificial Sequence
  derived and/or modified sequence
atggcgcaggcacttttggttccgcctggacccgaaagctttcggttgtttaccagagaatcactggccgcaatagaaaaacgggctgctgaagagaaggccaaaaagcctaagaaagaacaggacaacgacgatgagaataaacctaaacccaactcagacttggaagctggcaagaaccttcctttcatttatggtgatattccacctgagatggtgtctgaacccttggaggacctggatccatactacattaataagaagacgttcattgtgatgaacaagggtaaggcaattttccgattctcagcaacctctgcgctctatattctcactcccctcaatcctgtgagaaagatcgcgatcaagatcctggttcacagccttttttccatgttgatcatgtgtaccattttaacgaactgtgtgtttatgactctgagcaacccaccagactggactaagaacgtcgagtacacttttacaggtatttatactttcgaatctctcattaaaatcctcgccagagggttctgcctggaggattttacatttttgcgagatccatggaactggctcgacttctctgtgattgttatggcttatgtcactgagttcgtcgatctaggaaatgtgtccgctctgcgaaccttcagggtgctcagggcccttaagacaatatctgtcatccccggattgaagacaatcgtcggggctttgatccagagtgtcaaaaagcttagtgacgttatgatactcaccgtgttctgtctctctgtgttcgcattaattggattgcagctgttcatgggcaatcttcggaataagtgtttgcagtggcccccatctgattccgccttcgaaaccaacactacgtcctacttcaatggaaccatggactcaaatggaactttcgtgaacgtcactatgagtacctttaattggaaggattatatcggagatgatagccatttctacgtcctcgacggccaaaaggatccgctcctgtgtgggaatgggtctgacgctggccagtgccccgaaggctacatatgcgtcaaagctggtagaaaccctaactacggatatacttcctttgacaccttctcttgggcgtttctttctttattcaggctgatgacccaggattactgggagaacctgtaccaactgaccctgagggccgcaggaaagacatacatgattttctttgttttggtcatttttcttggaagcttctatttggtgaatcttattcttgcggtggttgccatggcctatgaagaacagaatcaggcgacactggaagaggccgagcagaaagaagctgaatttcagcagatgctggaacagctcaagaaacagcaggaggaagcacaagcagtggctgctgcaagcgccgcaagccgtgatttttctggaatcggcggactcggtgagctgttggagtctagcagtgaggccagtaagttgtccagcaagtctgccaaagaatggcgcaaccggaggaagaaaaggaggcagagagaacatctggaggggaacaataaaggcgaaagggacagctttccgaagagcgagtccgaagattccgtgaaacgctcttcattcttgttttctatggatgggaacaggttgactagcgataagaagttctgtagtccccaccaaagcttgcttagtattaggggctcactgtttagccctcgcagaaactcgaaaacatctatcttcagcttccgaggccgagcgaaggacgtgggttccgagaatgattttgctgacgatgagcactctacatttgaggattcggaaagtaggcgggattctctctttgtgccccatagacacggcgagaggcgcaattcaaacgtgtcacaggcatcgatgtctagcagaatggtgcctggactgccagccaacggaaaaatgcatagtactgtggactgcaacggggttgtcagcttagtggggggaccatctgcccttacgtcacccactggccaactcccgcctgaaggtaccaccaccgagaccgaggtgaggaagagaaggctaagttcatatcagatttcaatggaaatgttggaggacagtagcggtaggcaacgggcagtctccattgctagtatcttaaccaacactatggaagagcttgaggagtcgagacagaagtgccctccttgttggtatagatttgctaacgtatttcttatctgggactgctgtgatgcctggctcaaggttaagcacctggtaaatctcattgtgatggaccccttcgtggacttggcaattacaatctgcatcgtactgaacaccctttttatggctatggagcactacccaatgaccgaacagttcagctcggtgttgactgtggggaacctggtgttcacaggtatctttacagctgagatggtgttaaagattattgccatggatccctactactattttcaggaaggatggaacatctttgacggcataatcgtcagcctctcactgatggagctcggcctgagcaacgtggagggcctgagcgttctgcggtcttttcgcctcctgcgagtcttcaagttggctaaatcctggccaaccctgaacatgctaattaaaatcataggaaactccgtgggtgcattaggtaacctcacgctagtcctagccataatcgttttcatttttgcagtggttggtatgcaattgttcggaaagagctataaagaatgcgtgtgtaaaatcaatgacgactgcacactacctcgctggcacatgaacgacttctttcacagtttcctcatagtattccgcgtgctgtgtggcgaatggattgagactatgtgggattgtatggaagtagctggacaaaccatgtgcctgattgtcttcatgctagtgatggtcattgggaatctggtcgtgcttaatttgtttctggctctgctgctgtccagtttctcatctgacaatctggcagctacagatgacgacaacgagatgaataatctccaaatcgcagtgggtcgcatgcagaaagggattgactacgtgaagaataagatgcgcgagtgtttccagaaagccttttttcgaaagccgaaggtgattgagattcacgaaggaaataagatcgatagctgcatgtctaataatactggaatcgagatctctaaggagctcaattatctgcgggacggtaatggcaccacatctggagttggtaccggttccagcgtcgagaagtatgttatagatgagaatgactatatgtcatttataaacaacccatccctcactgtgacggtgccaatcgcagtgggtgagagtgattttgagaatcttaacactgaggaattcagctctgagtctgaactggaggagtctaaagagaagctgaacgcaacttcttccagtgaagggtcaaccgtcgatgtggtgttaccccgagaaggagagcaggccgaaacggagcccgaagaggatctaaagccagaggcatgttttaccgagggatgtattaagaaattccctttttgtcaggtaagcacagaagaagggaagggaaagatttggtggaatctgcgcaagacctgctactccatcgtggagcataactggttcgaaacgttcatcgtattcatgatactcctgtcctccggtgccctggctttcgaagatatctatattgagcaacgaaagacgataaagacgatgctggagtacgctgacaaagtgttcacgtacatttttattcttgagatgctgctcaaatgggtagcctatggctttcagacatacttcactaacgcctggtgttggttggactttctaatcgtggacgttagtctcgtgagcctggttgctaacgccctcggatatagcgagttgggcgcaattaaaagccttaggacattgcgggcactgaggcctctacgcgcactgtctaggtttgagggaatgcgtgtcgtcgtcaacgccctggttggcgcaattcccagtattatgaacgtgttactggtgtgcttgatattttggcttattttctcaataatgggagtgaatctgtttgccggtaagttttaccactgcgtcaacatgactacaggcaacatgttcgacatctccgacgtaaacaatctaagcgattgccaagcgctcgggaagcaggctcgatggaaaaacgttaaagtaaatttcgataatgttggtgctggctacctggccttactccaggtcgctacattcaaagggtggatggacataatgtatgccgctgtggactccagagatgtgaaactgcagcctgtttacgaggaaaatctgtacatgtatctctacttcgtcatctttatcattttcggtagttttttcacattaaatctcttcatcggggtgataattgacaatttcaaccagcagaagaagaagtttggcggacaggacatcttcatgaccgaggagcagaagaaatactacaacgcaatgaaaaaactaggatccaaaaaaccccagaagcctattcctcgaccggcaaacaagtttcagggaatggtgttcgacttcgtgacaagacaggtttttgatatatccattatgatcctgatttgtctgaacatggttaccatgatggttgagactgacgatcaagggaaatatatgacactggttctgtcccgtatcaacctggttttcatcgttctcttcaccggcgaatttgtgctcaagctggtctctctccggcactattacttcacgatcggctggaatatatttgattttgtcgtcgttattctgtccattgtgggtatgtttctggccgagatgattgaaaaatattttgttagtcctactctattcagggttattcgccttgcacgaatcggcaggattcttcggctaatcaagggggctaaaggcatcaggactctactatttgccctgatgatgagcctgcccgctctatttaatattgggcttctcctctttttggtaatgttcatctatgccatcttcggaatgagcaacttcgcatatgtcaagaaggaagctgggatcgatgatatgtttaattttgagacgtttgggaattctatgatctgtctattccagatcacaaccagcgcgggatgggacgggcttctggccccaatcttgaactcggccccacccgattgcgaccccgacaccatccatccgggttcctctgtgaagggagactgtggcaacccgagcgtggggatcttctttttcgtgagctatattattatcagttttctggtggttgtgaacatgtacattgcagttatccttgagaatttttcagttgccactgaagagagtgcagagcccctgtcagaagacgacttcgaaatgttctacgaagtttgggagaagttcgatccagatgccacccagtttattgagttcagtaaacttagtgattttgctgccgcattggatcctccactcttgatcgccaagccgaataaggtgcaactcatagcaatggatctgcctatggttagcggagatcgaattcattgcctggatatcctttttgcctttacgaagcgggttttgggcgaaagtggcgagatggatgctctgcgcatccagatggaagaccgctttatggcctccaatccgagtaaagttagctacgagccaatcactactaccctcaagaggaaacaggaggaagtcagcgccgcaatcatacaacgcaacttccgctgctacctgctaaagcagcggctgaagaatataagcagcaactataataaggaggctattaagggcaggatcgatttgcctatcaagcaggatatgatcattgataagctgaatggcaattcaacacccgaaaaaacagacggaagctcgagcactaccagtccgccttcttacgacagcgttaccaagcctgataaagaaaaattcgagaaggacaagccagaaaaagagtctaagggcaaagaagttcgcgagaaccagaaatat

SEQ ID NO: 169129 - DNA, 9091 bp, Artificial Sequence
  derived and/or modified sequence
gaagcggaggcataagcagagaggattctggaaaggtctctttgttttcttatccacagagaaagaaagaaaaaaaattgtaactaatttgtaaacctctgtggtcaaaaaaaaaaaaaaaaaaaaaagctgaacagctgcagaggaagacacgttataccctaaccatcttggatgctgggctttgttatgctgtaattcataaggctctgttttatcagagattatggagcaagaaaactgaagccaagccacatcaaggtttgacagggatgagatacctgtcaaggattcatagtagagtggcttactgggaaaggagcaaagaatctcttctagggatattgtaagaataaatgagataattcacagaagggacctggagcttttccggaaaaaggtgctgtgactatctaaggtaattcgtatgcaagaagctacacgtaattaaatgtgcaggatgaaaagatggcacaggcactgttggtacccccaggacctgaaagcttccgcctttttactagagaatctcttgctgctatcgaaaaacgtgctgcagaagagaaagccaagaagcccaaaaaggaacaagataatgatgatgagaacaaaccaaagccaaatagtgacttggaagctggaaagaaccttccatttatttatggagacattcctccagagatggtgtcagagcccctggaggacctggatccctactatatcaataagaaaacttttatagtaatgaataaaggaaaggcaattttccgattcagtgccacctctgccttgtatattttaactccactaaaccctgttaggaaaattgctatcaagattttggtacattctttattcagcatgcttatcatgtgcactattttgaccaactgtgtatttatgaccttgagcaaccctcctgactggacaaagaatgtagagtacacattcactggaatctatacctttgagtcacttataaaaatcttggcaagagggttttgcttagaagattttacgtttcttcgtgatccatggaactggctggatttcagtgtcattgtgatggcatatgtgacagagtttgtggacctgggcaatgtctcagcgttgagaacattcagagttctccgagcactgaaaacaatttcagtcattccaggtttaaagaccattgtgggggccctgatccagtcggtaaagaagctttctgatgtgatgatcctgactgtgttctgtctgagcgtgtttgctctcattgggctgcagctgttcatgggcaatctgaggaataaatgtttgcagtggcccccaagcgattctgcttttgaaaccaacaccacttcctactttaatggcacaatggattcaaatgggacatttgttaatgtaacaatgagcacatttaactggaaggattacattggagatgacagtcacttttatgttttggatgggcaaaaagaccctttactctgtggaaatggctcagatgcaggccagtgtccagaaggatacatctgtgtgaaggctggtcgaaaccccaactatggctacacaagctttgacacctttagctgggctttcctgtctctatttcgactcatgactcaagactactgggaaaatctttaccagttgacattacgtgctgctgggaaaacatacatgatattttttgtcctggtcattttcttgggctcattttatttggtgaatttgatcctggctgtggtggccatggcctatgaggagcagaatcaggccaccttggaagaagcagaacaaaaagaggccgaatttcagcagatgctcgaacagcttaaaaagcaacaggaagaagctcaggcagttgcggcagcatcagctgcttcaagagatttcagtggaataggtgggttaggagagctgttggaaagttcttcagaagcatcaaagttgagttccaaaagtgctaaagaatggaggaaccgaaggaagaaaagaagacagagagagcaccttgaaggaaacaacaaaggagagagagacagctttcccaaatccgaatctgaagacagcgtcaaaagaagcagcttccttttctccatggatggaaacagactgaccagtgacaaaaaattctgctcccctcatcagtctctcttgagtatccgtggctccctgttttccccaagacgcaatagcaaaacaagcattttcagtttcagaggtcgggcaaaggatgttggatctgaaaatgactttgctgatgatgaacacagcacatttgaagacagcgaaagcaggagagactcactgtttgtgccgcacagacatggagagcgacgcaacagtaacgttagtcaggccagtatgtcatccaggatggtgccagggcttccagcaaatgggaagatgcacagcactgtggattgcaatggtgtggtttccttggtgggtggaccttcagctctaacgtcacctactggacaacttcccccagagggcaccaccacagaaacggaagtcagaaagagaaggttaagctcttaccagatttcaatggagatgctggaggattcctctggaaggcaaagagccgtgagcatagccagcattctgaccaacacaatggaagaacttgaagaatctagacagaaatgtccgccatgctggtatagatttgccaatgtgttcttgatctgggactgctgtgatgcatggttaaaagtaaaacatcttgtgaatttaattgttatggatccatttgttgatcttgccatcactatttgcattgtcttaaataccctctttatggccatggagcactaccccatgactgagcaattcagtagtgtgttgactgtaggaaacctggtctttactgggattttcacagcagaaatggttctcaagatcattgccatggatccttattactatttccaagaaggctggaatatctttgatggaattattgtcagcctcagtttaatggagcttggtctgtcaaatgtggagggattgtctgtactgcgatcattcagactgcttagagttttcaagttggcaaaatcctggcccacactaaatatgctaattaagatcattggcaattctgtgggggctctaggaaacctcaccttggtgttggccatcatcgtcttcatttttgctgtggtcggcatgcagctctttggtaagagctacaaagaatgtgtctgcaagatcaatgatgactgtacgctcccacggtggcacatgaacgacttcttccactccttcctgattgtgttccgcgtgctgtgtggagagtggatagagaccatgtgggactgtatggaggtcgctggccaaaccatgtgccttattgttttcatgttggtcatggtcattggaaaccttgtggttctgaacctctttctggccttattgttgagttcatttagctcagacaaccttgctgctactgatgatgacaatgaaatgaataatctgcagattgcagtaggaagaatgcaaaagggaattgattatgtgaaaaataagatgcgggagtgtttccaaaaagccttttttagaaagccaaaagttatagaaatccatgaaggcaataagatagacagctgcatgtccaataatactggaattgaaataagcaaagagcttaattatcttagagatgggaatggaaccaccagtggtgtaggtactggaagcagtgttgaaaaatacgtaatcgatgaaaatgattatatgtcattcataaacaaccccagcctcaccgtcacagtgccaattgctgttggagagtctgactttgaaaacttaaatactgaagagttcagcagtgagtcagaactagaagaaagcaaagagaaattaaatgcaaccagctcatctgaaggaagcacagttgatgttgttctaccccgagaaggtgaacaagctgaaactgaacccgaagaagaccttaaaccggaagcttgttttactgaaggatgtattaaaaagtttccattctgtcaagtaagtacagaagaaggcaaagggaagatctggtggaatcttcgaaaaacctgctacagtattgttgagcacaactggtttgagactttcattgtgttcatgatccttctcagtagtggtgcattggcctttgaagatatatacattgaacagcgaaagactatcaaaaccatgctagaatatgctgacaaagtctttacctatatattcattctggaaatgcttctcaaatgggttgcttatggatttcaaacatatttcactaatgcctggtgctggctagatttcttgatcgttgatgtttctttggttagcctggtagccaatgctcttggctactcagaactcggtgccatcaaatcattacggacattaagagctttaagacctctaagagccttatcccggtttgaaggcatgagggtggttgtgaatgctcttgttggagcaattccctctatcatgaatgtgctgttggtctgtctcatcttctggttgatctttagcatcatgggtgtgaatttgtttgctggcaagttctaccactgtgttaacatgacaacgggtaacatgtttgacattagtgatgttaacaatttgagtgactgtcaggctcttggcaagcaagctcggtggaaaaacgtgaaagtaaactttgataatgttggcgctggctatcttgcactgcttcaagtggccacatttaaaggctggatggatattatgtatgcagctgttgattcacgagatgttaaacttcagcctgtatatgaagaaaatctgtacatgtatttatactttgtcatctttatcatctttgggtcattcttcactctgaatctattcattggtgtcatcatagataacttcaaccagcagaaaaagaagtttggaggtcaagacatctttatgacagaggaacagaaaaaatattacaatgcaatgaagaaacttggatccaagaaacctcagaaacccatacctcgcccagcaaacaaattccaaggaatggtctttgattttgtaaccagacaagtctttgatatcagcatcatgatcctcatctgcctcaacatggtcaccatgatggtggaaacggatgaccagggcaaatacatgaccctagttttgtcccggatcaacctagtgttcattgttctgttcactggagaatttgtgctgaagctcgtctccctcagacactactacttcactataggctggaacatctttgactttgtggtggtgattctctccattgtaggtatgtttctggctgagatgatagaaaagtattttgtgtcccctaccttgttccgagtgatccgtcttgccaggattggccgaatcctacgtctgatcaaaggagcaaaggggatccgcacgctgctctttgctttgatgatgtcccttcctgcgttgtttaacatcggcctcctgctcttcctggtcatgtttatctatgccatctttgggatgtccaactttgcctatgttaaaaaggaagctggaattgatgacatgttcaactttgagacctttggcaacagcatgatctgcttgttccaaattacaacctctgctggctgggatggattgctagcacctattcttaatagtgcaccacccgactgtgaccctgacacaattcaccctggcagctcagttaagggagactgtgggaacccatctgttgggattttcttttttgtcagttacatcatcatatccttcctggttgtggtgaacatgtacatcgcggtcatcctggagaacttcagtgttgctactgaagaaagtgcagagcccctgagtgaggatgactttgagatgttctatgaggtttgggaaaagtttgatcccgatgcgacccagtttatagagttctctaaactctctgattttgcagctgccctggatcctcctcttctcatagcaaaacccaacaaagtccagcttattgccatggatctgcccatggtcagtggtgaccggatccactgtcttgatattttatttgcctttacaaagcgtgttttgggtgagagtggagagatggatgcccttcgaatacagatggaagacaggtttatggcatcaaacccctccaaagtctcttatgagcctattacaaccactttgaaacgtaaacaagaggaggtgtctgccgctatcattcagcgtaatttcagatgttatcttttaaagcaaaggttaaaaaatatatcaagtaactataacaaagaggcaattaaagggaggattgacttacctataaaacaagacatgattattgacaaactaaatgggaactccactccagaaaaaacagatgggagttcctctaccacctctcctccttcctatgatagtgtaacaaaaccagacaaggaaaagtttgagaaagacaaaccagaaaaagaaagcaaaggaaaagaggtcagagaaaatcaaaagtaaaaagaaacaaagaattatctttgtgatcaattgtttacagcctatgaaggtaaagtatatgtgtcaactggacttcaagaggaggtccatgccaaactgactgttttaacaaatactcatagtcagtgcctatacaagacagtgaagtgacctctctgtcactgcaactctgtgaagcagggtatcaacattgacaagaggttgctgtttttattaccagctgacactgctgaggagaaacccaatggctacctagactatagggatagttgtgcaaagtgaacattgtaactacaccaaacacctttagtacagtccttgcatccattctatttttaacttccatatctgccatatttttacaaaatttgttctagtgcatttccatggtccccaattcatagtttattcataatgctatgtcactatttttgtaaatgaggtttacgttgaagaaacagtatacaagaaccctgtctctcaaatgatcagacaaaggtgttttgccagagagataaaatttttgctcaaaaccagaaaaagaattgtaatggctacagtttcagttacttccattttctagatggctttaattttgaaagtattttagtctgttatgtttgtttctatctgaacagttatgtgcctgtaaagtctcctctaatatttaaaggattatttttatgcaaagtattctgtttcagcaagtgcaaattttattctaagtttcagagctctatatttaatttaggtcaaatgctttccaaaaagtaatctaataaatccattctagaaaaatatatctaaagtattgctttagaatagttgttccactttctgctgcagtattgctttgccatcttctgctctcagcaaagctgatagtctatgtcaattaaataccctatgttatgtaaatagttattttatcctgtggtgcatgtttgggcaaatatatatatagcctgataaacaacttctattaaatcaaatatgtaccacagtgtatgtgtcttttgcaagcttccaacagggatgtatcctgtatcattcattaaacatagtttaaaggctatcactaatgcatgttaatattgcctatgctgctctattttactcaatccattcttcacaagtcttggttaaagaatgtcacatattggtgatagaatgaattcaacctgctctgtccattatgtcaagcagaataatttgaagctatttacaaacacctttacttttgcacttttaattcaacatgagtatcatatggtatctctctagatttcaaggaaacacactggatactgcctactgacaaaacctattcttcatattttgctaaaaatatgtctaaaacttgtttaaatataaataatgtaaaaatataatcaactttatttgtcagcattttgtacataagaaaattattttcaggttgatgacatcacaatttattttactttatgcttttgcttttgatttttaatcacaattccaaacttttgaatccataagatttttcaatggataatttcctaaaataaaagttagataatgggttttatggatttctttgttataatatattttctaccattccaataggagatacattggtcaaacactcaaacctagatcattttctaccaactatggttgcctcaatataaccttttattcatagatgtttttttttattcaacttttgtagtatttacgtatgcagactagtcttatttttttaattcctgctgcactaaagctattacaaatataacatggactttgttctttttagccatgaacaaagtggcaaagttgtgcaattacctaacatgatataaatttttgttttttgcacaaaccaaaagtttaatgttaattctttttacaaaactatttactgtagtgtattgaagaactgcatgcagggaattgctattgctaaaaagaatggtgagctacgtcattattgagccaaaagaataaatttcattttttattgcatttcacttattggcctctggggttttttgtttttgttttttgctgttggcagtttaaaatatatataattaataaaacctgtgcttgatctgacatttgtatacataaaagtttacatgaattttacaacaaactagtgcatgattcaccaagcagtactacagaacaaaggcaaattaaaagcagctttgtgaacttttatgtgtgcaaaggatcaagttcacatgttccaactttcaggtttgataataatagtagtaaccacctacaatagctttcaatttcaattaactcccttggctataagcatctaaactcatcttctttcaatataattgatgctatctcctaattacttggtggctaataaatgttacattctttgttacttaaatgcattatataaactcctatgtatacataaggtattaatgatatagttattgagaatttatattaacttttttttcaagaacccttggatttatgtgaggtcaaaaccaaactcttattctcagtggaaaactccagttgtaatgcatatttttaaagacaatttggatctaaatatgtatttcataattctcccataataaattatataaggtgg

SEQ ID NO: 169130 - DNA, 6003 bp, Artificial Sequence
  derived and/or modified sequence
atggcccaggccctgctggtgccccccggccccgagagcttcagactgttcaccagagagagcctggccgccatcgagaagagagccgccgaggagaaggccaagaagcccaagaaggagcaggacaacgacgacgagaacaagcccaagcccaacagcgacctggaggccggcaagaacctgcccttcatctacggcgacatcccccccgagatggtgagcgagcccctggaggacctggacccctactacatcaacaagaagaccttcatcgtgatgaacaagggcaaggccatcttcagattcagcgccaccagcgccctgtacatcctgacccccctgaaccccgtgagaaagatcgccatcaagatcctggtgcacagcctgttcagcatgctgatcatgtgcaccatcctgaccaactgcgtgttcatgaccctgagcaacccccccgactggaccaagaacgtggagtacaccttcaccggcatctacaccttcgagagcctgatcaagatcctggccagaggcttctgcctggaggacttcaccttcctgagagacccctggaactggctggacttcagcgtgatcgtgatggcctacgtgaccgagttcgtggacctgggcaacgtgagcgccctgagaaccttcagagtgctgagagccctgaagaccatcagcgtgatccccggcctgaagaccatcgtgggcgccctgatccagagcgtgaagaagctgagcgacgtgatgatcctgaccgtgttctgcctgagcgtgttcgccctgatcggcctgcagctgttcatgggcaacctgagaaacaagtgcctgcagtggccccccagcgacagcgccttcgagaccaacaccaccagctacttcaacggcaccatggacagcaacggcaccttcgtgaacgtgaccatgagcaccttcaactggaaggactacatcggcgacgacagccacttctacgtgctggacggccagaaggaccccctgctgtgcggcaacggcagcgacgccggccagtgccccgagggctacatctgcgtgaaggccggcagaaaccccaactacggctacaccagcttcgacaccttcagctgggccttcctgagcctgttcagactgatgacccaggactactgggagaacctgtaccagctgaccctgagagccgccggcaagacctacatgatcttcttcgtgctggtgatcttcctgggcagcttctacctggtgaacctgatcctggccgtggtggccatggcctacgaggagcagaaccaggccaccctggaggaggccgagcagaaggaggccgagttccagcagatgctggagcagctgaagaagcagcaggaggaggcccaggccgtggccgccgccagcgccgccagcagagacttcagcggcatcggcggcctgggcgagctgctggagagcagcagcgaggccagcaagctgagcagcaagagcgccaaggagtggagaaacagaagaaagaagagaagacagagagagcacctggagggcaacaacaagggcgagagagacagcttccccaagagcgagagcgaggacagcgtgaagagaagcagcttcctgttcagcatggacggcaacagactgaccagcgacaagaagttctgcagcccccaccagagcctgctgagcatcagaggcagcctgttcagccccagaagaaacagcaagaccagcatcttcagcttcagaggcagagccaaggacgtgggcagcgagaacgacttcgccgacgacgagcacagcaccttcgaggacagcgagagcagaagagacagcctgttcgtgccccacagacacggcgagagaagaaacagcaacgtgagccaggccagcatgagcagcagaatggtgcccggcctgcccgccaacggcaagatgcacagcaccgtggactgcaacggcgtggtgagcctggtgggcggccccagcgccctgaccagccccaccggccagctgccccccgagggcaccaccaccgagaccgaggtgagaaagagaagactgagcagctaccagatcagcatggagatgctggaggacagcagcggcagacagagagccgtgagcatcgccagcatcctgaccaacaccatggaggagctggaggagagcagacagaagtgccccccctgctggtacagattcgccaacgtgttcctgatctgggactgctgcgacgcctggctgaaggtgaagcacctggtgaacctgatcgtgatggaccccttcgtggacctggccatcaccatctgcatcgtgctgaacaccctgttcatggccatggagcactaccccatgaccgagcagttcagcagcgtgctgaccgtgggcaacctggtgttcaccggcatcttcaccgccgagatggtgctgaagatcatcgccatggacccctactactacttccaggagggctggaacatcttcgacggcatcatcgtgagcctgagcctgatggagctgggcctgagcaacgtggagggcctgagcgtgctgagaagcttcagactgctgagagtgttcaagctggccaagagctggcccaccctgaacatgctgatcaagatcatcggcaacagcgtgggcgccctgggcaacctgaccctggtgctggccatcatcgtgttcatcttcgccgtggtgggcatgcagctgttcggcaagagctacaaggagtgcgtgtgcaagatcaacgacgactgcaccctgcccagatggcacatgaacgacttcttccacagcttcctgatcgtgttcagagtgctgtgcggcgagtggatcgagaccatgtgggactgcatggaggtggccggccagaccatgtgcctgatcgtgttcatgctggtgatggtgatcggcaacctggtggtgctgaacctgttcctggccctgctgctgagcagcttcagcagcgacaacctggccgccaccgacgacgacaacgagatgaacaacctgcagatcgccgtgggcagaatgcagaagggcatcgactacgtgaagaacaagatgagagagtgcttccagaaggccttcttcagaaagcccaaggtgatcgagatccacgagggcaacaagatcgacagctgcatgagcaacaacaccggcatcgagatcagcaaggagctgaactacctgagagacggcaacggcaccaccagcggcgtgggcaccggcagcagcgtggagaagtacgtgatcgacgagaacgactacatgagcttcatcaacaaccccagcctgaccgtgaccgtgcccatcgccgtgggcgagagcgacttcgagaacctgaacaccgaggagttcagcagcgagagcgagctggaggagagcaaggagaagctgaacgccaccagcagcagcgagggcagcaccgtggacgtggtgctgcccagagagggcgagcaggccgagaccgagcccgaggaggacctgaagcccgaggcctgcttcaccgagggctgcatcaagaagttccccttctgccaggtgagcaccgaggagggcaagggcaagatctggtggaacctgagaaagacctgctacagcatcgtggagcacaactggttcgagaccttcatcgtgttcatgatcctgctgagcagcggcgccctggccttcgaggacatctacatcgagcagagaaagaccatcaagaccatgctggagtacgccgacaaggtgttcacctacatcttcatcctggagatgctgctgaagtgggtggcctacggcttccagacctacttcaccaacgcctggtgctggctggacttcctgatcgtggacgtgagcctggtgagcctggtggccaacgccctgggctacagcgagctgggcgccatcaagagcctgagaaccctgagagccctgagacccctgagagccctgagcagattcgagggcatgagagtggtggtgaacgccctggtgggcgccatccccagcatcatgaacgtgctgctggtgtgcctgatcttctggctgatcttcagcatcatgggcgtgaacctgttcgccggcaagttctaccactgcgtgaacatgaccaccggcaacatgttcgacatcagcgacgtgaacaacctgagcgactgccaggccctgggcaagcaggccagatggaagaacgtgaaggtgaacttcgacaacgtgggcgccggctacctggccctgctgcaggtggccaccttcaagggctggatggacatcatgtacgccgccgtggacagcagagacgtgaagctgcagcccgtgtacgaggagaacctgtacatgtacctgtacttcgtgatcttcatcatcttcggcagcttcttcaccctgaacctgttcatcggcgtgatcatcgacaacttcaaccagcagaagaagaagttcggcggccaggacatcttcatgaccgaggagcagaagaagtactacaacgccatgaagaagctgggcagcaagaagccccagaagcccatccccagacccgccaacaagttccagggcatggtgttcgacttcgtgaccagacaggtgttcgacatcagcatcatgatcctgatctgcctgaacatggtgaccatgatggtggagaccgacgaccagggcaagtacatgaccctggtgctgagcagaatcaacctggtgttcatcgtgctgttcaccggcgagttcgtgctgaagctggtgagcctgagacactactacttcaccatcggctggaacatcttcgacttcgtggtggtgatcctgagcatcgtgggcatgttcctggccgagatgatcgagaagtacttcgtgagccccaccctgttcagagtgatcagactggccagaatcggcagaatcctgagactgatcaagggcgccaagggcatcagaaccctgctgttcgccctgatgatgagcctgcccgccctgttcaacatcggcctgctgctgttcctggtgatgttcatctacgccatcttcggcatgagcaacttcgcctacgtgaagaaggaggccggcatcgacgacatgttcaacttcgagaccttcggcaacagcatgatctgcctgttccagatcaccaccagcgccggctgggacggcctgctggcccccatcctgaacagcgccccccccgactgcgaccccgacaccatccaccccggcagcagcgtgaagggcgactgcggcaaccccagcgtgggcatcttcttcttcgtgagctacatcatcatcagcttcctggtggtggtgaacatgtacatcgccgtgatcctggagaacttcagcgtggccaccgaggagagcgccgagcccctgagcgaggacgacttcgagatgttctacgaggtgtgggagaagttcgaccccgacgccacccagttcatcgagttcagcaagctgagcgacttcgccgccgccctggacccccccctgctgatcgccaagcccaacaaggtgcagctgatcgccatggacctgcccatggtgagcggcgacagaatccactgcctggacatcctgttcgccttcaccaagagagtgctgggcgagagcggcgagatggacgccctgagaatccagatggaggacagattcatggccagcaaccccagcaaggtgagctacgagcccatcaccaccaccctgaagagaaagcaggaggaggtgagcgccgccatcatccagagaaacttcagatgctacctgctgaagcagagactgaagaacatcagcagcaactacaacaaggaggccatcaagggcagaatcgacctgcccatcaagcaggacatgatcatcgacaagctgaacggcaacagcacccccgagaagaccgacggcagcagcagcaccaccagcccccccagctacgacagcgtgaccaagcccgacaaggagaagttcgagaaggacaagcccgagaaggagagcaagggcaaggaggtgagagagaaccagaagtag

SEQ ID NO: 169131 - protein, 211 aa, Artificial Sequence
  derived and/or modified sequence
MAVVPLLLLGGLWSAVGASSLGVVTCGSVVKLLNTRHNVRLHSHDVRYGSGSGQQSVTGVTSVDDSNSYWRIRGKSATVCERGTPIKCGQPIRLTHVNTGRNLHSHHFTSPLSGNQEVSAFGEEGEGDYLDDWTVLCNGPYWVRDGEVRFKHSSTEVLLSVTGEQYGRPISGQKEVHGMAQPSQNNYWKAMEGIFMKPSELLKAEAHHAEL

SEQ ID NO: 169132 - DNA, 636 bp, Artificial Sequence
  derived and/or modified sequence
atggccgtggtgcccctgctgctgctgggcggcctgtggagcgccgtgggcgccagcagcctgggcgtggtgacctgcggcagcgtggtgaagctgctgaacaccagacacaacgtgagactgcacagccacgacgtgagatacggcagcggcagcggccagcagagcgtgaccggcgtgaccagcgtggacgacagcaacagctactggagaatcagaggcaagagcgccaccgtgtgcgagagaggcacccccatcaagtgcggccagcccatcagactgacccacgtgaacaccggcagaaacctgcacagccaccacttcaccagccccctgagcggcaaccaggaggtgagcgccttcggcgaggagggcgagggcgactacctggacgactggaccgtgctgtgcaacggcccctactgggtgagagacggcgaggtgagattcaagcacagcagcaccgaggtgctgctgagcgtgaccggcgagcagtacggcagacccatcagcggccagaaggaggtgcacggcatggcccagcccagccagaacaactactggaaggccatggagggcatcttcatgaagcccagcgagctgctgaaggccgaggcccaccacgccgagctgtag

SEQ ID NO: 169133 - DNA, 636 bp, Artificial Sequence
  derived and/or modified sequence
atggctgtggtcccccttttgctgctgggcggcctctggagcgccgtgggcgcgtcttccctgggagtagtcacctgtggaagtgtggtcaagttgcttaatacccggcataatgttcggcttcacagccatgatgtgcgctacggtagtggctccggacagcagtctgtaaccggtgtaacgagcgtggacgacagcaactcatactggcgaatcagaggtaaatcagccacagtgtgcgaaaggggaacacctatcaagtgcggccagcctatccggttaacccacgttaataccggcagaaatttgcattcccaccacttcacatcacccctcagcggtaaccaggaagtgagcgctttcggggaggagggcgagggcgactatctggacgattggaccgttctgtgtaatggtccttattgggtgcgagatggcgaagtgcgcttcaaacactcgtcaaccgaggtgcttctgtccgtgactggggagcagtacggtaggcccatctccggacagaaagaggttcacggtatggctcaaccatctcagaataattactggaaggcaatggaggggatcttcatgaagccttcagaactcctaaaagcagaggcgcatcatgcagagctttag

SEQ ID NO: 169134 - DNA, 636 bp, Artificial Sequence
  derived and/or modified sequence
atggctgtggtgcccctgctgctgctgggcggcctgtggagcgctgtgggcgccagcagcctgggcgtggtgacctgtggctctgtggtgaagctgctgaacaccaggcacaacgtgcggctgcacagccatgatgtgcgctatggcagcggcagcggccagcagagcgtgactggagtgacctctgtggatgacagcaacagctactggaggatccggggcaagagcgccaccgtgtgtgagcggggcacccccatcaagtgtggccagcccatccggctgacccacgtgaacacaggaagaaacctgcacagccaccacttcaccagccccctgagcggcaaccaggaggtgtctgcctttggagaggagggggagggggactacctggatgactggacagtgctgtgcaatggcccctactgggtgagagatggagaggtgcgcttcaagcacagcagcacagaggtgctgctgtctgtgactggagagcagtatggccggcccatcagcggccagaaggaggtgcacggcatggcccagcccagccagaacaactactggaaggccatggagggcatcttcatgaagcccagcgagctgctgaaggccgaggcccaccacgccgagctgtag

SEQ ID NO: 169135 - DNA, 636 bp, Artificial Sequence
  derived and/or modified sequence
atggccgtggtgcccctgctgctgctgggcggcctgtggagcgccgtgggtgcttctagtttgggcgtcgtgacttgtgggtccgtagtgaaacttttgaacactcgtcataacgtgcggctgcactcccatgacgtcagatatggaagcgggtcaggacagcagtccgtgaccggcgttacgtcagttgatgacagcaattcttattggaggatcaggggcaagagcgctaccgtgtgcgagcgtggaactccaattaagtgcggtcagcccattaggctgacccatgtaaatacaggccgcaacctgcactctcatcactttaccagtccgcttagcgggaaccaggaggtgtctgcgttcggggaagaaggggaaggagattatctggacgactggacagtattatgcaacggaccatattgggttcgagatggcgaggtgagattcaaacattcctctactgaggtccttctgtcagtaaccggggaacaatacgggcgaccaatcagcgggcagaaagaagttcacgggatggcccaaccttcacagaacaattattggaaggcaatggagggaatatttatgaagccgtcagaattactaaaagccgaagcccaccacgctgaactgtag

SEQ ID NO: 169136 - DNA, 636 bp, Artificial Sequence
  derived and/or modified sequence
atggccgtggtccccctgctgctgcttggaggtttgtggtccgcagtgggagcttctagtctcggcgtagtgacctgtggaagtgtggtgaaactactgaatacccgacacaacgtccggctccacagccatgacgtacggtatggctcaggcagcgggcaacagtcagtgacaggcgttacctcagttgacgattcgaacagctattggagaatacgcggaaagagcgccacggtctgtgagaggggcacacccattaaatgtgggcagccaatccgccttactcacgttaacacagggcgtaatcttcacagtcatcacttcacttctcccctttcagggaatcaggaagtgtccgcgtttggcgaagagggcgaaggggactacctcgacgactggacagttctgtgtaatggaccttactgggttcgcgacggtgaggtgagatttaagcattcctctacggaggttctccttagtgtgacaggtgagcagtatggccgtcccatctcaggccagaaggaagtgcacggcatggcccagccttcccagaataattactggaaagctatggagggaatcttcatgaagccatccgaactgcttaaggccgaggcacaccacgcggagctatag

SEQ ID NO: 169137 - DNA, 1497 bp, Artificial Sequence
  derived and/or modified sequence
aaccgaagcggctcaggaaggcagctgtcactgagcccctggaacagagcgagagtatcgtaagtaaccaggctcagccggtttctcaggccgctctagtcaaataaaccataaagatcagactcgggcttcttcacttccttctctccgtggtttcgccattagcttccggttccggggaggggccgagttttcttcgaagatttggggctccgcgatacagttaggatggctgtagtacctctgctgttgttggggggtttgtggagcgctgtgggagcgtccagcctgggtgtcgttacttgcggctccgtggtgaagctactcaatacgcgccacaacgtccgactgcactcacacgacgtgcgctatgggtcaggtagtgggcagcagtcagtgacaggtgtaacctctgtggatgacagcaacagttactggaggatacgggggaagagtgccacagtgtgtgagaggggaacccccatcaagtgtggccagcccatccggctgacacatgtcaacactggccgaaacctccatagtcaccacttcacttcacctctttctggaaaccaggaagtgagtgcttttggtgaggaaggtgaaggtgattatctggatgactggacagtgctctgtaatggaccctactgggtgagagatggtgaggtgcggttcaaacactcttccactgaggtactgctgtctgtcacaggagaacaatatggtcgacctatcagtgggcaaaaagaggtgcatggcatggcccagccaagtcagaacaactactggaaagccatggaaggcatcttcatgaagcccagtgagttgttgaaggcagaagcccaccatgcagagctgtgaatctagaggctctgagccactgttaacgcacaatgttcacagacatctgttgctgcctcaccttgggatccctgccacaagttccttgggcagtggccatgtcaccattgagatgaagatatacaacagaaaatagtggctgtgtttggaagcttcagccctgcacatttgaactagtcactctcccagacttgcgtgggtcagttctttctgagtagaggacttgctggtaaaggggcagatgctttttattagtactgataaaacaaactgagggaaacatccctcttagctgggaaacttttactcttcaggagcttggcatcatggactgttaatgtatgtgattttccccctattttctctctccaaaatgataaaaacaataattttattatgagtcactgtgttgttatttattaggtgtgctatttcattagctgcttaatcctttgagtcctaagactctttggagacgctatgaagctccaatgtgggcccttttaagagcttttcttgcatacaaaccttttctccctctactttgacttctctccaggcatctcatctttaatagatctttgactaattatagctaaaaactctcagagaatacagcataataaatagcca

SEQ ID NO: 169138 - protein, 248 aa, Artificial Sequence
  derived and/or modified sequence
MSGGGVIRGPAGNNDCRIYVGNLPPDIRTKDIEDVFYKYGAIRDIDLKNRRGGPPFAFVEFEDPRDAEDAVYGRDGYDYDGYRLRVEFPRSGRGTGRGGGGGGGGGAPRGRYGPPSRRSENRVVVSGLPPSGSWQDLKDHMREAGDVCYADVYRDGTGVVEFVRKEDMTYAVRKLDNTKFRSHEGETAYIRVKVDGPRSPSYGRSRSRSRSRSRSRSRSNSRSRSYSPRRSRGSPRYSPRHSRSRSRT

SEQ ID NO: 169139 - DNA, 747 bp, Artificial Sequence
  derived and/or modified sequence
atgagcggaggaggcgtcattaggggacccgccggcaacaacgactgccgcatttacgtgggaaacctcccacccgacatcagaactaaggacattgaagatgttttctacaaatacggcgccatacgggacatagacttgaaaaacagaaggggggggccgcctttcgcgttcgtcgagtttgaggacccacgcgacgccgaagacgccgtttacggcagagacgggtatgattatgatggataccgtctccgggtcgagttccctaggtccgggcgaggcaccggtagaggcggtgggggggggggaggaggaggcgccccccggggcaggtacgggcccccaagccggagatccgagaatagggtggtcgtctcaggactccctccttccggcagctggcaagaccttaaagaccatatgcgagaggcgggcgacgtttgttacgctgacgtgtatcgtgacggcaccggggtcgtggaatttgttcgtaaagaggatatgacctacgcggttagaaaattagataatacaaagtttaggagccatgaaggggaaacagcctacatccgggttaaggtggatggacctcgctccccttcctacgggcgtagcagaagccggtctagatcaagatcacgttcccgctcacggtctaactccagaagccgtagttatagccctaggaggtctcggggctcccccaggtactcacctagacactcccgatcacgatccagaacctag

SEQ ID NO: 169140 - DNA, 747 bp, Artificial Sequence
  derived and/or modified sequence
atgtctgggggcggcgtcatccggggccctgctggcaacaatgactgccgcatctacgtgggcaacctgcccccagacatccgcaccaaggacattgaagatgtgttctacaagtatggagccatccgggacatcgacctgaagaacagaagaggaggccccccatttgcctttgtggagtttgaggaccccagagatgctgaagatgctgtgtatggaagagatggctatgactatgatggctaccgcctgcgggtggagttccccaggagcggccggggcaccggccggggcggcggcggcggcggcggcggcggggccccccggggccgctatggcccccccagcagaagaagtgagaacagagtggtggtgtctggcctgcccccatctggctcctggcaggacctgaaggaccacatgagggaggccggagatgtgtgctacgcagatgtgtacagagatggcactggagtggtggagtttgtgaggaaggaggacatgacctatgctgtgaggaagctggacaacaccaagttccgcagccatgaaggagaaacagcctacatccgggtgaaggtggatggccccaggagccccagctatggccgcagccgcagccgcagccgcagccgcagccgcagccgcagccgcagcaacagccgcagccgcagctacagccccaggaggagccggggcagcccccgctacagccccaggcacagccgcagccgcagcaggacatag

SEQ ID NO: 169141 - DNA, 747 bp, Artificial Sequence
  derived and/or modified sequence
atgagcggcggcggcgtgatccggggccccgccggcaacaacgactgtaggatttacgtgggaaatcttccaccggacatccgcactaaggacatagaagatgtattctataaatacggggccattagagacatagacttgaagaacaggcgcggcggtcctcctttcgcctttgtggaattcgaagacccccgcgacgctgaagacgctgtgtacgggcgagatggatacgattacgacggatacagactgcgcgtggagttccctcgctccgggcgcggtaccggcagaggtggcgggggtggcggagggggaggggcgcctcgcggcagatatggacccccctcacgacggagtgagaatcgggtcgttgtcagcgggctaccaccttccggcagttggcaggacctaaaggaccacatgagagaggcgggggacgtctgttacgccgacgtgtatagagacggtaccggcgtggtcgagttcgtgaggaaggaggatatgacctacgctgtcaggaagctcgacaacacaaaattccgctcacacgaaggcgaaaccgcttacataagggtcaaggtcgacggtcctagatcaccttcttacggtagatccagaagcaggagtaggtcacggtccaggtcaagaagtagatccaattctagatcgagatcctactcaccaagacgatctcgaggctctccgaggtattctccaaggcacagcagatcaagaagccgcacatag

SEQ ID NO: 169142 - DNA, 747 bp, Artificial Sequence
  derived and/or modified sequence
atgtctggtggtggagtcatccgcggtcctgcaggcaacaacgattgccgtatttatgtcggcaatttgccaccggacatccgcaccaaggatattgaggacgtgttttataaatatggggcaattagagacatcgacctgaagaaccgcagaggcggaccgccattcgcattcgtggagtttgaggatcccagggacgctgaggacgctgtttacggtagagacgggtacgattatgacggctacaggttgcgggtcgagtttcccagatccggaagggggacaggtcgcggaggaggcggagggggaggcggaggggcaccaaggggaaggtatggcccacctagcagacgctccgagaacagagtggtggtaagtgggttaccaccttcgggcagctggcaggacctcaaggatcatatgagggaggcgggagacgtttgttatgctgacgtatatcgagacggtacaggcgtagtggaattcgtgaggaaggaagatatgacatacgccgttagaaagctggacaataccaagttcaggtcgcacgagggcgaaacggcttatatccgggtgaaggtcgatggacccaggagtccgagctacgggagatccagatctcgctctcgctctcggtctagaagccggagtaggtctaactcccgaagccgatcctacagccctcgcagatctcgtggaagccctagatactcacctaggcattccaggagcaggagcaggacctag

SEQ ID NO: 169143 - DNA, 5439 bp, Artificial Sequence
  derived and/or modified sequence
gttgcgctcccgcgcgtgcgtgttgggatcgaatcgctgtttccttccgcttctcttcctctgtctcccccccatatccgtgcgccgagctgataaaggcgccattttggaggggccgcgggagacgtggtgccgctgcgggctcgctctgccgtgcgctaggcttggtgggaaggcctgttctcgagtccgcgcttttcgtcaccgccatgtcgggaggtggtgtgattcgtggccccgcagggaacaacgattgccgcatctacgtgggtaacttacctccagacatccgaaccaaggacattgaggacgtgttctacaaatacggcgctatccgcgacatcgacctcaagaatcgccgcgggggaccgcccttcgccttcgttgagttcgaggacccgcgagacgcggaagacgcggtgtatggtcgcgacggctatgattacgatgggtaccgtctgcgggtggagtttcctcgaagcggccgtggaacaggccgaggcggcggcgggggtggaggtggcggagctccccgaggtcgctatggccccccatccaggcggtctgaaaacagagtggttgtctctggactgcctccaagtggaagttggcaggatttaaaggatcacatgcgtgaagcaggtgatgtatgttatgctgatgtttaccgagatggcactggtgtcgtggagtttgtacggaaagaagatatgacctatgcagttcgaaaactggataacactaagtttagatctcatgagggagaaactgcctacatccgggttaaagttgatgggcccagaagtccaagttatggaagatctcgatctcgaagccgtagtcgtagcagaagccgtagcagaagcaacagcaggagtcgcagttactccccaaggagaagcagaggatcaccacgctattctccccgtcatagcagatctcgctctcgtacataagatgattggtgacactttttgtagaacccatgttgtatacagttttcctttattcagtacaatcttttcattttttaattcaaactgttttgttcagaatgggctaaagtgttgaattgcattcttgtaatatccccttgctcctaacatctacattcccttcgtgtctttgataaattgtattttaagtgatgtcatagacaggattgtttaaatttagttaactccatactcttcagactgtgatattgtgtaaatgtctatctgccctggtttgtgtgaactgggatgttgggggtgtttgtggttatcttacctggggaagttcttatgtttatcttgcttttcatgtgtctttctgtagacatatctgaagagatggattaagaatgctttggattaaggattgtggagcacatttcaatcattttaggattgtcaaaaggaggattgaggaggatcagatcaataatggaggcaatggtatgactccaagtgctattgtcacagatgaaattggcagtattgaccttatactaaaaggcaggggttaaaaatgattatatacattttccttaaaacacttgcaaacattttattcagttgtctttagctacaattgctttgctttttaaaccttggcaattgtggcaaaattatattgcccattttgtagcaacttattttgctcccttccccccatttttgttttaatagggactaatgtgggaagaactggctaatttgtcacagtgcttagttacaactgttaatgtgtgacctgctgttggtgtacatgtgggtacagggtgtttttaaatccaacaagatagagtataatatcaatactgctaaatctgcatgtcctctgtgtgactgatagagcgttgctatttcatttttttaagacaaaatgaaagcaaaatatagagttccaatgtattggtgtagataatctagttgggaatacttttaagtctcaccttcccctttaaactaatattcataattggttcatatgtttaaaagactttaatttacaaattaaattgcaaatgggagcattagatttagttttagacttaggtgggtagcaatgccagtaaacttaaattacgtaacttcttgcaaccacgaaacctgtaatacgctgtacagtaacaagtgttggcattatcagttgaactgtaaatacaaaatgcttcttccaattagtctctatgatgattaagtttctaaaatttatctgaacaccattcagaaacttgttttggggaatttgatagttattgatgtgcatctgttaaactgatgacagacataactcatcattccccagaaaccttttttgattacagtatctaacattttgcctcctcttttttggttttgctggttataaaggtttggattggagagggctcactggatcccaatccttggagctggatcattggattcaaatcataatgtggataggatagggaggatgaattaccaggattcatggagcgggatcagattaccaggaacataggagtggattcctgccccaaccaaaccgcattcgtgtggatttttttattcaacttaattggctattccaaagattttttttttcctatttttgacgattggagcccttaagatgcacgatggaattgtgttttgcgttttttggtaaaaggagcaaagcgaggacctggagataaacgctggagcaatctccttggaaggattcagcacgagtagatggtaaacatttaaaggggaaagggggggtttgtttaaaatagtaaatcagtaagtcacttctaaatttaaagaaaacaaaattggagttgaagaataagtaggtttccaattggctattgccgttttctttgaaaaaataaacattttttaaaaaactatgcatggttgtcctttttcctcttcatgtaagattctaactgggtctatcagttaatctttaaattgttaagtaagataagattttgactcttgtgttaatgtgttagcaaattaaaagttcttaaaaggcaatctaatggtattagccatcttttattgttaattgtaaaagtcttcaggggaaagcaaaaggggagaataaggcatttgtgtatgtaacttggtaaatgacggtgggggatggatctagcatctgaaagataagcttctctactttgttataaagtggttaaaaaactatagatgctgcttattttctggtggtcatagacaacataggcttttgtgcaaaattggttgatggctactaatgttcacttggagatagcttttgatattctcaatgaaactcatctcaaaaaaaggtaagtattaaatgttaacatcagcacagatgtattagaactgttttttgtttttgagacagagtctcgctctgttctccagactggagggcagtggtgtgatctaggctcactgcaacctccacccctggatttgagtgattctcgtgcctcagtctcccaagtagctgagactacaagtgtgtgccacccttgcccggctaattttgtatttttagtagagatgtggtttctctgtgttacccaggctggtcccaaaactcctggcctcaagtgatctgcctgccttggcctcccaaagtgttaggattacaggtgtgagccaccatgctcagcctgtagaacttttaacccaagtctcatttcttttttgaaagggaagagtgcacaagattaactgcttctttggatgaatcattgttaataaaaagctgggcatttagaattttgccttataagcccttctccaaccataagattattttgtaccaaaaactttggtgttctctaccaaagcagttaaaaacttttagcctgctacttcttgtatttgtctactgacagccccttggtactatttaggttgggggaggggacctaaaataaatagactttaacatttcccttgggtgctaatcatagttggaagttgaatttaaggtgattatttgggtgacaattaaaaacctaaggaaaaccagaaatcttggtagtggaagaaatgtgtaaggtcaccccaatcggtagattttaatgaacgttgtggaatgttgggaagaggggatgttaagttgaatgcagaatttcactaagtacttagtgtaagtttaaggatgtagctctttttatctaagaattcaatgtaatggccaaaaggcagatttactgtttaaaaatttgaataattttacatgacattcttgaaattctaagaagttttatgtgtagaacattttaaaaattcatcagattattaaagggaaaataaatgattaatgataattttggaaggttaatgtgagctagacttaagtaaactttggttcatttgtgttcattgaatgttttggaaatgaccaaaaaatgtaaatggccttcactcaagtttgagtgtttaaagttgaaagatgtgctctactaaaagttatagtaattctaacctcacattgaaatgagacagtattccttgttatacaggctgaatttgaagattagagaggatctaatgtttacttaggtaaaggggcataggttttgtagttaagatgaccagacagctaaaagctgtgatgggaagtatggactgctcctatttatagtctcagaaaatggacctttaggtctctatccgtattggcaattattagaagaaagttacacccttttgaaactacaaaagctgtcttggaatttccccctcttctccctatttatgtccccttagaatattttagggagcctataattattttctaaccaaggaaaaacttaagtctctttaagaagcaattacttttcataacatcagattgaataacccaccttgctgttcagcccacatcctactggaaacaaaaggtaagaaacccattttctggttcttgattgtttgggtctgaattttgtttttaaaactaagctaagtttaatgttttttaaaatgctgtttggaatatgaatagattccccgtaaaatgatttttcctaagttttatgctttagtaaatattcagtgctcacgtctgtgcatcatagtgcttgcgtttaatatgatttattgtagaatctcaacttttcttggtgtttgttgtctttgaaacattgtcttggtcattagggctggtgttttcacatttctgtggtcaaggtggatttcttatgtgtgcctttttgcttactttgtatatgaattttgtaatttaaattgcaagtaagttatatatatgtatttaccataaatagtattaaaagatgagaaactgttagactgaagttctgttgtaacataaccattatttccatcacagtatgaagactgcaaacgcagaaaacagattacagtctcttatccattttttgaaatccaaaaactacgaaaacaaaagattttctgttgttgagctaattaaatgtgaaccctgacc

SEQ ID NO: 169144 - DNA, 747 bp, Artificial Sequence
  derived and/or modified sequence
atgagcggcggcggcgtgatcagaggccccgccggcaacaacgactgcagaatctacgtgggcaacctgccccccgacatcagaaccaaggacatcgaggacgtgttctacaagtacggcgccatcagagacatcgacctgaagaacagaagaggcggcccccccttcgccttcgtggagttcgaggaccccagagacgccgaggacgccgtgtacggcagagacggctacgactacgacggctacagactgagagtggagttccccagaagcggcagaggcaccggcagaggcggcggcggcggcggcggcggcggcgcccccagaggcagatacggcccccccagcagaagaagcgagaacagagtggtggtgagcggcctgccccccagcggcagctggcaggacctgaaggaccacatgagagaggccggcgacgtgtgctacgccgacgtgtacagagacggcaccggcgtggtggagttcgtgagaaaggaggacatgacctacgccgtgagaaagctggacaacaccaagttcagaagccacgagggcgagaccgcctacatcagagtgaaggtggacggccccagaagccccagctacggcagaagcagaagcagaagcagaagcagaagcagaagcagaagcagaagcaacagcagaagcagaagctacagccccagaagaagcagaggcagccccagatacagccccagacacagcagaagcagaagcagaacctag

SEQ ID NO: 169145 - protein, 350 aa, Artificial Sequence
  derived and/or modified sequence
MKCSLRVWFLSVAFLLVFIMSLLFTYSHHSMATLPYLDSGALDGTHRVKLVPGYAGLQRLSKERLSGKSCACRRCMGDAGASDWFDSHFDGNISPVWTRENMDLPPDVQRWWMMLQPQFKSHNTNEVLEKLFQIVPGENPYRFRDPHQCRRCAVVGNSGNLRGSGYGQDVDGHNFIMRMNQAPTVGFEQDVGSRTTHHFMYPESAKNLPANVSFVLVPFKVLDLLWIASALSTGQIRFTYAPVKSFLRVDKEKVQIYNPAFFKYIHDRWTEHHGRYPSTGMLVLFFALHVCDEVNVYGFGADSRGNWHHYWENNRYAGEFRKTGVHDADFEAHIIDMLAKASKIEVYRGN

SEQ ID NO: 169146 - DNA, 1053 bp, Artificial Sequence
  derived and/or modified sequence
atgaagtgctcccttagagtgtggttcctgagcgtggcctttctgctcgtgtttatcatgtccctcctgttcacgtactcccaccattccatggccacattaccctacttggacagtggagctttggatggtactcatagagtgaaactggtcccaggttacgccggtctgcagagactttcaaaggagcgcctgtccggaaagagctgtgcttgccggcgatgcatgggggatgcaggggctagtgactggttcgattcccatttcgatggcaacatcagcccagtgtggacacgcgagaatatggacctgccacccgatgttcagcgctggtggatgatgctgcagccacagttcaaatctcacaacactaacgaggttttggagaaacttttccaaatcgtgccaggggaaaacccctatcggtttcgggatccccatcagtgccgcaggtgcgcggtggtggggaactctggcaatctgcgtggctctggttacggccaggatgttgacggccacaactttataatgcgaatgaaccaggcccctaccgtggggttcgagcaagatgtaggctctcgcactacacaccacttcatgtaccccgagtccgcaaagaacttacccgcaaatgtctccttcgtcctcgtaccctttaaagtcctcgacctactgtggatcgcctccgccctgtccactggtcagatccggtttacatacgcacccgtgaagtccttcctgagagtcgataaggagaaagtccagatttataatccagcattcttcaaatacattcacgatcggtggacagaacatcacgggagatatcctagtacaggaatgctcgtccttttctttgctctgcacgtgtgcgacgaggtgaatgtctatggcttcggggctgattcaagaggaaattggcaccactactgggaaaacaaccggtacgccggagaatttagaaagaccggcgttcacgacgcagatttcgaggcccacattatcgacatgcttgctaaagcaagcaaaatcgaggtgtatagaggcaattag

SEQ ID NO: 169147 - DNA, 1053 bp, Artificial Sequence
  derived and/or modified sequence
atgaagtgctccctgcgagtgtggttcctctcagtggcattcctgttggtgtttatcatgtcactgcttttcacatactctcatcacagtatggcaacactcccttatttagactcaggcgcactggacggcacccatagagtcaaattggtgcctggctacgccggacttcagagacttagcaaagaacggttatccggaaagtcctgtgcctgtagacgttgcatgggagacgctggagcttcagactggttcgattctcattttgatggcaacatcagccccgtgtggactcgtgagaacatggatctgccaccggatgtgcagaggtggtggatgatgttgcagccacagtttaagtcccacaatacaaacgaggttctcgagaagctcttccagatcgtgcccggtgagaacccatatagattccgggacccccaccagtgccggcgatgtgccgtggttggcaattccggaaatctgcgcggttcgggatacggccaggatgttgacgggcacaacttcatcatgcgtatgaatcaggccccaacagttggttttgaacaggacgtgggatctaggacaacccaccactttatgtaccccgagtccgctaaaaacctcccggcaaatgtcagctttgttctcgtaccttttaaggtgctggacctcctatggatcgccagcgccttaagcaccgggcagattcgcttcacatacgcccctgtcaagagtttccttcgggtggataaagagaaggttcagatttataaccccgctttttttaagtacatccacgataggtggaccgaacatcacggacggtacccatccaccggcatgctggtcctgttctttgccctgcacgtgtgcgatgaagtaaatgtctatggcttcggcgcagactcacggggaaactggcaccattactgggagaacaataggtacgcaggagaatttcgaaagacaggcgtgcatgatgcagactttgaggcccatatcatagacatgttggcaaaggcctccaagattgaagtgtatcgtggcaattag

SEQ ID NO: 169148 - DNA, 1053 bp, Artificial Sequence
  derived and/or modified sequence
atgaaatgttctttgagagtatggtttctgagtgtggcttttctcctggtgtttatcatgagccttctctttacttacagccaccacagcatggccaccctcccttacctggacagcggtgccctcgatgggacacatagggtgaaactcgttcctggctatgcaggcctccaacggctgagtaaagagagattaagcggaaaaagttgtgcctgcagaagatgcatgggcgatgcaggagccagcgattggttcgacagtcatttcgatggcaacattagtcccgtctggacccgagaaaacatggatctacccccagatgttcagcgatggtggatgatgctccagccacaatttaagtcccacaacacgaacgaggttttagagaagctgtttcagatagtgcccggcgagaacccctatcgctttagagatccacaccagtgtcgacgatgtgcagtggtcggaaactccggaaaccttagggggtctggatatggacaggacgtcgacggccataatttcatcatgaggatgaatcaagctcctaccgtgggctttgagcaggacgtcgggagcagaacaactcaccacttcatgtaccctgagtccgccaaaaacctgcctgccaacgtatcttttgtgctggtgccatttaaagtactggaccttctgtggatcgcatcagccctctccactggacagatacggttcacctatgcaccagtcaagtccttcttgagagttgataaggagaaagttcagatatataatccggcctttttcaaatacattcatgatcgatggactgaacaccatggacgatacccttctacaggtatgttagttctcttcttcgctctacacgtttgcgatgaagtaaatgtctacggattcggggctgactcccgaggcaactggcaccactattgggagaacaacagatatgccggtgaatttcgtaagacaggcgtacacgacgcagactttgaggctcacataattgacatgctggcaaaggcaagtaagattgaggtatatcgcgggaactag

SEQ ID NO: 169149 - DNA, 1053 bp, Artificial Sequence
  derived and/or modified sequence
atgaagtgcagtctgcgcgtttggtttttaagcgtggcattcctactggtgtttataatgagcctcctcttcacctactcccatcattcaatggccaccctgccttatttagacagcggggcgctggacggcacacacagagttaagctggtgcctggctacgctggactgcagcgactgtctaaagaacggctgagtggtaagtcatgtgcatgtcgacggtgtatgggcgatgctggcgcatcagattggttcgactcacatttcgacggaaatataagccccgtgtggaccagagaaaacatggatcttcctccagatgttcagcggtggtggatgatgctgcaaccccagtttaaatctcataatactaacgaggtcttagaaaaactgtttcaaatcgtgcccggagagaatccctataggtttcgagacccccaccaatgtaggaggtgcgctgtggttggaaatagcgggaacttgcgaggaagcggatacggccaagacgtagacggacacaatttcatcatgcggatgaatcaggcgcccacagtcggattcgaacaggacgtcggctcaagaactacgcaccattttatgtacccggagtccgccaaaaatttgcctgccaacgtgtcattcgttctggtgccgtttaaggtcctagacctgctttggatcgctagtgcccttagtacgggacagatcaggtttacctatgcccctgttaaatctttcttaagggtggacaaagagaaagtgcagatttataaccccgcattctttaaatacatccacgatagatggacggagcaccacgggaggtatccatctacaggcatgttggttctttttttcgctctgcatgtctgcgacgaggtaaatgtgtacgggttcggcgcagacagccgaggcaattggcaccactactgggagaacaataggtacgccggcgaattccgtaagaccggggtgcatgatgccgattttgaagcacacatcattgatatgctggcaaaggcttcaaagattgaggtgtaccggggcaactag

SEQ ID NO: 169150 - DNA, 1053 bp, Artificial Sequence
  derived and/or modified sequence
atgaaatgctcgctgagggtgtggttcctttcagtcgccttcctactcgtatttataatgagtctgctcttcacctactcccaccatagcatggcaacgctaccctatctagactcaggagccctcgacggtacacacagggttaaactagtgcctgggtacgcaggattacagcggcttagcaaggaacggctttcagggaagagttgtgcatgcagacgatgtatgggtgacgcaggcgccagcgactggttcgattcccacttcgatggcaatatcagtcccgtatggaccagagaaaacatggacctgccccctgatgtgcagcgctggtggatgatgttgcaaccacaatttaagagtcataatacgaatgaagtgctggaaaagttgttccagattgtacctggagaaaacccctaccgctttagagaccctcaccagtgtaggcggtgcgctgttgttggtaattcaggtaaccttagaggctctgggtacggacaggatgtggacggtcacaattttattatgcgaatgaatcaagctcccacagttgggtttgagcaagacgtgggttccaggaccacccatcacttcatgtatcccgaatccgctaaaaaccttcctgcaaatgtttcctttgtattggtgccttttaaagtacttgacctcctgtggatcgcgtccgctctctcaactggccagataaggtttacatacgcaccagtgaagtcttttctgagagtcgataaggagaaggtccagatttataaccctgcattcttcaagtatattcacgatcgctggacagaacaccacggaagatatccctcaacaggcatgctggttttgttctttgccctacatgtatgtgacgaggtcaacgtttatgggtttggagctgatagcagagggaattggcaccactactgggagaataaccgatatgcgggtgaatttaggaagaccggggtccacgacgcggatttcgaagcccatatcatcgacatgctagccaaggcatccaagatcgaagtttataggggtaactag

SEQ ID NO: 169151 - DNA, 1053 bp, Artificial Sequence
  derived and/or modified sequence
atgaaatgctctttacgcgtgtggtttcttagcgtggcgttcttgctcgtgttcattatgtcgttactctttacctacagtcaccattctatggcgaccctgccttacctggactcaggtgccttggacggcacacacagagtgaaactggttcctggttacgccggcctgcagaggctcagcaaagagaggttatctggcaagtcttgcgcatgccgacggtgcatgggcgacgcaggagcctccgattggttcgattcccattttgacggcaacatatccccagtatggactcgcgaaaacatggatcttcctccagatgttcagcggtggtggatgatgctgcaaccccagtttaaatctcataatactaacgaggtcttagaaaaactgtttcaaatcgtgcccggagagaatccctataggtttcgagacccccaccaatgtaggaggtgcgctgtggttggaaatagcgggaacttgcgaggaagcggatacggccaagacgtagacggacacaatttcatcatgcggatgaatcaggcgcccacagtcggattcgaacaggacgtcggctcaagaactacgcaccattttatgtaccctgaaagcgctaaaaacttgcccgcaaatgtctcttttgtactggtgccttttaaagtgctggatctcctgtggatcgctagcgcactgagtactgggcaaatcagatttacttacgcccccgtaaagtctttcctgagggtggataaggagaaagttcagatatataacccagccttctttaaatacatacatgatcgatggaccgagcaccatggtaggtatcctagcaccggaatgctagtgttgttcttcgccctccacgtatgtgatgaggtaaatgtctacggttttggagctgacagtcgcgggaactggcatcactactgggaaaataatcgctatgccggagagtttcggaaaacgggggttcacgatgccgactttgaggcgcacattatcgacatgcttgccaaggcatcaaagattgaagtttatagaggaaattag

SEQ ID NO: 169152 - DNA, 1053 bp, Artificial Sequence
  derived and/or modified sequence
atgaagtgcagcctgagagtgtggttcctgagcgtggccttcctgctggtgttcatcatgagcctgctgttcacctacagccaccacagcatggccaccctgccctacctggacagcggcgccctggacggcacccacagagtgaagctggtgcccggctacgccggcctgcagagactgagcaaggagagactgagcggcaagagctgcgcctgcagaagatgcatgggcgacgccggcgccagcgactggttcgacagccacttcgacggcaacatcagccccgtgtggaccagagagaacatggacctgccccccgacgtgcagagatggtggatgatgctgcagccccagttcaagagccacaacaccaacgaggtgctggagaagctgttccagatcgtgcccggcgagaacccctacagattcagagacccccaccagtgcagaagatgcgccgtggtgggcaacagcggcaacctgagaggcagcggctacggccaggacgtggacggccacaacttcatcatgagaatgaaccaggcccccaccgtgggcttcgagcaggacgtgggcagcagaaccacccaccacttcatgtaccccgagagcgccaagaacctgcccgccaacgtgagcttcgtgctggtgcccttcaaggtgctggacctgctgtggatcgccagcgccctgagcaccggccagatcagattcacctacgcccccgtgaagagcttcctgagagtggacaaggagaaggtgcagatctacaaccccgccttcttcaagtacatccacgacagatggaccgagcaccacggcagataccccagcaccggcatgctggtgctgttcttcgccctgcacgtgtgcgacgaggtgaacgtgtacggcttcggcgccgacagcagaggcaactggcaccactactgggagaacaacagatacgccggcgagttcagaaagaccggcgtgcacgacgccgacttcgaggcccacatcatcgacatgctggccaaggccagcaagatcgaggtgtacagaggcaactag

SEQ ID NO: 169153 - DNA, 1053 bp, Artificial Sequence
  derived and/or modified sequence
atgaaatgcagtctgcgggtgtggtttttgagcgtcgcctttctgctggtatttataatgtctctcctgtttacctactctcaccattctatggcgactctgccttatctcgactctggcgccctggatgggacgcatcgcgtcaagttagtccccggctatgctggacttcagagactttccaaagagaggctctctgggaaaagctgcgcatgtagacgctgtatgggcgatgctggagcgtcagactggtttgacagtcattttgatggtaatatctctccagtgtggacaagggagaatatggacctgcctcccgatgttcaacgttggtggatgatgttacagccccagtttaagagccacaacacaaacgaagtgctcgaaaaacttttccagatagttcccggggagaacccatatcgctttcgcgaccctcaccaatgtcgaagatgcgccgtggttggtaattcaggcaatctccggggctcgggctacggtcaggacgtagacggccacaacttcattatgaggatgaatcaagctcccacagtgggctttgaacaggacgtaggtagtcggactacacatcattttatgtaccccgagtcagctaagaatcttcctgccaatgtgagcttcgtgcttgtaccatttaaagtcctggatcttctgtggattgccagcgcactatctacgggtcagatccgtttcacttacgcaccggtgaaaagcttcctgcgggtcgataaggagaaggtacagatttacaatcctgcattttttaagtacatccacgacaggtggactgagcaccacgggagatatcctagtacaggaatgctcgtgctctttttcgccctccacgtctgcgatgaggtcaacgtctacggtttcggcgccgacagccggggcaattggcaccactactgggagaacaatcgctacgccggagaatttcggaaaacaggcgtgcacgacgccgatttcgaagcccacattatcgacatgcttgcaaaggcaagcaagatagaggtctaccgtgggaattag

SEQ ID NO: 169154 - DNA, 4450 bp, Artificial Sequence
  derived and/or modified sequence
cgggcggacgagagagctgcgagctaacgggtccggacgacggcggcggcggcggcggcggcggcgacggctttctgcgcgggcggcggcggcggccggagcggcgagcatggcccgcgcggcgccgggcgctgactgagggtcgtgctgcggcagcctggcgcccgacatgtgaaggggaacctgccaggggattactgtgagctcacagcaggataggctggccccgggggagtggggatgggcagaacctgggccaggagtattaggaaggagacctggaccctggtagggagctcagcacaagctcgcctgacccagatggtattggacacagtgccccgctgaacagcagctgttcccagcgccagaggaccccacagccacagtaggagctttgcgacccctacgcaactgcagctggggctggggccaccaggagaagggaccagcacctcagatgggaagcagaagggcaagacctactgcggaaaggatctcgatctctgcagcggagttttcccacactcacagagcttcctgtttttgtcctctcagggttggggtctggctcccctcctctggcagaggttttgggccaggaggtgggacaacacttgcatggaacccaagtcccctgaagcccctgtgctctctgttgtgattggagttctagggcttccccgctgccgggaacgaggggccgcctcattgtctgctcatgaaccacaaggaccccgactgctccagactggattatttcaagccgccaaagagggggacccctagagctggcagccagcaatcccaagggactagagggctgcaatggactgacctccccctcaccagggtggcaggagaggcagagcctctgtggcctagctagtgacggagagacccgatgaagccctaagcaggggccccgcctgactcagggacaggacagccactcctgccaacgtgtgttctccctacatgagggagggcgtggcaagggacccctgccactgtcccctgctgcagcacgtgcccctatgccctttgcatgtggtgccagaataggcaggctacgccgtggctggcccctcagcgggctgggaaaagagtggccacggtgaccgtcacccgcctgccggcaccatgaagtgctccctgcgggtgtggttcctctccgtggccttcctgctggtgttcatcatgtccctgctcttcacctactcgcaccacagcatggccacgctcccctacctggactcaggggccctggatgggacgcaccgggtgaagctggtgcccggctatgccggcctgcagcgcctcagcaaggagaggctctcgggcaagagctgtgcctgtcgccgctgcatgggcgatgccggtgcctccgactggtttgacagccactttgacggtaacatttcccccgtctggacccgagagaacatggatcttccaccggacgtccagaggtggtggatgatgctgcagccccagttcaagtcacacaacaccaatgaggtgctggagaagctgttccagatagtgcctggcgagaacccctaccgcttccgggacccccaccagtgccggcgctgtgccgtggtggggaactcgggcaacctgcggggctctggctatgggcaggacgtggacgggcacaacttcatcatgaggatgaatcaggcgccaaccgtgggctttgagcaggatgttggcagccgaaccacccaccatttcatgtaccctgagagtgccaagaacctgcccgccaacgtcagcttcgtgctggtgcccttcaaggtcctggaccttctgtggatcgccagcgccttgtccacggggcagatccgattcacctacgccccagtgaagtccttccttcgagtggataaagaaaaggtccagatctacaacccagccttcttcaagtatatccacgacaggtggacagagcatcacgggcggtacccttccacggggatgctggtgcttttctttgccctgcatgtgtgtgatgaggtgaacgtgtacgggttcggggccgacagccggggcaactggcaccactactgggagaacaaccggtacgcgggcgagttccggaagactggcgtgcacgacgcggacttcgaggcccacatcatcgacatgctggccaaggccagcaagatcgaagtctaccggggcaactgagccgggcctcgccgcgacccttccggcccatctatcgggcaccggggctccggcccgggacccaggaccagcaacccgcgaccaatcatgctgcagcccaggggcgtctgctgtgccccgccaatcacgagactgggggaccggccgggcctggcaccaatctgcgctgcggtcgggcggagcttctgtttctcccagccaatcatgtgactcaaggaaaacttccggcgctgtgtccagtctcctccaatcaatggccttcgggggcgggccagcggccgctcaatccccactccctcatgctttgggttagggttttctttcacgctttctgaggaggagagcatggcgcgggcctcggcgaagcacttccgtcagcctcgggcggaggatcgtcttagtagctggccagacctggaggagagcgggcggtctttgcgggcctcaggagataggtggccgcccggcccctttccccgcctgcccggataggtgcgtgcagacccaccaaagaaaagcggtcgctgcgggacccccagtcccacctcggccgcgctgtgggatggctgcgcccccagggcttcctgcgtctccaggaagccgggagtggcgccctctgcggggtggggtgctcccgggccgaactccggacaggtggaggggacagggcagagctcgaggaagccctgtccccttcagtgcaaggtgctgtcactcacgtgtgccctcgaccctcccgttcacccgcagccttctcagcgcctctccctgggccggaggcctcctcaccagcctacctgttgctctggaaaaaaatcccgtcccccgactccgtccctacccccagtcttcggccggctctggcccctggggagggggctgcacggcggaaggaggctggctatgggcccggctgcccgctgcatgtacctcctcctccacccatcgcctcttgcctgggggtaactttgcctggggctcattctttggttaagctgaagctgccgtgggtggccaaaccgcagattctttgcaaattctgagctggcagagctcgcagccgggagccggccggggaagaggagacttgcgcgccgcaagccgcctgcctccaccctgctctccatctcccgctctagaagggctgggaagctcgcggccggggttccacctggaagctgcttgcatggctgaacccagcttaggtccctgacggggctgctggtggaattctcccccttcgaagctggggaggtttaggagggggaaggcttctgtgaagctctcaaaccactaatagagccccctccccaacagtgacggcgcagatgctcccccttttcttagttgacaccaccaggcagcttcctggccgttggtaggttcctgcagctggctgagggaacagggaccggcaggggactttgttaggggagggttgggatgggcagtgggcccctgaaagttaatatattggaacctagctcgagtgtcgttctttccaattccgaaagtagaaagagtaaaaataggggtgattggggtggggttagtagaatgcctctctcagggcgctcccccctcccccaccgttttagagagctaggcctcagccagtcttgccactcccatctcagtgcttcctgaagaggctgttttgagtgttgatgaaaagcaatgcaattatgccaaacagtattgagcagaataatttatttcttttttttcttttgctttaaatcatgaatcccgccaggtacggtggctcacacctgtcatcccagcactttgggaggccaaggcgggcggattacttaatacttaaggtcaggagttcgagaccagcctggccaatatggtgaaacctcgtctctaccaaaaaaaaaaaaaaatacaaaaattagccaggcgcagtggtgcgcacctgtaatcccagctacttggaaggctgaggcaggagaatcccttgaaccgaggaggcgaaggttgcagtgagccgagattgtgccactgcactccagcctgggcgacagagcaagaccctgtctcaaaaaaattaaatcatgaatccccatcctggaagaggtaggtcccagcatccagccagattttctgcaatagtaatttaaacacacttttttatttccttccctttctgaattaaaaggaacaaaaaactgtctagtccttcattgttctgaaatgggcatgatggaagaaggcgggtctggtaggatagctgtgactgataatg

SEQ ID NO: 169155 - DNA, 1053 bp, Artificial Sequence
  derived and/or modified sequence
atgaagtgttccctgcgggtatggtttcttagtgtcgcatttcttcttgtcttcattatgtccctgctgttcacgtactcacaccactcaatggcgacccttccctatctagactctggtgctctggacgggacacatcgggtgaagctggtgcctgggtacgccggactccaacggctgagtaaagagagactctccggcaagagttgcgcctgccgccgttgcatgggtgacgccggcgcctcggattggttcgattcacattttgatgggaacatcagtcctgtctggacccgggaaaatatggacctgccccccgatgtgcagagatggtggatgatgcttcagcctcagtttaaaagccataataccaatgaagttctggagaagctgtttcaaattgtcccaggtgaaaatccttaccggttccgggatccccaccagtgccggcgctgtgccgtcgttggtaactcaggtaatctcaggggatcaggatacggacaagacgttgacggacacaattttataatgagaatgaaccaagcccctactgtgggttttgaacaggacgtgggtagtaggactacacatcatttcatgtaccctgaaagcgccaagaacctccctgccaacgtcagtttcgtactggtgcccttcaaggtccttgacctcttatggatcgcatccgccctgagcacagggcagataagatttacttacgccccagtgaagtctttcctgcgcgttgataaagagaaagtgcagatttacaatcccgcgttctttaaatacatccatgacagatggaccgaacaccatgggcgctacccttctaccgggatgctggttctcttcttcgcactgcacgtgtgtgacgaggtcaatgtctacggtttcggtgcagacagtagaggcaactggcatcattattgggagaataaccgatatgccggagagtttaggaagacaggcgtacacgatgccgacttcgaggcccacattattgatatgctcgccaaagcgtctaaaatagaggtgtatagaggaaattag

SEQ ID NO: 169156 - DNA, 1053 bp, Artificial Sequence
  derived and/or modified sequence
atgaagtgcagcctgcgggtgtggttcctgtctgtggccttcctgctggtgttcatcatgagcctgctcttcacctacagccaccacagcatggccaccctgccctacctggacagcggggccctggatggcacccaccgggtgaagctggtgcccggctacgccggcctgcagaggctgagcaaggagcggctgagcggcaagagctgtgcctgccgccgctgcatgggagatgctggggccagtgactggtttgacagccactttgatggcaacatcagccctgtgtggacccgggagaacatggacctgcccccagatgtgcagcgctggtggatgatgctgcagccccagttcaagagccacaacaccaatgaggtgctggagaagctgttccagatcgtgcctggagagaacccctaccgcttccgggacccccaccagtgccgccgctgtgctgtggtgggcaacagcggcaacctgcggggcagcggctacggccaggatgtggatggccacaacttcatcatgaggatgaaccaggcccccaccgtgggctttgagcaggatgtgggcagcaggaccacccaccacttcatgtacccagagagcgccaagaacctgcctgccaacgtgtcctttgtgctggtgcccttcaaggtgctggacctgctgtggatcgccagcgccctgagcacaggccagatccgcttcacctacgcccctgtgaagagcttcctgcgggtggacaaggagaaggtgcagatctacaacccagccttcttcaagtacatccatgaccgctggacagagcaccacggccgctaccccagcacaggcatgctggtgctcttctttgccctgcacgtgtgtgatgaggtgaatgtgtatggctttggagctgacagccggggcaactggcaccactactgggagaacaacagatatgctggggagttcaggaagacaggagtgcatgatgctgactttgaggcccacatcatcgacatgctggccaaggccagcaagattgaggtgtaccggggcaactag

SEQ ID NO: 169157 - DNA, 1053 bp, Artificial Sequence
  derived and/or modified sequence
atgaagtgcagcctgcgggtgtggttcctgagcgtggccttcctgttggtctttatcatgtctctactttttacatattcgcatcattccatggcaaccctaccttatttagatagcggggcccttgatggcacacatcgggtgaagttggtgccgggctacgctgggcttcaacggttgtcaaaggagaggttatcaggaaaatcgtgcgcctgccgtcggtgcatgggggatgccggcgcttctgactggttcgattcccactttgatgggaacatctcacctgtgtggacgcgtgagaatatggatctccctcccgatgtgcagaggtggtggatgatgctgcaacctcagtttaaaagccacaacaccaatgaagtgcttgaaaagctctttcaaatcgtaccgggcgagaacccctacagattccgtgacccacatcagtgcaggcgttgtgcagtggttggtaactccgggaatctgcgtggcagcggctacgggcaggacgttgacggtcataatttcattatgcggatgaaccaagcccctaccgttggctttgagcaagacgtggggagcagaacgacgcaccatttcatgtacccagaatcagccaagaatctgcccgccaatgtatcgtttgttcttgtcccctttaaggttttggatcttctatggatcgcaagtgcactctcgacagggcagatccgttttacatatgctcctgtgaaaagcttcctgcgggtggataaggagaaagtgcagatttataaccccgccttctttaaatatattcacgacagatggacagagcatcatgggcgctacccgtccacaggcatgctggtgctgttctttgcattacacgtgtgcgacgaagtgaatgtatacgggtttggcgctgactccagaggtaattggcatcactactgggagaataaccgctacgccggcgagttcagaaaaaccggagttcatgacgcagacttcgaggctcatattattgatatgctggcgaaagcctccaagatcgaagtgtatcgtggaaattag

SEQ ID NO: 169158 - DNA, 1053 bp, Artificial Sequence
  derived and/or modified sequence
atgaagtgcagcctgcgggtgtggttcctgagcgtggccttcctgctggttttcataatgtcgctgctttttacctattctcaccattccatggccaccttgccatatctggattcaggtgcactggacggtacacatcgggtcaaactggtccctgggtacgctggcctgcagcgcttatctaaggagcgccttagcggcaagtcctgcgcatgtagaagatgcatgggagacgcaggggcttctgattggtttgactcccactttgatggaaatatttcacctgtgtggactagggaaaacatggacctaccccccgatgtccaacgatggtggatgatgttgcagccacagttcaagtcacacaacacaaatgaggtcctcgagaaactcttccaaatagttcctggagaaaacccctacaggtttcgagatcctcaccagtgtaggcggtgcgccgtggtaggcaactccggaaacttgcggggatcaggatacggccaagacgttgatggacataacttcatcatgcgaatgaaccaggctcccaccgtcgggttcgaacaggacgtgggaagtcgaacaacgcaccatttcatgtatccagaatcggctaaaaacctgcccgccaacgtcagcttcgtgctggtgccctttaaggtcctagatctcttgtggatcgcttctgccctttccactggtcagatccgattcacttacgccccggttaagagctttttaagagttgacaaagaaaaagtccagatatataatcccgccttttttaaatacatccatgacaggtggaccgaacaccatggccgatacccaagtaccggtatgctggtactttttttcgccctgcacgtatgtgacgaagtgaacgtttacgggtttggtgcagactccaggggcaattggcatcattactgggaaaataaccggtatgctggtgagtttaggaaaaccggcgtgcacgatgccgatttcgaggcccacatcatagatatgctggcaaaagcgtcaaaaatagaagtgtacagaggtaactag

SEQ ID NO: 169159 - DNA, 5345 bp, Artificial Sequence
  derived and/or modified sequence
aatatgctcgttccattccctgctggctttgtggccacaaatggaggggcagctacgtttcttgaacacagagcctgagaggccttgtatgcagctgctggaagcagccaggagaccccaaaagtgggctggagacttcaacaaggacagggaacagggctgcactgagaggcccaggggctaggtcagcagcaccgctaggcagatttggaggggagctggggagaggcgaggcagccagctttgcaagattcccacggcacacagccagtgctcaggggttcccttctcagcgttcctctcacctggtgtggctccctcacgcttggcatggatctgagctcctttccttatggctgagacccaaactgcctacaagtggccttttctccctgttcttgcctgcaagggcagcatggggcctcaggctgtcagtgctaccagggacgctggcattcactttgtccataatgtacagatggatgtagacaactgccctcagggctgtccgggggcaggaccaagcccagcaaccacacctcctgacacagccaggttctcccccaacggcggagctgacaggactgttcatggttcattgagtggacccagcaatacctcatcgataatccacagtcgagagaagaggggcggtcagagaccggccagccctcccttctgattgggagaggcctctgcaggcactgacaggctccagagagtgctgtggggggcagtcagtgtccatagtcccctggaatcttctctgggctgttttctctgacttttcacctgaaattaactgtacatagctgggctaggaactctctaaatctgaaagcatgtggcttagggaaaatcacttgactcgtttaccttctggctaagaagtgaagactctgggctaatctagtcctccaggccctggagtcccacacagtgatgctatctgtgcagctagagggcagagcccttggtcatgtccaccctctgattaagtgggcatctcctctcctgctagctttggggcttggggtggggctgggacaaagcctggtgcccgtgtgattcatccgcacattatttctcctctctgccattctagggtcgtgctgcggcagcctggcgcccgacatgtgaaggggaacctgccaggggattactgtgagctcacagcaggataggctggccccgggggagtggggatgggcagaacctgggccaggagtattaggaaggagacctggaccctggtagggagctcagcacaagctcgcctgacccagatggtattggacacagtgccccgctgaacagcagctgttcccagcgccagaggaccccacagccacagtaggagctttgcgacccctacgcaactgcagctggggctggggccaccaggagaagggaccagcacctcagatgggaagcagaagggcaagacctactgcggaaaggatctcgatctctgcagcggagttttcccacactcacagagcttcctgtttttgtcctctcagggttggggtctggctcccctcctctggcagaggttttgggccaggaggtgggacaacacttgcatggaacccaagtcccctgaagcccctgtgctctctgttgtgattggagttctagggcttccccgctgccgggaacgaggggccgcctcattgtctgctcatgaaccacaaggaccccgactgctccagactggattatttcaagccgccaaagagggggacccctagagctggcagccagcaatcccaagggactagagggctgcaatggactgacctccccctcaccagggtggcaggagaggcagagcctctgtggcctagctagtgacggagagacccgatgaagccctaagcaggggccccgcctgactcagggacaggacagccactcctgccaacgtgtgttctccctacatgagggagggcgtggcaagggacccctgccactgtcccctgctgcagcacgtgcccctatgccctttgcatgtggtgccagaataggcaggctacgccgtggctggcccctcagcgggctgggaaaagagtggccacggtgaccgtcacccgcctgccggcaccatgaagtgctccctgcgggtgtggttcctctccgtggccttcctgctggtgttcatcatgtccctgctcttcacctactcgcaccacagcatggccacgctcccctacctggactcaggggccctggatgggacgcaccgggtgaagctggtgcccggctatgccggcctgcagcgcctcagcaaggagaggctctcgggcaagagctgtgcctgtcgccgctgcatgggcgatgccggtgcctccgactggtttgacagccactttgacggtaacatttcccccgtctggacccgagagaacatggatcttccaccggacgtccagaggtggtggatgatgctgcagccccagttcaagtcacacaacaccaatgaggtgctggagaagctgttccagatagtgcctggcgagaacccctaccgcttccgggacccccaccagtgccggcgctgtgccgtggtggggaactcgggcaacctgcggggctctggctatgggcaggacgtggacgggcacaacttcatcatgaggatgaatcaggcgccaaccgtgggctttgagcaggatgttggcagccgaaccacccaccatttcatgtaccctgagagtgccaagaacctgcccgccaacgtcagcttcgtgctggtgcccttcaaggtcctggaccttctgtggatcgccagcgccttgtccacggggcagatccgattcacctacgccccagtgaagtccttccttcgagtggataaagaaaaggtccagatctacaacccagccttcttcaagtatatccacgacaggtggacagagcatcacgggcggtacccttccacggggatgctggtgcttttctttgccctgcatgtgtgtgatgaggtgaacgtgtacgggttcggggccgacagccggggcaactggcaccactactgggagaacaaccggtacgcgggcgagttccggaagactggcgtgcacgacgcggacttcgaggcccacatcatcgacatgctggccaaggccagcaagatcgaagtctaccggggcaactgagccgggcctcgccgcgacccttccggcccatctatcgggcaccggggctccggcccgggacccaggaccagcaacccgcgaccaatcatgctgcagcccaggggcgtctgctgtgccccgccaatcacgagactgggggaccggccgggcctggcaccaatctgcgctgcggtcgggcggagcttctgtttctcccagccaatcatgtgactcaaggaaaacttccggcgctgtgtccagtctcctccaatcaatggccttcgggggcgggccagcggccgctcaatccccactccctcatgctttgggttagggttttctttcacgctttctgaggaggagagcatggcgcgggcctcggcgaagcacttccgtcagcctcgggcggaggatcgtcttagtagctggccagacctggaggagagcgggcggtctttgcgggcctcaggagataggtggccgcccggcccctttccccgcctgcccggataggtgcgtgcagacccaccaaagaaaagcggtcgctgcgggacccccagtcccacctcggccgcgctgtgggatggctgcgcccccagggcttcctgcgtctccaggaagccgggagtggcgccctctgcggggtggggtgctcccgggccgaactccggacaggtggaggggacagggcagagctcgaggaagccctgtccccttcagtgcaaggtgctgtcactcacgtgtgccctcgaccctcccgttcacccgcagccttctcagcgcctctccctgggccggaggcctcctcaccagcctacctgttgctctggaaaaaaatcccgtcccccgactccgtccctacccccagtcttcggccggctctggcccctggggagggggctgcacggcggaaggaggctggctatgggcccggctgcccgctgcatgtacctcctcctccacccatcgcctcttgcctgggggtaactttgcctggggctcattctttggttaagctgaagctgccgtgggtggccaaaccgcagattctttgcaaattctgagctggcagagctcgcagccgggagccggccggggaagaggagacttgcgcgccgcaagccgcctgcctccaccctgctctccatctcccgctctagaagggctgggaagctcgcggccggggttccacctggaagctgcttgcatggctgaacccagcttaggtccctgacggggctgctggtggaattctcccccttcgaagctggggaggtttaggagggggaaggcttctgtgaagctctcaaaccactaatagagccccctccccaacagtgacggcgcagatgctcccccttttcttagttgacaccaccaggcagcttcctggccgttggtaggttcctgcagctggctgagggaacagggaccggcaggggactttgttaggggagggttgggatgggcagtgggcccctgaaagttaatatattggaacctagctcgagtgtcgttctttccaattccgaaagtagaaagagtaaaaataggggtgattggggtggggttagtagaatgcctctctcagggcgctcccccctcccccaccgttttagagagctaggcctcagccagtcttgccactcccatctcagtgcttcctgaagaggctgttttgagtgttgatgaaaagcaatgcaattatgccaaacagtattgagcagaataatttatttcttttttttcttttgctttaaatcatgaatcccgccaggtacggtggctcacacctgtcatcccagcactttgggaggccaaggcgggcggattacttaatacttaaggtcaggagttcgagaccagcctggccaatatggtgaaacctcgtctctaccaaaaaaaaaaaaaaatacaaaaattagccaggcgcagtggtgcgcacctgtaatcccagctacttggaaggctgaggcaggagaatcccttgaaccgaggaggcgaaggttgcagtgagccgagattgtgccactgcactccagcctgggcgacagagcaagaccctgtctcaaaaaaattaaatcatgaatccccatcctggaagaggtaggtcccagcatccagccagattttctgcaatagtaatttaaacacacttttttatttccttccctttctgaattaaaaggaacaaaaaactgtcta

SEQ ID NO: 169160 - RNA, 1053 nt, Artificial Sequence
  derived and/or modified sequence
augaaauguucuuugagaguaugguuucugaguguggcuuuucuccugguguuuaucaugagccuucucuuuacuuacagccaccacagcauggccacccucccuuaccuggacagcggugcccucgaugggacacauagggugaaacucguuccuggcuaugcaggccuccaacggcugaguaaagagagauuaagcggaaaaaguugugccugcagaagaugcaugggcgaugcaggagccagcgauugguucgacagucauuucgauggcaacauuagucccgucuggacccgagaaaacauggaucuacccccagauguucagcgaugguggaugaugcuccagccacaauuuaagucccacaacacgaacgagguuuuagagaagcuguuucagauagugcccggcgagaaccccuaucgcuuuagagauccacaccagugucgacgaugugcaguggucggaaacuccggaaaccuuagggggucuggauauggacaggacgucgacggccauaauuucaucaugaggaugaaucaagcuccuaccgugggcuuugagcaggacgucgggagcagaacaacucaccacuucauguacccugaguccgccaaaaaccugccugccaacguaucuuuugugcuggugccauuuaaaguacuggaccuucuguggaucgcaucagcccucuccacuggacagauacgguucaccuaugcaccagucaaguccuucuugagaguugauaaggagaaaguucagauauauaauccggccuuuuucaaauacauucaugaucgauggacugaacaccauggacgauacccuucuacagguauguuaguucucuucuucgcucuacacguuugcgaugaaguaaaugucuacggauucggggcugacucccgaggcaacuggcaccacuauugggagaacaacagauaugccggugaauuucguaagacaggcguacacgacgcagacuuugaggcucacauaauugacaugcuggcaaaggcaaguaagauugagguauaucgcgggaacuag

SEQ ID NO: 169161 - RNA, 1053 nt, Artificial Sequence
  derived and/or modified sequence
augaagugcagucugcgcguuugguuuuuaagcguggcauuccuacugguguuuauaaugagccuccucuucaccuacucccaucauucaauggccacccugccuuauuuagacagcggggcgcuggacggcacacacagaguuaagcuggugccuggcuacgcuggacugcagcgacugucuaaagaacggcugagugguaagucaugugcaugucgacgguguaugggcgaugcuggcgcaucagauugguucgacucacauuucgacggaaauauaagccccguguggaccagagaaaacauggaucuuccuccagauguucagcggugguggaugaugcugcaaccccaguuuaaaucucauaauacuaacgaggucuuagaaaaacuguuucaaaucgugcccggagagaaucccuauagguuucgagacccccaccaauguaggaggugcgcugugguuggaaauagcgggaacuugcgaggaagcggauacggccaagacguagacggacacaauuucaucaugcggaugaaucaggcgcccacagucggauucgaacaggacgucggcucaagaacuacgcaccauuuuauguacccggaguccgccaaaaauuugccugccaacgugucauucguucuggugccguuuaagguccuagaccugcuuuggaucgcuagugcccuuaguacgggacagaucagguuuaccuaugccccuguuaaaucuuucuuaaggguggacaaagagaaagugcagauuuauaaccccgcauucuuuaaauacauccacgauagauggacggagcaccacgggagguauccaucuacaggcauguugguucuuuuuuucgcucugcaugucugcgacgagguaaauguguacggguucggcgcagacagccgaggcaauuggcaccacuacugggagaacaauagguacgccggcgaauuccguaagaccggggugcaugaugccgauuuugaagcacacaucauugauaugcuggcaaaggcuucaaagauugagguguaccggggcaacuag

SEQ ID NO: 169162 - RNA, 1053 nt, Artificial Sequence
  derived and/or modified sequence
augaaaugcucgcugagggugugguuccuuucagucgccuuccuacucguauuuauaaugagucugcucuucaccuacucccaccauagcauggcaacgcuacccuaucuagacucaggagcccucgacgguacacacaggguuaaacuagugccuggguacgcaggauuacagcggcuuagcaaggaacggcuuucagggaagaguugugcaugcagacgauguaugggugacgcaggcgccagcgacugguucgauucccacuucgauggcaauaucagucccguauggaccagagaaaacauggaccugcccccugaugugcagcgcugguggaugauguugcaaccacaauuuaagagucauaauacgaaugaagugcuggaaaaguuguuccagauuguaccuggagaaaaccccuaccgcuuuagagacccucaccaguguaggcggugcgcuguuguugguaauucagguaaccuuagaggcucuggguacggacaggauguggacggucacaauuuuauuaugcgaaugaaucaagcucccacaguuggguuugagcaagacguggguuccaggaccacccaucacuucauguaucccgaauccgcuaaaaaccuuccugcaaauguuuccuuuguauuggugccuuuuaaaguacuugaccuccuguggaucgcguccgcucucucaacuggccagauaagguuuacauacgcaccagugaagucuuuucugagagucgauaaggagaagguccagauuuauaacccugcauucuucaaguauauucacgaucgcuggacagaacaccacggaagauaucccucaacaggcaugcugguuuuguucuuugcccuacauguaugugacgaggucaacguuuauggguuuggagcugauagcagagggaauuggcaccacuacugggagaauaaccgauaugcgggugaauuuaggaagaccgggguccacgacgcggauuucgaagcccauaucaucgacaugcuagccaaggcauccaagaucgaaguuuauagggguaacuag

SEQ ID NO: 169163 - RNA, 1053 nt, Artificial Sequence
  derived and/or modified sequence
augaaaugcucuuuacgcgugugguuucuuagcguggcguucuugcucguguucauuaugucguuacucuuuaccuacagucaccauucuauggcgacccugccuuaccuggacucaggugccuuggacggcacacacagagugaaacugguuccugguuacgccggccugcagaggcucagcaaagagagguuaucuggcaagucuugcgcaugccgacggugcaugggcgacgcaggagccuccgauugguucgauucccauuuugacggcaacauauccccaguauggacucgcgaaaacauggaucuuccuccagauguucagcggugguggaugaugcugcaaccccaguuuaaaucucauaauacuaacgaggucuuagaaaaacuguuucaaaucgugcccggagagaaucccuauagguuucgagacccccaccaauguaggaggugcgcugugguuggaaauagcgggaacuugcgaggaagcggauacggccaagacguagacggacacaauuucaucaugcggaugaaucaggcgcccacagucggauucgaacaggacgucggcucaagaacuacgcaccauuuuauguacccugaaagcgcuaaaaacuugcccgcaaaugucucuuuuguacuggugccuuuuaaagugcuggaucuccuguggaucgcuagcgcacugaguacugggcaaaucagauuuacuuacgcccccguaaagucuuuccugaggguggauaaggagaaaguucagauauauaacccagccuucuuuaaauacauacaugaucgauggaccgagcaccaugguagguauccuagcaccggaaugcuaguguuguucuucgcccuccacguaugugaugagguaaaugucuacgguuuuggagcugacagucgcgggaacuggcaucacuacugggaaaauaaucgcuaugccggagaguuucggaaaacggggguucacgaugccgacuuugaggcgcacauuaucgacaugcuugccaaggcaucaaagauugaaguuuauagaggaaauuag

SEQ ID NO: 169164 - protein, 1246 aa, Artificial Sequence
  derived and/or modified sequence
MMETERLVLPPPDPLDLPLRAVELGCTGHWELLNLPGAPESSLPHGLPPCAPDLQQEAEQLFLSSPAWLPLHGVEHSARKWQRKTDPWSLLAVLGAPVPSDLQAQRHPTTGQILGYKEVLLENTNLSATTSLSLRRPPGPASQSLWGNPTQYPFWPGGMDEPTITDLNTREEAEEEIDFEKDLLTIPPGFKKGMDFAPKDCPTPAPGLLSLSCMLEPLDLGGGDEDENEAVGQPGGPRGDTVSASPCSAPLARASSLEDLVLKEASTAVSTPEAPEPPSQEQWAIPVDATSPVGDFYRLIPQPAFQWAFEPDVFQKQAILHLERHDSVFVAAHTSAGKTVVAEYAIALAQKHMTRTIYTSPIKALSNQKFRDFRNTFGDVGLLTGDVQLHPEASCLIMTTEILRSMLYSGSDVIRDLEWVIFDEVHYINDVERGVVWEEVLIMLPDHVSIILLSATVPNALEFADWIGRLKRRQIYVISTVTRPVPLEHYLFTGNSSKTQGELFLLLDSRGAFHTKGYYAAVEAKKERMSKHAQTFGAKQPTHQGGPAQDRGVYLSLLASLRTRAQLPVVVFTFSRGRCDEQASGLTSLDLTTSSEKSEIHLFLQRCLARLRGSDRQLPQVLHMSELLNRGLGVHHSGILPILKEIVEMLFSRGLVKVLFATETFAMGVNMPARTVVFDSMRKHDGSTFRDLLPGEYVQMAGRAGRRGLDPTGTVILLCKGRVPEMADLHRMMMGKPSQLQSQFRLTYTMILNLLRVDALRVEDMMKRSFSEFPSRKDSKAHEQALAELTKRLGALEEPDMTGQLVDLPEYYSWGEELTETQHMIQRRIMESVNGLKSLSAGRVVVVKNQEHHNALGVILQVSSNSTSRVFTTLVLCDKPLSQDPQDRGPATAEVPYPDDLVGFKLFLPEGPCDHTVVKLQPGDMAAITTKVLRVNGEKILEDFSKRQQPKFKKDPPLAAVTTAVQELLRLAQAHPAGPPTLDPVNDLQLKDMSVVEGGLRARKLEELIQGAQCVHSPRFPAQYLKLRERMQIQKEMERLRFLLSDQSLLLLPEYHQRVEVLRTLGYVDEAGTVKLAGRVACAMSSHELLLTELMFDNALSTLRPEEIAALLSGLVCQSPGDAGDQLPNTLKQGIERVRAVAKRIGEVQVACGLNQTVEEFVGELNFGLVEVVYEWARGMPFSELAGLSGTPEGLVVRCIQRLAEMCRSLRGAARLVGEPVLGAKMETAATLLRRDIVFAASLYTQ

SEQ ID NO: 169165 - protein, 1246 aa, Artificial Sequence
  derived and/or modified sequence
MMETERLVLPPPDPLDLPLRAVELGCTGHWELLNLPGAPESSLPHGLPPCAPDLQQEAEQLFLSSPAWLPLHGVEHSARKWQRKTDPWSLLAVLGAPVPSDLQAQRHPTTGQILGYKEVLLENTNLSATTSLSLRRPPGPASQSLWGNPTQYPFWPGGMDEPTITDLNTREEAEEEIDFEKDLLTIPPGFKKGMDFAPKDCPTPAPGLLSLSCLLEPLDLGGGDEDENEAVGQPGGPRGDTVSASPCSAPLARASSLEDLVLKEASTAVSTPEAPEPPSQEQWAIPVDATSPVGDFYRLIPQPAFQWAFEPDVFQKQAILHLERHDSVFVAAHTSAGKTVVAEYAIALAQKHMTRTIYTSPIKALSNQKFRDFRNTFGDVGLLTGDVQLHPEASCLIMTTEILRSMLYSGSDVIRDLEWVIFDEVHYINDVERGVVWEEVLIMLPDHVSIILLSATVPNALEFADWIGRLKRRQIYVISTVTRPVPLEHYLFTGNSSKTQGELFLLLDSRGAFHTKGYYAAVEAKKERMSKHAQTFGAKQPTHQGGPAQDRGVYLSLLASLRTRAQLPVVVFTFSRGRCDEQASGLTSLDLTTSSEKSEIHLFLQRCLARLRGSDRQLPQVLHMSELLNRGLGVHHSGILPILKEIVEMLFSRGLVKVLFATETFAMGVNMPARTVVFDSMRKHDGSTFRDLLPGEYVQMAGRAGRRGLDPTGTVILLCKGRVPEMADLHRMMMGKPSQLQSQFRLTYTMILNLLRVDALRVEDMMKRSFSEFPSRKDSKAHEQALAELTKRLGALEEPDMTGQLVDLPEYYSWGEELTETQHMIQRRIMESVNGLKSLSAGRVVVVKNQEHHNALGVILQVSSNSTSRVFTTLVLCDKPLSQDPQDRGPATAEVPYPDDLVGFKLFLPEGPCDHTVVKLQPGDMAAITTKVLRVNGEKILEDFSKRQQPKFKKDPPLAAVTTAVQELLRLAQAHPAGPPTLDPVNDLQLKDMSVVEGGLRARKLEELIQGAQCVHSPRFPAQYLKLRERMQIQKEMERLRFLLSDQSLLLLPEYHQRVEVLRTLGYVDEAGTVKLAGRVACAMSSHELLLTELMFDNALSTLRPEEIAALLSGLVCQSPGDAGDQLPNTLKQGIERVRAVAKRIGEVQVACGLNQTVEEFVGELNFGLVEVVYEWARGMPFSELAGLSGTPEGLVVRCIQRLAEMCRSLRGAARLVGEPVLGAKMETAATLLRRDIVFAASLYTQ

SEQ ID NO: 169166 - protein, 1088 aa, Artificial Sequence
  derived and/or modified sequence
MDEPTITDLNTREEAEEEIDFEKDLLTIPPGFKKGMDFAPKDCPTPAPGLLSLSCMLEPLDLGGGDEDENEAVGQPGGPRGDTVSASPCSAPLARASSLEDLVLKEASTAVSTPEAPEPPSQEQWAIPVDATSPVGDFYRLIPQPAFQWAFEPDVFQKQAILHLERHDSVFVAAHTSAGKTVVAEYAIALAQKHMTRTIYTSPIKALSNQKFRDFRNTFGDVGLLTGDVQLHPEASCLIMTTEILRSMLYSGSDVIRDLEWVIFDEVHYINDVERGVVWEEVLIMLPDHVSIILLSATVPNALEFADWIGRLKRRQIYVISTVTRPVPLEHYLFTGNSSKTQGELFLLLDSRGAFHTKGYYAAVEAKKERMSKHAQTFGAKQPTHQGGPAQDRGVYLSLLASLRTRAQLPVVVFTFSRGRCDEQASGLTSLDLTTSSEKSEIHLFLQRCLARLRGSDRQLPQVLHMSELLNRGLGVHHSGILPILKEIVEMLFSRGLVKVLFATETFAMGVNMPARTVVFDSMRKHDGSTFRDLLPGEYVQMAGRAGRRGLDPTGTVILLCKGRVPEMADLHRMMMGKPSQLQSQFRLTYTMILNLLRVDALRVEDMMKRSFSEFPSRKDSKAHEQALAELTKRLGALEEPDMTGQLVDLPEYYSWGEELTETQHMIQRRIMESVNGLKSLSAGRVVVVKNQEHHNALGVILQVSSNSTSRVFTTLVLCDKPLSQDPQDRGPATAEVPYPDDLVGFKLFLPEGPCDHTVVKLQPGDMAAITTKVLRVNGEKILEDFSKRQQPKFKKDPPLAAVTTAVQELLRLAQAHPAGPPTLDPVNDLQLKDMSVVEGGLRARKLEELIQGAQCVHSPRFPAQYLKLRERMQIQKEMERLRFLLSDQSLLLLPEYHQRVEVLRTLGYVDEAGTVKLAGRVACAMSSHELLLTELMFDNALSTLRPEEIAALLSGLVCQSPGDAGDQLPNTLKQGIERVRAVAKRIGEVQVACGLNQTVEEFVGELNFGLVEVVYEWARGMPFSELAGLSGTPEGLVVRCIQRLAEMCRSLRGAARLVGEPVLGAKMETAATLLRRDIVFAASLYTQ

SEQ ID NO: 169167 - protein, 1053 aa, Artificial Sequence
  derived and/or modified sequence
MDFAPKDCPTPAPGLLSLSCMLEPLDLGGGDEDENEAVGQPGGPRGDTVSASPCSAPLARASSLEDLVLKEASTAVSTPEAPEPPSQEQWAIPVDATSPVGDFYRLIPQPAFQWAFEPDVFQKQAILHLERHDSVFVAAHTSAGKTVVAEYAIALAQKHMTRTIYTSPIKALSNQKFRDFRNTFGDVGLLTGDVQLHPEASCLIMTTEILRSMLYSGSDVIRDLEWVIFDEVHYINDVERGVVWEEVLIMLPDHVSIILLSATVPNALEFADWIGRLKRRQIYVISTVTRPVPLEHYLFTGNSSKTQGELFLLLDSRGAFHTKGYYAAVEAKKERMSKHAQTFGAKQPTHQGGPAQDRGVYLSLLASLRTRAQLPVVVFTFSRGRCDEQASGLTSLDLTTSSEKSEIHLFLQRCLARLRGSDRQLPQVLHMSELLNRGLGVHHSGILPILKEIVEMLFSRGLVKVLFATETFAMGVNMPARTVVFDSMRKHDGSTFRDLLPGEYVQMAGRAGRRGLDPTGTVILLCKGRVPEMADLHRMMMGKPSQLQSQFRLTYTMILNLLRVDALRVEDMMKRSFSEFPSRKDSKAHEQALAELTKRLGALEEPDMTGQLVDLPEYYSWGEELTETQHMIQRRIMESVNGLKSLSAGRVVVVKNQEHHNALGVILQVSSNSTSRVFTTLVLCDKPLSQDPQDRGPATAEVPYPDDLVGFKLFLPEGPCDHTVVKLQPGDMAAITTKVLRVNGEKILEDFSKRQQPKFKKDPPLAAVTTAVQELLRLAQAHPAGPPTLDPVNDLQLKDMSVVEGGLRARKLEELIQGAQCVHSPRFPAQYLKLRERMQIQKEMERLRFLLSDQSLLLLPEYHQRVEVLRTLGYVDEAGTVKLAGRVACAMSSHELLLTELMFDNALSTLRPEEIAALLSGLVCQSPGDAGDQLPNTLKQGIERVRAVAKRIGEVQVACGLNQTVEEFVGELNFGLVEVVYEWARGMPFSELAGLSGTPEGLVVRCIQRLAEMCRSLRGAARLVGEPVLGAKMETAATLLRRDIVFAASLYTQ

SEQ ID NO: 169168 - protein, 230 aa, Artificial Sequence
  derived and/or modified sequence
MMETERLVLPPPDPLDLPLRAVELGCTGHWELLNLPGAPESSLPHGLPPCAPDLQQEAEQLFLSSPAWLPLHGVEHSARKWQRKTDPWSLLAVLGAPVPSDLQAQRHPTTGQILGYKEVLLENTNLSATTSLSLRRPPGPASQSLWGNPTQYPFWPGGMDEPTITDLNTREEAEEEIDFEKDLLTIPPGFKKGMDFAPKGSVHSCIHPRGPRASISGAVGHPCGRHLPCW

SEQ ID NO: 169169 - protein, 1088 aa, Artificial Sequence [sequence omitted]

SEQ ID NO: 169170 - protein, 1053 aa, Artificial Sequence
  derived and/or modified sequence
MDFAPKDCPTPAPGLLSLSCLLEPLDLGGGDEDENEAVGQPGGPRGDTVSASPCSAPLARASSLEDLVLKEASTAVSTPEAPEPPSQEQWAIPVDATSPVGDFYRLIPQPAFQWAFEPDVFQKQAILHLERHDSVFVAAHTSAGKTVVAEYAIALAQKHMTRTIYTSPIKALSNQKFRDFRNTFGDVGLLTGDVQLHPEASCLIMTTEILRSMLYSGSDVIRDLEWVIFDEVHYINDVERGVVWEEVLIMLPDHVSIILLSATVPNALEFADWIGRLKRRQIYVISTVTRPVPLEHYLFTGNSSKTQGELFLLLDSRGAFHTKGYYAAVEAKKERMSKHAQTFGAKQPTHQGGPAQDRGVYLSLLASLRTRAQLPVVVFTFSRGRCDEQASGLTSLDLTTSSEKSEIHLFLQRCLARLRGSDRQLPQVLHMSELLNRGLGVHHSGILPILKEIVEMLFSRGLVKVLFATETFAMGVNMPARTVVFDSMRKHDGSTFRDLLPGEYVQMAGRAGRRGLDPTGTVILLCKGRVPEMADLHRMMMGKPSQLQSQFRLTYTMILNLLRVDALRVEDMMKRSFSEFPSRKDSKAHEQALAELTKRLGALEEPDMTGQLVDLPEYYSWGEELTETQHMIQRRIMESVNGLKSLSAGRVVVVKNQEHHNALGVILQVSSNSTSRVFTTLVLCDKPLSQDPQDRGPATAEVPYPDDLVGFKLFLPEGPCDHTVVKLQPGDMAAITTKVLRVNGEKILEDFSKRQQPKFKKDPPLAAVTTAVQELLRLAQAHPAGPPTLDPVNDLQLKDMSVVEGGLRARKLEELIQGAQCVHSPRFPAQYLKLRERMQIQKEMERLRFLLSDQSLLLLPEYHQRVEVLRTLGYVDEAGTVKLAGRVACAMSSHELLLTELMFDNALSTLRPEEIAALLSGLVCQSPGDAGDQLPNTLKQGIERVRAVAKRIGEVQVACGLNQTVEEFVGELNFGLVEVVYEWARGMPFSELAGLSGTPEGLVVRCIQRLAEMCRSLRGAARLVGEPVLGAKMETAATLLRRDIVFAASLYTQ

SEQ ID NO: 169171 - protein, 880 aa, Artificial Sequence
  derived and/or modified sequence
MMETERLVLPPPDPLDLPLRAVELGCTGHWELLNLPGAPESSLPHGLPPCAPDLQQEAEQLFLSSPAWLPLHGVEHSARKWQRKTDPWSLLAVLGAPVPSDLQAQRHPTTGQILGYKEVLLEHYLFTGNSSKTQGELFLLLDSRGAFHTKGYYAAVEAKKERMSKHAQTFGAKQPTHQGGPAQDRGVYLSLLASLRTRAQLPVVVFTFSRGRCDEQASGLTSLDLTTSSEKSEIHLFLQRCLARLRGSDRQLPQVLHMSELLNRGLGVHHSGILPILKEIVEMLFSRGLVKVLFATETFAMGVNMPARTVVFDSMRKHDGSTFRDLLPGEYVQMAGRAGRRGLDPTGTVILLCKGRVPEMADLHRMMMGKPSQLQSQFRLTYTMILNLLRVDALRVEDMMKRSFSEFPSRKDSKAHEQALAELTKRLGALEEPDMTGQLVDLPEYYSWGEELTETQHMIQRRIMESVNGLKSLSAGRVVVVKNQEHHNALGVILQVSSNSTSRVFTTLVLCDKPLSQDPQDRGPATAEVPYPDDLVGFKLFLPEGPCDHTVVKLQPGDMAAITTKVLRVNGEKILEDFSKRQQPKFKKDPPLAAVTTAVQELLRLAQAHPAGPPTLDPVNDLQLKDMSVVEGGLRARKLEELIQGAQCVHSPRFPAQYLKLRERMQIQKEMERLRFLLSDQSLLLLPEYHQRVEVLRTLGYVDEAGTVKLAGRVACAMSSHELLLTELMFDNALSTLRPEEIAALLSGLVCQSPGDAGDQLPNTLKQGIERVRAVAKRIGEVQVACGLNQTVEEFVGELNFGLVEVVYEWARGMPFSELAGLSGTPEGLVVRCIQRLAEMCRSLRGAARLVGEPVLGAKMETAATLLRRDIVFAASLYTQ

SEQ ID NO: 169172 - DNA, 3741 bp, Artificial Sequence
  derived and/or modified sequence
atgatggagaccgagagactggtgctgcccccccccgaccccctggacctgcccctgagagccgtggagctgggctgcaccggccactgggagctgctgaacctgcccggcgcccccgagagcagcctgccccacggcctgcccccctgcgcccccgacctgcagcaggaggccgagcagctgttcctgagcagccccgcctggctgcccctgcacggcgtggagcacagcgccagaaagtggcagagaaagaccgacccctggagcctgctggccgtgctgggcgcccccgtgcccagcgacctgcaggcccagagacaccccaccaccggccagatcctgggctacaaggaggtgctgctggagaacaccaacctgagcgccaccaccagcctgagcctgagaagaccccccggccccgccagccagagcctgtggggcaaccccacccagtaccccttctggcccggcggcatggacgagcccaccatcaccgacctgaacaccagagaggaggccgaggaggagatcgacttcgagaaggacctgctgaccatcccccccggcttcaagaagggcatggacttcgcccccaaggactgccccacccccgcccccggcctgctgagcctgagctgcatgctggagcccctggacctgggcggcggcgacgaggacgagaacgaggccgtgggccagcccggcggccccagaggcgacaccgtgagcgccagcccctgcagcgcccccctggccagagccagcagcctggaggacctggtgctgaaggaggccagcaccgccgtgagcacccccgaggcccccgagccccccagccaggagcagtgggccatccccgtggacgccaccagccccgtgggcgacttctacagactgatcccccagcccgccttccagtgggccttcgagcccgacgtgttccagaagcaggccatcctgcacctggagagacacgacagcgtgttcgtggccgcccacaccagcgccggcaagaccgtggtggccgagtacgccatcgccctggcccagaagcacatgaccagaaccatctacaccagccccatcaaggccctgagcaaccagaagttcagagacttcagaaacaccttcggcgacgtgggcctgctgaccggcgacgtgcagctgcaccccgaggccagctgcctgatcatgaccaccgagatcctgagaagcatgctgtacagcggcagcgacgtgatcagagacctggagtgggtgatcttcgacgaggtgcactacatcaacgacgtggagagaggcgtggtgtgggaggaggtgctgatcatgctgcccgaccacgtgagcatcatcctgctgagcgccaccgtgcccaacgccctggagttcgccgactggatcggcagactgaagagaagacagatctacgtgatcagcaccgtgaccagacccgtgcccctggagcactacctgttcaccggcaacagcagcaagacccagggcgagctgttcctgctgctggacagcagaggcgccttccacaccaagggctactacgccgccgtggaggccaagaaggagagaatgagcaagcacgcccagaccttcggcgccaagcagcccacccaccagggcggccccgcccaggacagaggcgtgtacctgagcctgctggccagcctgagaaccagagcccagctgcccgtggtggtgttcaccttcagcagaggcagatgcgacgagcaggccagcggcctgaccagcctggacctgaccaccagcagcgagaagagcgagatccacctgttcctgcagagatgcctggccagactgagaggcagcgacagacagctgccccaggtgctgcacatgagcgagctgctgaacagaggcctgggcgtgcaccacagcggcatcctgcccatcctgaaggagatcgtggagatgctgttcagcagaggcctggtgaaggtgctgttcgccaccgagaccttcgccatgggcgtgaacatgcccgccagaaccgtggtgttcgacagcatgagaaagcacgacggcagcaccttcagagacctgctgcccggcgagtacgtgcagatggccggcagagccggcagaagaggcctggaccccaccggcaccgtgatcctgctgtgcaagggcagagtgcccgagatggccgacctgcacagaatgatgatgggcaagcccagccagctgcagagccagttcagactgacctacaccatgatcctgaacctgctgagagtggacgccctgagagtggaggacatgatgaagagaagcttcagcgagttccccagcagaaaggacagcaaggcccacgagcaggccctggccgagctgaccaagagactgggcgccctggaggagcccgacatgaccggccagctggtggacctgcccgagtactacagctggggcgaggagctgaccgagacccagcacatgatccagagaagaatcatggagagcgtgaacggcctgaagagcctgagcgccggcagagtggtggtggtgaagaaccaggagcaccacaacgccctgggcgtgatcctgcaggtgagcagcaacagcaccagcagagtgttcaccaccctggtgctgtgcgacaagcccctgagccaggacccccaggacagaggccccgccaccgccgaggtgccctaccccgacgacctggtgggcttcaagctgttcctgcccgagggcccctgcgaccacaccgtggtgaagctgcagcccggcgacatggccgccatcaccaccaaggtgctgagagtgaacggcgagaagatcctggaggacttcagcaagagacagcagcccaagttcaagaaggacccccccctggccgccgtgaccaccgccgtgcaggagctgctgagactggcccaggcccaccccgccggcccccccaccctggaccccgtgaacgacctgcagctgaaggacatgagcgtggtggagggcggcctgagagccagaaagctggaggagctgatccagggcgcccagtgcgtgcacagccccagattccccgcccagtacctgaagctgagagagagaatgcagatccagaaggagatggagagactgagattcctgctgagcgaccagagcctgctgctgctgcccgagtaccaccagagagtggaggtgctgagaaccctgggctacgtggacgaggccggcaccgtgaagctggccggcagagtggcctgcgccatgagcagccacgagctgctgctgaccgagctgatgttcgacaacgccctgagcaccctgagacccgaggagatcgccgccctgctgagcggcctggtgtgccagagccccggcgacgccggcgaccagctgcccaacaccctgaagcagggcatcgagagagtgagagccgtggccaagagaatcggcgaggtgcaggtggcctgcggcctgaaccagaccgtggaggagttcgtgggcgagctgaacttcggcctggtggaggtggtgtacgagtgggccagaggcatgcccttcagcgagctggccggcctgagcggcacccccgagggcctggtggtgagatgcatccagagactggccgagatgtgcagaagcctgagaggcgccgccagactggtgggcgagcccgtgctgggcgccaagatggagaccgccgccaccctgctgagaagagacatcgtgttcgccgccagcctgtacacccagtag

SEQ ID NO: 169173 - DNA, 3741 bp, Artificial Sequence
  derived and/or modified sequence
atgatggagaccgagagactggtgctgcccccccccgaccccctggacctgcccctgagagccgtggagctgggctgcaccggccactgggagctgctgaacctgcccggcgcccccgagagcagcctgccccacggcctgcccccctgcgcccccgacctgcagcaggaggccgagcagctgttcctgagcagccccgcctggctgcccctgcacggcgtggagcacagcgccagaaagtggcagagaaagaccgacccctggagcctgctggccgtgctgggcgcccccgtgcccagcgacctgcaggcccagagacaccccaccaccggccagatcctgggctacaaggaggtgctgctggagaacaccaacctgagcgccaccaccagcctgagcctgagaagaccccccggccccgccagccagagcctgtggggcaaccccacccagtaccccttctggcccggcggcatggacgagcccaccatcaccgacctgaacaccagagaggaggccgaggaggagatcgacttcgagaaggacctgctgaccatcccccccggcttcaagaagggcatggacttcgcccccaaggactgccccacccccgcccccggcctgctgagcctgagctgcctgctggagcccctggacctgggcggcggcgacgaggacgagaacgaggccgtgggccagcccggcggccccagaggcgacaccgtgagcgccagcccctgcagcgcccccctggccagagccagcagcctggaggacctggtgctgaaggaggccagcaccgccgtgagcacccccgaggcccccgagccccccagccaggagcagtgggccatccccgtggacgccaccagccccgtgggcgacttctacagactgatcccccagcccgccttccagtgggccttcgagcccgacgtgttccagaagcaggccatcctgcacctggagagacacgacagcgtgttcgtggccgcccacaccagcgccggcaagaccgtggtggccgagtacgccatcgccctggcccagaagcacatgaccagaaccatctacaccagccccatcaaggccctgagcaaccagaagttcagagacttcagaaacaccttcggcgacgtgggcctgctgaccggcgacgtgcagctgcaccccgaggccagctgcctgatcatgaccaccgagatcctgagaagcatgctgtacagcggcagcgacgtgatcagagacctggagtgggtgatcttcgacgaggtgcactacatcaacgacgtggagagaggcgtggtgtgggaggaggtgctgatcatgctgcccgaccacgtgagcatcatcctgctgagcgccaccgtgcccaacgccctggagttcgccgactggatcggcagactgaagagaagacagatctacgtgatcagcaccgtgaccagacccgtgcccctggagcactacctgttcaccggcaacagcagcaagacccagggcgagctgttcctgctgctggacagcagaggcgccttccacaccaagggctactacgccgccgtggaggccaagaaggagagaatgagcaagcacgcccagaccttcggcgccaagcagcccacccaccagggcggccccgcccaggacagaggcgtgtacctgagcctgctggccagcctgagaaccagagcccagctgcccgtggtggtgttcaccttcagcagaggcagatgcgacgagcaggccagcggcctgaccagcctggacctgaccaccagcagcgagaagagcgagatccacctgttcctgcagagatgcctggccagactgagaggcagcgacagacagctgccccaggtgctgcacatgagcgagctgctgaacagaggcctgggcgtgcaccacagcggcatcctgcccatcctgaaggagatcgtggagatgctgttcagcagaggcctggtgaaggtgctgttcgccaccgagaccttcgccatgggcgtgaacatgcccgccagaaccgtggtgttcgacagcatgagaaagcacgacggcagcaccttcagagacctgctgcccggcgagtacgtgcagatggccggcagagccggcagaagaggcctggaccccaccggcaccgtgatcctgctgtgcaagggcagagtgcccgagatggccgacctgcacagaatgatgatgggcaagcccagccagctgcagagccagttcagactgacctacaccatgatcctgaacctgctgagagtggacgccctgagagtggaggacatgatgaagagaagcttcagcgagttccccagcagaaaggacagcaaggcccacgagcaggccctggccgagctgaccaagagactgggcgccctggaggagcccgacatgaccggccagctggtggacctgcccgagtactacagctggggcgaggagctgaccgagacccagcacatgatccagagaagaatcatggagagcgtgaacggcctgaagagcctgagcgccggcagagtggtggtggtgaagaaccaggagcaccacaacgccctgggcgtgatcctgcaggtgagcagcaacagcaccagcagagtgttcaccaccctggtgctgtgcgacaagcccctgagccaggacccccaggacagaggccccgccaccgccgaggtgccctaccccgacgacctggtgggcttcaagctgttcctgcccgagggcccctgcgaccacaccgtggtgaagctgcagcccggcgacatggccgccatcaccaccaaggtgctgagagtgaacggcgagaagatcctggaggacttcagcaagagacagcagcccaagttcaagaaggacccccccctggccgccgtgaccaccgccgtgcaggagctgctgagactggcccaggcccaccccgccggcccccccaccctggaccccgtgaacgacctgcagctgaaggacatgagcgtggtggagggcggcctgagagccagaaagctggaggagctgatccagggcgcccagtgcgtgcacagccccagattccccgcccagtacctgaagctgagagagagaatgcagatccagaaggagatggagagactgagattcctgctgagcgaccagagcctgctgctgctgcccgagtaccaccagagagtggaggtgctgagaaccctgggctacgtggacgaggccggcaccgtgaagctggccggcagagtggcctgcgccatgagcagccacgagctgctgctgaccgagctgatgttcgacaacgccctgagcaccctgagacccgaggagatcgccgccctgctgagcggcctggtgtgccagagccccggcgacgccggcgaccagctgcccaacaccctgaagcagggcatcgagagagtgagagccgtggccaagagaatcggcgaggtgcaggtggcctgcggcctgaaccagaccgtggaggagttcgtgggcgagctgaacttcggcctggtggaggtggtgtacgagtgggccagaggcatgcccttcagcgagctggccggcctgagcggcacccccgagggcctggtggtgagatgcatccagagactggccgagatgtgcagaagcctgagaggcgccgccagactggtgggcgagcccgtgctgggcgccaagatggagaccgccgccaccctgctgagaagagacatcgtgttcgccgccagcctgtacacccagtag

SEQ ID NO: 169174 - DNA, 3267 bp, Artificial Sequence
  derived and/or modified sequence
atggacgagcccaccatcaccgacctgaacaccagagaggaggccgaggaggagatcgacttcgagaaggacctgctgaccatcccccccggcttcaagaagggcatggacttcgcccccaaggactgccccacccccgcccccggcctgctgagcctgagctgcatgctggagcccctggacctgggcggcggcgacgaggacgagaacgaggccgtgggccagcccggcggccccagaggcgacaccgtgagcgccagcccctgcagcgcccccctggccagagccagcagcctggaggacctggtgctgaaggaggccagcaccgccgtgagcacccccgaggcccccgagccccccagccaggagcagtgggccatccccgtggacgccaccagccccgtgggcgacttctacagactgatcccccagcccgccttccagtgggccttcgagcccgacgtgttccagaagcaggccatcctgcacctggagagacacgacagcgtgttcgtggccgcccacaccagcgccggcaagaccgtggtggccgagtacgccatcgccctggcccagaagcacatgaccagaaccatctacaccagccccatcaaggccctgagcaaccagaagttcagagacttcagaaacaccttcggcgacgtgggcctgctgaccggcgacgtgcagctgcaccccgaggccagctgcctgatcatgaccaccgagatcctgagaagcatgctgtacagcggcagcgacgtgatcagagacctggagtgggtgatcttcgacgaggtgcactacatcaacgacgtggagagaggcgtggtgtgggaggaggtgctgatcatgctgcccgaccacgtgagcatcatcctgctgagcgccaccgtgcccaacgccctggagttcgccgactggatcggcagactgaagagaagacagatctacgtgatcagcaccgtgaccagacccgtgcccctggagcactacctgttcaccggcaacagcagcaagacccagggcgagctgttcctgctgctggacagcagaggcgccttccacaccaagggctactacgccgccgtggaggccaagaaggagagaatgagcaagcacgcccagaccttcggcgccaagcagcccacccaccagggcggccccgcccaggacagaggcgtgtacctgagcctgctggccagcctgagaaccagagcccagctgcccgtggtggtgttcaccttcagcagaggcagatgcgacgagcaggccagcggcctgaccagcctggacctgaccaccagcagcgagaagagcgagatccacctgttcctgcagagatgcctggccagactgagaggcagcgacagacagctgccccaggtgctgcacatgagcgagctgctgaacagaggcctgggcgtgcaccacagcggcatcctgcccatcctgaaggagatcgtggagatgctgttcagcagaggcctggtgaaggtgctgttcgccaccgagaccttcgccatgggcgtgaacatgcccgccagaaccgtggtgttcgacagcatgagaaagcacgacggcagcaccttcagagacctgctgcccggcgagtacgtgcagatggccggcagagccggcagaagaggcctggaccccaccggcaccgtgatcctgctgtgcaagggcagagtgcccgagatggccgacctgcacagaatgatgatgggcaagcccagccagctgcagagccagttcagactgacctacaccatgatcctgaacctgctgagagtggacgccctgagagtggaggacatgatgaagagaagcttcagcgagttccccagcagaaaggacagcaaggcccacgagcaggccctggccgagctgaccaagagactgggcgccctggaggagcccgacatgaccggccagctggtggacctgcccgagtactacagctggggcgaggagctgaccgagacccagcacatgatccagagaagaatcatggagagcgtgaacggcctgaagagcctgagcgccggcagagtggtggtggtgaagaaccaggagcaccacaacgccctgggcgtgatcctgcaggtgagcagcaacagcaccagcagagtgttcaccaccctggtgctgtgcgacaagcccctgagccaggacccccaggacagaggccccgccaccgccgaggtgccctaccccgacgacctggtgggcttcaagctgttcctgcccgagggcccctgcgaccacaccgtggtgaagctgcagcccggcgacatggccgccatcaccaccaaggtgctgagagtgaacggcgagaagatcctggaggacttcagcaagagacagcagcccaagttcaagaaggacccccccctggccgccgtgaccaccgccgtgcaggagctgctgagactggcccaggcccaccccgccggcccccccaccctggaccccgtgaacgacctgcagctgaaggacatgagcgtggtggagggcggcctgagagccagaaagctggaggagctgatccagggcgcccagtgcgtgcacagccccagattccccgcccagtacctgaagctgagagagagaatgcagatccagaaggagatggagagactgagattcctgctgagcgaccagagcctgctgctgctgcccgagtaccaccagagagtggaggtgctgagaaccctgggctacgtggacgaggccggcaccgtgaagctggccggcagagtggcctgcgccatgagcagccacgagctgctgctgaccgagctgatgttcgacaacgccctgagcaccctgagacccgaggagatcgccgccctgctgagcggcctggtgtgccagagccccggcgacgccggcgaccagctgcccaacaccctgaagcagggcatcgagagagtgagagccgtggccaagagaatcggcgaggtgcaggtggcctgcggcctgaaccagaccgtggaggagttcgtgggcgagctgaacttcggcctggtggaggtggtgtacgagtgggccagaggcatgcccttcagcgagctggccggcctgagcggcacccccgagggcctggtggtgagatgcatccagagactggccgagatgtgcagaagcctgagaggcgccgccagactggtgggcgagcccgtgctgggcgccaagatggagaccgccgccaccctgctgagaagagacatcgtgttcgccgccagcctgtacacccagtag

SEQ ID NO: 169175 - DNA, 3162 bp, Artificial Sequence
  derived and/or modified sequence
atggacttcgcccccaaggactgccccacccccgcccccggcctgctgagcctgagctgcatgctggagcccctggacctgggcggcggcgacgaggacgagaacgaggccgtgggccagcccggcggccccagaggcgacaccgtgagcgccagcccctgcagcgcccccctggccagagccagcagcctggaggacctggtgctgaaggaggccagcaccgccgtgagcacccccgaggcccccgagccccccagccaggagcagtgggccatccccgtggacgccaccagccccgtgggcgacttctacagactgatcccccagcccgccttccagtgggccttcgagcccgacgtgttccagaagcaggccatcctgcacctggagagacacgacagcgtgttcgtggccgcccacaccagcgccggcaagaccgtggtggccgagtacgccatcgccctggcccagaagcacatgaccagaaccatctacaccagccccatcaaggccctgagcaaccagaagttcagagacttcagaaacaccttcggcgacgtgggcctgctgaccggcgacgtgcagctgcaccccgaggccagctgcctgatcatgaccaccgagatcctgagaagcatgctgtacagcggcagcgacgtgatcagagacctggagtgggtgatcttcgacgaggtgcactacatcaacgacgtggagagaggcgtggtgtgggaggaggtgctgatcatgctgcccgaccacgtgagcatcatcctgctgagcgccaccgtgcccaacgccctggagttcgccgactggatcggcagactgaagagaagacagatctacgtgatcagcaccgtgaccagacccgtgcccctggagcactacctgttcaccggcaacagcagcaagacccagggcgagctgttcctgctgctggacagcagaggcgccttccacaccaagggctactacgccgccgtggaggccaagaaggagagaatgagcaagcacgcccagaccttcggcgccaagcagcccacccaccagggcggccccgcccaggacagaggcgtgtacctgagcctgctggccagcctgagaaccagagcccagctgcccgtggtggtgttcaccttcagcagaggcagatgcgacgagcaggccagcggcctgaccagcctggacctgaccaccagcagcgagaagagcgagatccacctgttcctgcagagatgcctggccagactgagaggcagcgacagacagctgccccaggtgctgcacatgagcgagctgctgaacagaggcctgggcgtgcaccacagcggcatcctgcccatcctgaaggagatcgtggagatgctgttcagcagaggcctggtgaaggtgctgttcgccaccgagaccttcgccatgggcgtgaacatgcccgccagaaccgtggtgttcgacagcatgagaaagcacgacggcagcaccttcagagacctgctgcccggcgagtacgtgcagatggccggcagagccggcagaagaggcctggaccccaccggcaccgtgatcctgctgtgcaagggcagagtgcccgagatggccgacctgcacagaatgatgatgggcaagcccagccagctgcagagccagttcagactgacctacaccatgatcctgaacctgctgagagtggacgccctgagagtggaggacatgatgaagagaagcttcagcgagttccccagcagaaaggacagcaaggcccacgagcaggccctggccgagctgaccaagagactgggcgccctggaggagcccgacatgaccggccagctggtggacctgcccgagtactacagctggggcgaggagctgaccgagacccagcacatgatccagagaagaatcatggagagcgtgaacggcctgaagagcctgagcgccggcagagtggtggtggtgaagaaccaggagcaccacaacgccctgggcgtgatcctgcaggtgagcagcaacagcaccagcagagtgttcaccaccctggtgctgtgcgacaagcccctgagccaggacccccaggacagaggccccgccaccgccgaggtgccctaccccgacgacctggtgggcttcaagctgttcctgcccgagggcccctgcgaccacaccgtggtgaagctgcagcccggcgacatggccgccatcaccaccaaggtgctgagagtgaacggcgagaagatcctggaggacttcagcaagagacagcagcccaagttcaagaaggacccccccctggccgccgtgaccaccgccgtgcaggagctgctgagactggcccaggcccaccccgccggcccccccaccctggaccccgtgaacgacctgcagctgaaggacatgagcgtggtggagggcggcctgagagccagaaagctggaggagctgatccagggcgcccagtgcgtgcacagccccagattccccgcccagtacctgaagctgagagagagaatgcagatccagaaggagatggagagactgagattcctgctgagcgaccagagcctgctgctgctgcccgagtaccaccagagagtggaggtgctgagaaccctgggctacgtggacgaggccggcaccgtgaagctggccggcagagtggcctgcgccatgagcagccacgagctgctgctgaccgagctgatgttcgacaacgccctgagcaccctgagacccgaggagatcgccgccctgctgagcggcctggtgtgccagagccccggcgacgccggcgaccagctgcccaacaccctgaagcagggcatcgagagagtgagagccgtggccaagagaatcggcgaggtgcaggtggcctgcggcctgaaccagaccgtggaggagttcgtgggcgagctgaacttcggcctggtggaggtggtgtacgagtgggccagaggcatgcccttcagcgagctggccggcctgagcggcacccccgagggcctggtggtgagatgcatccagagactggccgagatgtgcagaagcctgagaggcgccgccagactggtgggcgagcccgtgctgggcgccaagatggagaccgccgccaccctgctgagaagagacatcgtgttcgccgccagcctgtacacccagtag

SEQ ID NO: 169176 - DNA, 3267 bp, Artificial Sequence
  derived and/or modified sequence
atggacgagcccaccatcaccgacctgaacaccagagaggaggccgaggaggagatcgacttcgagaaggacctgctgaccatcccccccggcttcaagaagggcatggacttcgcccccaaggactgccccacccccgcccccggcctgctgagcctgagctgcctgctggagcccctggacctgggcggcggcgacgaggacgagaacgaggccgtgggccagcccggcggccccagaggcgacaccgtgagcgccagcccctgcagcgcccccctggccagagccagcagcctggaggacctggtgctgaaggaggccagcaccgccgtgagcacccccgaggcccccgagccccccagccaggagcagtgggccatccccgtggacgccaccagccccgtgggcgacttctacagactgatcccccagcccgccttccagtgggccttcgagcccgacgtgttccagaagcaggccatcctgcacctggagagacacgacagcgtgttcgtggccgcccacaccagcgccggcaagaccgtggtggccgagtacgccatcgccctggcccagaagcacatgaccagaaccatctacaccagccccatcaaggccctgagcaaccagaagttcagagacttcagaaacaccttcggcgacgtgggcctgctgaccggcgacgtgcagctgcaccccgaggccagctgcctgatcatgaccaccgagatcctgagaagcatgctgtacagcggcagcgacgtgatcagagacctggagtgggtgatcttcgacgaggtgcactacatcaacgacgtggagagaggcgtggtgtgggaggaggtgctgatcatgctgcccgaccacgtgagcatcatcctgctgagcgccaccgtgcccaacgccctggagttcgccgactggatcggcagactgaagagaagacagatctacgtgatcagcaccgtgaccagacccgtgcccctggagcactacctgttcaccggcaacagcagcaagacccagggcgagctgttcctgctgctggacagcagaggcgccttccacaccaagggctactacgccgccgtggaggccaagaaggagagaatgagcaagcacgcccagaccttcggcgccaagcagcccacccaccagggcggccccgcccaggacagaggcgtgtacctgagcctgctggccagcctgagaaccagagcccagctgcccgtggtggtgttcaccttcagcagaggcagatgcgacgagcaggccagcggcctgaccagcctggacctgaccaccagcagcgagaagagcgagatccacctgttcctgcagagatgcctggccagactgagaggcagcgacagacagctgccccaggtgctgcacatgagcgagctgctgaacagaggcctgggcgtgcaccacagcggcatcctgcccatcctgaaggagatcgtggagatgctgttcagcagaggcctggtgaaggtgctgttcgccaccgagaccttcgccatgggcgtgaacatgcccgccagaaccgtggtgttcgacagcatgagaaagcacgacggcagcaccttcagagacctgctgcccggcgagtacgtgcagatggccggcagagccggcagaagaggcctggaccccaccggcaccgtgatcctgctgtgcaagggcagagtgcccgagatggccgacctgcacagaatgatgatgggcaagcccagccagctgcagagccagttcagactgacctacaccatgatcctgaacctgctgagagtggacgccctgagagtggaggacatgatgaagagaagcttcagcgagttccccagcagaaaggacagcaaggcccacgagcaggccctggccgagctgaccaagagactgggcgccctggaggagcccgacatgaccggccagctggtggacctgcccgagtactacagctggggcgaggagctgaccgagacccagcacatgatccagagaagaatcatggagagcgtgaacggcctgaagagcctgagcgccggcagagtggtggtggtgaagaaccaggagcaccacaacgccctgggcgtgatcctgcaggtgagcagcaacagcaccagcagagtgttcaccaccctggtgctgtgcgacaagcccctgagccaggacccccaggacagaggccccgccaccgccgaggtgccctaccccgacgacctggtgggcttcaagctgttcctgcccgagggcccctgcgaccacaccgtggtgaagctgcagcccggcgacatggccgccatcaccaccaaggtgctgagagtgaacggcgagaagatcctggaggacttcagcaagagacagcagcccaagttcaagaaggacccccccctggccgccgtgaccaccgccgtgcaggagctgctgagactggcccaggcccaccccgccggcccccccaccctggaccccgtgaacgacctgcagctgaaggacatgagcgtggtggagggcggcctgagagccagaaagctggaggagctgatccagggcgcccagtgcgtgcacagccccagattccccgcccagtacctgaagctgagagagagaatgcagatccagaaggagatggagagactgagattcctgctgagcgaccagagcctgctgctgctgcccgagtaccaccagagagtggaggtgctgagaaccctgggctacgtggacgaggccggcaccgtgaagctggccggcagagtggcctgcgccatgagcagccacgagctgctgctgaccgagctgatgttcgacaacgccctgagcaccctgagacccgaggagatcgccgccctgctgagcggcctggtgtgccagagccccggcgacgccggcgaccagctgcccaacaccctgaagcagggcatcgagagagtgagagccgtggccaagagaatcggcgaggtgcaggtggcctgcggcctgaaccagaccgtggaggagttcgtgggcgagctgaacttcggcctggtggaggtggtgtacgagtgggccagaggcatgcccttcagcgagctggccggcctgagcggcacccccgagggcctggtggtgagatgcatccagagactggccgagatgtgcagaagcctgagaggcgccgccagactggtgggcgagcccgtgctgggcgccaagatggagaccgccgccaccctgctgagaagagacatcgtgttcgccgccagcctgtacacccagtag

SEQ ID NO: 169177 - DNA, 3162 bp, Artificial Sequence
  derived and/or modified sequence
atggacttcgcccccaaggactgccccacccccgcccccggcctgctgagcctgagctgcctgctggagcccctggacctgggcggcggcgacgaggacgagaacgaggccgtgggccagcccggcggccccagaggcgacaccgtgagcgccagcccctgcagcgcccccctggccagagccagcagcctggaggacctggtgctgaaggaggccagcaccgccgtgagcacccccgaggcccccgagccccccagccaggagcagtgggccatccccgtggacgccaccagccccgtgggcgacttctacagactgatcccccagcccgccttccagtgggccttcgagcccgacgtgttccagaagcaggccatcctgcacctggagagacacgacagcgtgttcgtggccgcccacaccagcgccggcaagaccgtggtggccgagtacgccatcgccctggcccagaagcacatgaccagaaccatctacaccagccccatcaaggccctgagcaaccagaagttcagagacttcagaaacaccttcggcgacgtgggcctgctgaccggcgacgtgcagctgcaccccgaggccagctgcctgatcatgaccaccgagatcctgagaagcatgctgtacagcggcagcgacgtgatcagagacctggagtgggtgatcttcgacgaggtgcactacatcaacgacgtggagagaggcgtggtgtgggaggaggtgctgatcatgctgcccgaccacgtgagcatcatcctgctgagcgccaccgtgcccaacgccctggagttcgccgactggatcggcagactgaagagaagacagatctacgtgatcagcaccgtgaccagacccgtgcccctggagcactacctgttcaccggcaacagcagcaagacccagggcgagctgttcctgctgctggacagcagaggcgccttccacaccaagggctactacgccgccgtggaggccaagaaggagagaatgagcaagcacgcccagaccttcggcgccaagcagcccacccaccagggcggccccgcccaggacagaggcgtgtacctgagcctgctggccagcctgagaaccagagcccagctgcccgtggtggtgttcaccttcagcagaggcagatgcgacgagcaggccagcggcctgaccagcctggacctgaccaccagcagcgagaagagcgagatccacctgttcctgcagagatgcctggccagactgagaggcagcgacagacagctgccccaggtgctgcacatgagcgagctgctgaacagaggcctgggcgtgcaccacagcggcatcctgcccatcctgaaggagatcgtggagatgctgttcagcagaggcctggtgaaggtgctgttcgccaccgagaccttcgccatgggcgtgaacatgcccgccagaaccgtggtgttcgacagcatgagaaagcacgacggcagcaccttcagagacctgctgcccggcgagtacgtgcagatggccggcagagccggcagaagaggcctggaccccaccggcaccgtgatcctgctgtgcaagggcagagtgcccgagatggccgacctgcacagaatgatgatgggcaagcccagccagctgcagagccagttcagactgacctacaccatgatcctgaacctgctgagagtggacgccctgagagtggaggacatgatgaagagaagcttcagcgagttccccagcagaaaggacagcaaggcccacgagcaggccctggccgagctgaccaagagactgggcgccctggaggagcccgacatgaccggccagctggtggacctgcccgagtactacagctggggcgaggagctgaccgagacccagcacatgatccagagaagaatcatggagagcgtgaacggcctgaagagcctgagcgccggcagagtggtggtggtgaagaaccaggagcaccacaacgccctgggcgtgatcctgcaggtgagcagcaacagcaccagcagagtgttcaccaccctggtgctgtgcgacaagcccctgagccaggacccccaggacagaggccccgccaccgccgaggtgccctaccccgacgacctggtgggcttcaagctgttcctgcccgagggcccctgcgaccacaccgtggtgaagctgcagcccggcgacatggccgccatcaccaccaaggtgctgagagtgaacggcgagaagatcctggaggacttcagcaagagacagcagcccaagttcaagaaggacccccccctggccgccgtgaccaccgccgtgcaggagctgctgagactggcccaggcccaccccgccggcccccccaccctggaccccgtgaacgacctgcagctgaaggacatgagcgtggtggagggcggcctgagagccagaaagctggaggagctgatccagggcgcccagtgcgtgcacagccccagattccccgcccagtacctgaagctgagagagagaatgcagatccagaaggagatggagagactgagattcctgctgagcgaccagagcctgctgctgctgcccgagtaccaccagagagtggaggtgctgagaaccctgggctacgtggacgaggccggcaccgtgaagctggccggcagagtggcctgcgccatgagcagccacgagctgctgctgaccgagctgatgttcgacaacgccctgagcaccctgagacccgaggagatcgccgccctgctgagcggcctggtgtgccagagccccggcgacgccggcgaccagctgcccaacaccctgaagcagggcatcgagagagtgagagccgtggccaagagaatcggcgaggtgcaggtggcctgcggcctgaaccagaccgtggaggagttcgtgggcgagctgaacttcggcctggtggaggtggtgtacgagtgggccagaggcatgcccttcagcgagctggccggcctgagcggcacccccgagggcctggtggtgagatgcatccagagactggccgagatgtgcagaagcctgagaggcgccgccagactggtgggcgagcccgtgctgggcgccaagatggagaccgccgccaccctgctgagaagagacatcgtgttcgccgccagcctgtacacccagtag

SEQ ID NO: 169178 - DNA, 2643 bp, Artificial Sequence
  derived and/or modified sequence
atgatggagaccgagagactggtgctgcccccccccgaccccctggacctgcccctgagagccgtggagctgggctgcaccggccactgggagctgctgaacctgcccggcgcccccgagagcagcctgccccacggcctgcccccctgcgcccccgacctgcagcaggaggccgagcagctgttcctgagcagccccgcctggctgcccctgcacggcgtggagcacagcgccagaaagtggcagagaaagaccgacccctggagcctgctggccgtgctgggcgcccccgtgcccagcgacctgcaggcccagagacaccccaccaccggccagatcctgggctacaaggaggtgctgctggagcactacctgttcaccggcaacagcagcaagacccagggcgagctgttcctgctgctggacagcagaggcgccttccacaccaagggctactacgccgccgtggaggccaagaaggagagaatgagcaagcacgcccagaccttcggcgccaagcagcccacccaccagggcggccccgcccaggacagaggcgtgtacctgagcctgctggccagcctgagaaccagagcccagctgcccgtggtggtgttcaccttcagcagaggcagatgcgacgagcaggccagcggcctgaccagcctggacctgaccaccagcagcgagaagagcgagatccacctgttcctgcagagatgcctggccagactgagaggcagcgacagacagctgccccaggtgctgcacatgagcgagctgctgaacagaggcctgggcgtgcaccacagcggcatcctgcccatcctgaaggagatcgtggagatgctgttcagcagaggcctggtgaaggtgctgttcgccaccgagaccttcgccatgggcgtgaacatgcccgccagaaccgtggtgttcgacagcatgagaaagcacgacggcagcaccttcagagacctgctgcccggcgagtacgtgcagatggccggcagagccggcagaagaggcctggaccccaccggcaccgtgatcctgctgtgcaagggcagagtgcccgagatggccgacctgcacagaatgatgatgggcaagcccagccagctgcagagccagttcagactgacctacaccatgatcctgaacctgctgagagtggacgccctgagagtggaggacatgatgaagagaagcttcagcgagttccccagcagaaaggacagcaaggcccacgagcaggccctggccgagctgaccaagagactgggcgccctggaggagcccgacatgaccggccagctggtggacctgcccgagtactacagctggggcgaggagctgaccgagacccagcacatgatccagagaagaatcatggagagcgtgaacggcctgaagagcctgagcgccggcagagtggtggtggtgaagaaccaggagcaccacaacgccctgggcgtgatcctgcaggtgagcagcaacagcaccagcagagtgttcaccaccctggtgctgtgcgacaagcccctgagccaggacccccaggacagaggccccgccaccgccgaggtgccctaccccgacgacctggtgggcttcaagctgttcctgcccgagggcccctgcgaccacaccgtggtgaagctgcagcccggcgacatggccgccatcaccaccaaggtgctgagagtgaacggcgagaagatcctggaggacttcagcaagagacagcagcccaagttcaagaaggacccccccctggccgccgtgaccaccgccgtgcaggagctgctgagactggcccaggcccaccccgccggcccccccaccctggaccccgtgaacgacctgcagctgaaggacatgagcgtggtggagggcggcctgagagccagaaagctggaggagctgatccagggcgcccagtgcgtgcacagccccagattccccgcccagtacctgaagctgagagagagaatgcagatccagaaggagatggagagactgagattcctgctgagcgaccagagcctgctgctgctgcccgagtaccaccagagagtggaggtgctgagaaccctgggctacgtggacgaggccggcaccgtgaagctggccggcagagtggcctgcgccatgagcagccacgagctgctgctgaccgagctgatgttcgacaacgccctgagcaccctgagacccgaggagatcgccgccctgctgagcggcctggtgtgccagagccccggcgacgccggcgaccagctgcccaacaccctgaagcagggcatcgagagagtgagagccgtggccaagagaatcggcgaggtgcaggtggcctgcggcctgaaccagaccgtggaggagttcgtgggcgagctgaacttcggcctggtggaggtggtgtacgagtgggccagaggcatgcccttcagcgagctggccggcctgagcggcacccccgagggcctggtggtgagatgcatccagagactggccgagatgtgcagaagcctgagaggcgccgccagactggtgggcgagcccgtgctgggcgccaagatggagaccgccgccaccctgctgagaagagacatcgtgttcgccgccagcctgtacacccagtag

SEQ ID NO: 169179 - DNA, 3741 bp, Artificial Sequence
  derived and/or modified sequence
atgatggagaccgaacggctcgtgctcccccctcctgaccccttagatctgcctctacgggctgtagagcttgggtgcaccggacattgggaactattgaatctccccggagccccagagagcagcctgccacatggcttgcccccttgtgcgcccgacctacagcaggaagcagagcagctgttcctctcttctccggcatggctgcctctacatggagttgagcactcggcccgaaagtggcagcgcaaaaccgacccatggtccctgttagccgtgttgggggcgcccgtaccctcagatctgcaggcacagcggcaccccaccaccggacaaatattaggctacaaagaggttctgctggaaaacaccaaccttagcgccaccacctcattatccctgaggcgcccgcctggcccggcttcacagagcctgtgggggaacccaacccagtacccattctggccaggggggatggacgaaccaacaatcacagacctcaacacacgggaggaggcagaggaggagattgattttgaaaaggacttgctcacaatcccacctggatttaagaaggggatggacttcgccccaaaggattgccccacaccagcacccgggctgcttagtctgtcttgtatgctcgagccactagatctgggcggcggagacgaggacgagaacgaagcagtagggcaaccgggcggtccacgcggggatactgtcagcgcctcgccttgcagcgcaccattggccagagcatcaagtttggaggatctggtgctcaaggaagcaagcactgctgtttccacacctgaggcccctgagcctccctcacaggagcagtgggccatcccagtagacgctacgtctcctgtcggtgatttttacaggctgataccccagcctgcttttcagtgggcctttgaacctgatgtttttcagaagcaagcaattctgcacctggagaggcacgattccgtctttgtggcagcacacaccagtgccggcaaaaccgtggtggccgaatacgctattgccttggcccagaaacatatgacaagaaccatatacactagtccgattaaggccctttccaaccaaaagttccgggactttcgcaatacattcggcgatgtgggtttgctcaccggcgacgtgcagcttcatcctgaagcatcatgcttaatcatgaccaccgaaatcctccggagcatgctctactcaggaagtgacgtgattagagacctcgaatgggtcattttcgacgaagtgcattatatcaatgacgtcgaacgaggagtcgtgtgggaggaagtgctcatcatgctgcccgatcacgtgagcatcatactcctgtcagctactgtgccgaatgctcttgagttcgcagattggatcggccggctcaaacgccggcaaatttacgtgatctcgacagtgactaggcctgtgccccttgagcactacttattcacaggcaactctagtaagacccagggggagctgtttttactgctagacagcaggggtgcgtttcacacaaaaggttattatgcagcagttgaggctaaaaaagagcgcatgtcaaagcacgctcagaccttcggcgccaaacaaccaacgcaccagggcggcccagcgcaggaccgcggagtctacttatccctgctcgccagtctcaggacccgagcacaacttccagttgtggtgttcaccttctctagaggccggtgcgatgagcaggcatccggactcactagtttagacttgactaccagctccgagaagtcagagattcacctttttctccagcgttgcctggctaggttacgtggctctgatcgacagttaccacaggtgctccacatgagcgagctcctcaaccggggcctcggggtgcatcatagcggtattttgcctatactcaaggaaattgtcgagatgctgttttctcgtggtctggtgaaagtactatttgcgacggaaacttttgcaatgggagtgaacatgcccgcccgaaccgtcgtgttcgactccatgcgcaagcacgacgggtctacgtttcgggacttgttgcctggggaatatgtgcaaatggctggacgggctggccgacggggcctggacccgaccggaactgtaatactgctatgcaagggccgggtgccagagatggcggacctgcataggatgatgatgggcaagcctagccagttacagtcccagttccgtctgacctacacaatgattcttaatctgttacgcgtagacgcactccgcgtcgaagacatgatgaagcggtctttcagtgaattcccctctcggaaagactctaaggcacacgaacaggcactagcggaactcaccaaaaggttaggagccctcgaggagcctgacatgaccggacaactcgttgatctgcctgagtactactcttggggcgaagagctgaccgaaacacagcatatgattcagaggcggataatggaatctgtaaatgggctgaagtctttgtcagctggcagagtcgttgtagtgaagaaccaggaacaccacaacgccttgggagtcattctgcaagtaagctcgaactccacctctagagtgtttacaaccctcgtgttatgcgacaagccattgtcccaggatccccaggaccggggacccgccactgccgaagttccataccctgacgacctggtcgggttcaaactgttcctgcctgaggggccctgcgaccacaccgtggtgaaactccagcctggagacatggccgctatcacgaccaaggtgctacgcgttaacggcgaaaagattctggaggacttctctaaaagacagcagcctaaattcaagaaggacccgcctttggcagctgtgacaaccgccgtgcaagagcttctccgactagcacaggcccatcccgcaggccccccaaccctggaccccgtgaatgacctacagctgaaagacatgtcagtggttgaggggggccttagagctcgaaagttagaagaattgattcagggagcccagtgtgtgcattcccctagattcccagcacagtatctgaagctgagggagaggatgcaaatccagaaagaaatggagcgcctgcgattcctgctgtctgaccagagtctgctgcttctgccggagtaccatcagagggtcgaggtgcttcggacactaggctatgtcgatgaagccgggacggtgaaactcgccggccgggtagcatgcgccatgagctctcacgaattgctgctgactgaattgatgttcgacaatgccctgagtactctgcggcccgaagagatagcggcattattgtcagggctggtgtgtcaatctccaggagacgccggcgaccagctcccaaataccctgaaacaaggcatcgagagggttcgagccgtagccaagcgtataggcgaggttcaggtggcatgtggtttgaatcagaccgtggaagaattcgtcggcgaactgaacttcggcctagtggaagtggtctacgagtgggcgcggggaatgcctttctccgagctggctggactgtctgggactcctgagggactggttgttcggtgcatacagcggcttgcagaaatgtgccggtccctacgcggtgccgctcggctggtcggggagcctgtcctgggtgctaaaatggaaacagctgccacactgctccgccgtgatatagtctttgccgcttcgttatacacccagtag

SEQ ID NO: 169180 - DNA, 3741 bp, Artificial Sequence
  derived and/or modified sequence
atgatggaaactgaacggctcgtcctgcctccgcccgaccccctagatttaccattgagagcagtggagctcggatgtacaggccattgggaactgctgaatctgcccggcgctcccgaatcatcactgccacacggactccccccatgcgctcccgatcttcagcaagaagccgaacaactttttctctcttctccggcttggcttcctctgcacggcgtggagcacagtgcccgtaagtggcagcgcaagaccgatccatggagtctgctggctgtcttaggcgcacccgtgccctctgacctacaggctcagcgccacccaaccactggacaaatcctcgggtacaaagaggtgctcctcgagaatacaaatctgagcgccacaacctccctctctctgcggagaccgccaggccccgcgtcccagtcattatggggcaaccctactcagtatcccttctggccaggcggcatggatgaacccacgataaccgacctgaacacaagggaggaagctgaagaagagatcgatttcgaaaaagatttgctgaccatccctcctggctttaagaaaggaatggatttcgcacctaaggattgccccactccagcacccggcctcctctcgctaagctgtctgctcgaacccttggatctgggcggcggcgatgaggatgagaacgaggccgtagggcagcccggcggtcccaggggggatactgtatcagctagcccctgctctgctcccctggcccgcgcctcatcactcgaggatctcgtgttaaaggaagccagcacagcagtgtcaacaccagaggcgcctgagcctccgagccaggagcagtgggctattcctgtggacgccacgtccccagtgggagacttctacagattaatcccccagcctgcattccagtgggctttcgaaccagacgtgttccaaaagcaggcaatcctccatttggagaggcatgattcggttttcgtagctgcccacacctctgccggcaagacagtcgtggccgaatatgcaatagcactcgctcagaagcacatgactcgtaccatttatacaagcccaatcaaggcactgtccaatcagaagttcagagatttccgcaatactttcggggatgtgggcctcctgaccggagacgtgcaactgcaccccgaagccagttgtctgattatgacaacagagatcttacggagcatgctctactccggttcggatgtgataagagacctggagtgggtcatttttgatgaagtgcattacatcaacgacgtcgagcgtggcgtggtttgggaggaggtcctgatcatgctccctgaccacgtgtccatcatactcctaagcgccacggtgccaaacgccctggagttcgctgactggattggacgactcaagcgccgccagatctatgtcatcagtacagtgacaagaccagtgcccctcgagcactaccttttcaccggcaattcctcgaaaacccagggagaactcttcctgctactggattctcgaggcgcttttcacactaaaggctactatgccgcggtggaggctaaaaaggaacgcatgtcaaagcacgcccagacatttggagccaaacagcctacccaccagggcggacctgctcaagaccgcggagtgtacctttctttattagcctcgctccgaacgagagcccagctgccagttgtggtgttcactttcagtcggggcagatgcgatgagcaggcctccggtctcacgagcttagacttgacgactagttcggagaaatctgagatccatttgtttttgcaaagatgtcttgctagattgcgggggagtgatcgacagctgcctcaggttttgcacatgtctgagttgttgaatcggggcctgggagtgcaccattcaggaatcctgcctattctgaaagagattgtggagatgctgttctcccggggcctcgtgaaagtgctattcgcaacagaaacgtttgctatgggcgtgaacatgccagcaaggacagtagtgtttgactccatgcgcaagcacgatggcagcacattcagagatttactgcctggtgagtatgtgcagatggccggacgggcaggtagacgggggctcgacccaacgggcacagtgatcctgttgtgcaagggccgcgtgccagagatggcggatctgcatcgcatgatgatgggaaaaccctctcagctccagtcgcagttccgcttgacttacacaatgatccttaacctgctgcgggtggatgctctgagagtggaggatatgatgaagcgttcttttagtgagtttccctcccgcaaggactctaaagcccacgagcaggccctcgccgagctgaccaaacggctcggagcactcgaggagcctgatatgaccggacagctggttgacctaccagagtactacagctggggggaggaactcactgagactcagcacatgattcagagacggatcatggagtcagtgaacggcctaaaaagcttgtcggcaggcagagtggtggtggtgaaaaatcaggagcaccataatgcactcggtgtaatcctgcaagtgagtagtaattccacatccagagtttttaccacgctggtgctatgtgacaaacccctgtctcaagatccccaggacagggggcctgcaactgcagaggtgccctatcccgatgacctggtcggattcaagttatttcttcccgagggtccgtgcgatcacacggttgtgaaactgcagccaggcgatatggctgctatcactactaaagtgttgcgagtgaacggagaaaagatcttagaagatttttccaaacggcaacagcccaagtttaagaaggatccaccactagccgcagttaccacggccgtgcaggaattgctcagactcgcccaggcccacccagctgggcctcctacgcttgacccagtgaacgatctgcagttgaaggacatgagtgtggtcgaaggtggactgagggcccgtaagctggaagaactgattcagggcgcccagtgtgttcacagtccaagatttccagctcagtacctgaaactcagggaacgcatgcagatccaaaaggagatggaacgactgcggttcctgctgtcagatcagagcctcttgctgctcccagagtaccaccagagggtggaagtgctccgaaccttggggtacgtagatgaagcagggaccgtaaagctcgccgggcgagttgcctgcgccatgagttcacacgaacttttgctgactgaactgatgttcgacaatgctcttagcactctgcgcccagaagaaatcgccgcgctgctgtcaggcctggtgtgtcaatcacccggcgatgccggtgaccagctgccaaacacccttaaacagggtattgaacgcgtaagagccgtagcaaaacgcattggtgaggtgcaagtggcctgtggcttgaatcagactgtggaggagtttgtgggagagttgaacttcggactcgttgaggtagtctacgagtgggcccgtggcatgcccttctccgaacttgctggcctgtcaggaaccccagaaggactggtggtgagatgtatacaacgcctggcggagatgtgcaggtcgttgcgaggagcagcccgcctggttggagaaccagtgctaggcgcaaaaatggagacagctgcgacactgttgcgccgcgacatcgtctttgctgcatccctatacactcagtag

SEQ ID NO: 169181 - DNA, 3741 bp, Artificial Sequence
  derived and/or modified sequence
atgatggaaactgagagattagtccttccacccccagatccactcgacctgccgcttcgggccgtagaactgggatgcaccggccactgggagctgctgaacctgcctggggcacctgagagttcgcttccgcacggactacccccctgtgcaccagatctacagcaggaagccgagcagttgtttttatcctccccagcttggttgcccctgcacggcgtcgaacacagcgcaaggaagtggcagaggaagaccgatccctggagcctgctggcagttctgggggcacctgtgccgtcggacctgcaggctcaacgccaccctacgaccggtcagattctgggctataaagaggtcctgctagaaaacaccaatcttagcgccacaacaagcctgagccttagacgacccccaggacctgctagtcagagcctttggggcaatccgactcagtaccccttttggccaggtgggatggatgagcccactattaccgacctgaacacaagagaggaggccgaggaagaaatcgacttcgagaaagacctcctgacaatcccaccgggtttcaaaaagggcatggacttcgctcctaaagactgcccgacccccgcaccaggactgctctcgctgagctgcctgcttgagccattggacctgggtggtggcgatgaggatgagaacgaagctgttggccagccaggtggaccaaggggagatactgtcagcgcttccccttgtagtgctccccttgccagagcaagctctctggaagaccttgtgttgaaagaagcaagtaccgcagttagcaccccagaggcgcccgagcccccctctcaggaacagtgggccattcctgtcgacgccactagtcccgtaggggacttttataggcttatacctcagcctgccttccagtgggcgtttgagccagacgtgttccagaaacaggccatcctgcatctggagcgtcacgacagcgtctttgtcgccgcgcacaccagcgccgggaagacagtggtcgctgagtacgctatcgcattggcacagaagcatatgacacgcactatctacacatcccccatcaaggcattgtcaaatcaaaaatttcgcgatttcaggaacacctttggcgatgtcggtctgttgacaggtgacgtacagctccacccagaagcctcctgcctcattatgactacggagattttgcgctctatgctttacagcggcagcgatgtcatacgcgaccttgaatgggtcatttttgacgaagttcactatatcaatgacgtggagaggggggtagtctgggaggaagtgctcattatgctgcctgaccacgttagtatcattctcctgagcgctacagtccccaatgcgctcgagtttgcggactggattgggcggctgaagagaagacagatatatgtgataagcacagtgacccgaccagtgccactggaacactatctgttcaccgggaactcgagtaagacccagggagaactcttcctgctgctcgactctcgcggggccttccataccaagggatattacgcagccgtggaggctaagaaggagagaatgagcaaacacgcacagacattcggggccaagcagccaacacatcagggggggcctgcccaggaccgcggcgtttacttatctttgcttgccagtctccggactagggcccaattgcctgtcgttgtgtttacgttcagcagaggtagatgcgatgagcaggctagcggtctcacatccctggatcttaccactagctcagagaaatcagagattcatctgttccttcagaggtgtctggcacggcttcggggcagcgatcggcaactgccacaggtgttgcatatgagcgagttgctgaaccgcggcctcggggtgcaccatagcggaatactgcccatcctcaaggagatcgtggaaatgttgttcagtaggggtcttgtgaaagtgctgtttgcaacggaaaccttcgccatgggcgtcaacatgccagcccgcacagtcgtcttcgattccatgaggaagcacgacggatccaccttccgtgacctcttaccgggcgaatacgttcagatggccggtcgcgccggacgacggggcttggaccccactggtactgtgattctgttgtgtaagggacgggtgccagagatggccgacctgcaccggatgatgatgggtaaacctagtcagctgcagtcccaattccgcttaacctatacaatgattttgaacttgctccgggtggatgctttgcgtgttgaggacatgatgaagcgctctttttctgaattcccttcacgcaaggattccaaagctcatgagcaggcactggccgagctaactaaaagactgggagctctcgaagaacccgacatgactggtcagctagtggacctgcctgaatactacagctggggtgaagagctgaccgaaacccagcatatgatccaacggagaatcatggagtccgtcaacggcctcaaaagtttgtccgctgggcgggtagtcgtggtcaagaaccaagagcatcataacgctctcggcgtcattctccaggtgtctagtaattctaccagtagagtgttcacaactctcgtgctctgtgacaagccactatcccaagatcctcaggatcgcggtcccgctactgccgaggtcccttatcctgatgaccttgtggggtttaagctgttcctgcctgaggggccttgtgatcatacagtggtcaaactccagccaggggacatggccgctataactaccaaagtgcttcgagtgaatggggagaagatcctagaagacttctctaagaggcagcagccaaagttcaagaaggacccgcccctagcagcagtgaccacggcagtgcaggagctgctgaggctggctcaggcacatccagccggacccccgactctggatcccgtgaatgacctgcagctcaaggatatgtccgtggtcgagggtggcctaagagccaggaaactggaggagttgatccagggagcccagtgcgtgcacagtccacggtttcccgctcaatatcttaagttaagagagaggatgcagattcagaaagagatggaacgccttcgtttcctattgtccgaccagtctcttctgctcctcccagagtatcatcaacgggtggaggtactgaggaccttgggatatgtcgatgaggccgggaccgtaaagctagcaggtcgggtagcctgtgccatgtcatcccatgaacttctgctcactgagctgatgttcgacaatgctctctccacactacggcccgaagagattgcagccctcctatctggacttgtgtgtcagagcccaggcgatgccggtgaccaactgccaaacacgctcaagcagggtatcgagagagtcagagcggtggccaagcgtatcggcgaggtccaggtggcctgtggcctgaatcagaccgttgaagagtttgtgggcgaactcaactttggcctggtggaggttgtatacgagtgggccagaggcatgcccttctccgagttagccggtctgagcggaaccccggaaggacttgtcgtgaggtgcattcaacggttagcagaaatgtgcagaagcctgcgtggtgccgcccgcctggtgggggagccagtcctcggagcgaaaatggagaccgctgccaccctgctgagaagggatatagtattcgccgcttcgctgtatacgcagtag

SEQ ID NO: 169182 - DNA, 3741 bp, Artificial Sequence
  derived and/or modified sequence
atgatggaaacagagaggctagtgctcccaccacccgaccctctcgacttgccactacgcgcagtcgagttgggctgcaccggtcattgggagttactgaatctcccgggagctcccgagtcgtccctgcctcacgggcttcccccctgtgcccctgatcttcagcaggaggccgagcagcttttcctgagtagccctgcttggctgcctctgcacggagttgagcacagtgcccgtaagtggcaacggaagactgacccctggtcactgctcgccgttttgggagctccggtgccctcggatttgcaggcgcagcgccatcccacaaccgggcagatactaggatacaaagaggtgttgctggagaatacaaatctgtccgccacaactagtctgtctctcagacggccccccgggcctgcctcacagtccctatggggaaaccccacgcagtacccattctggcccggcggcatggacgaacctaccataaccgatttaaatacacgcgaagaggccgaggaagaaattgattttgagaaagacctactaacaatcccccctgggtttaagaagggtatggactttgcccccaaggactgccccactcccgcacccggcctactgtccctgtcctgtctgctcgaaccgttggatctggggggcggcgatgaggatgagaatgaggcagtgggtcagcctggaggtccccggggagacacggtctctgcttccccatgtagcgccccactggcaagggccagttcacttgaggacctggtgctcaaagaggccagtactgccgtctccacccccgaagcacccgaaccacccagccaggagcagtgggctatcccagtggacgctacttcccctgtcggcgatttttacagactaatcccacagccggctttccagtgggcgttcgagcctgacgtctttcagaagcaggctatcttgcaccttgaacggcacgacagtgtatttgtcgccgcccatacctctgcaggaaaaaccgtggtggccgaatatgcgatcgctctagcacagaaacatatgacaagaactatctacacctcccccatcaaggccctgtctaatcaaaagtttagggacttccggaacacattcggcgacgtaggcctgctgacgggcgacgtccagctgcacccggaggcaagttgcctcatcatgacaacggagatcctaagatctatgctgtactctggatctgatgtaattcgcgatctggagtgggtaatattcgatgaagtgcactatattaatgatgtcgagagaggtgtggtttgggaagaggtcctgatcatgctgccagatcatgtctcaatcattctactgtccgccacggtgcccaacgctctggagtttgccgactggatcggcagactcaaaaggcggcaaatatatgtgatctccaccgtgacaaggcctgtgcccttggaacactatctttttacgggtaatagcagtaaaacccagggagagctcttcctgctgcttgatagccgcggagcgttccataccaagggatactacgctgcggttgaggcaaaaaaagagaggatgagcaagcacgctcagaccttcggggctaagcaacctacccatcaaggcggtccagctcaggatcggggggtgtatcttagcctccttgcctccttgcggacacgggctcagctacccgtggttgtgttcactttctctcggggtcgctgcgacgaacaggcatccggactcacctcactcgatctgaccacatcaagcgaaaagagtgagattcatctgtttctacagcgctgcctggcgcgactgcgcggcagcgaccgacagcttcctcaggttctgcatatgtcagaattgttgaatcggggattgggtgtacaccacagtggaatcctccctatcctaaaagaaattgtggaaatgctgttttcaagagggcttgtaaaggtcctttttgccacggaaacatttgccatgggagttaatatgcctgccaggacagtggtgttcgactccatgcggaagcatgacggtagtacattccgagatctgttacctggagaatatgttcaaatggctgggcgggccggtcgccgcgggttggatccaacaggcactgtgatcctcctctgcaaaggacgcgtcccagagatggcagatcttcatcgtatgatgatggggaaaccctctcagctgcaaagccagttccgcctaacctatacgatgattctgaatctgttacgggtcgatgctctcagagttgaggacatgatgaaacgatccttcagtgaatttcccagtcgaaaggactccaaagcccacgagcaggcccttgcagagctcaccaagcgcttaggcgcactcgaggaaccggatatgaccggacagctggtcgacctgccagaatattattcatggggtgaggagctcacggagacacaacacatgatccagcgacgaatcatggaatccgtgaacggactgaagagtttatccgccgggcgtgtggtcgtggtgaagaaccaggaacaccataacgctttgggagttattttacaagtttcatcaaacagcacatctcgagtgtttacaacacttgttttgtgcgacaagcctctgagccaagatccccaggacagaggccctgcaactgcagaggtcccctatccagatgatctggttggcttcaaactgttcctgccggaggggccttgtgaccataccgtggtcaaacttcaaccaggagatatggccgcgatcactacaaaagttttgagggtcaacggcgagaaaattcttgaggacttctccaaacgacaacagcccaaattcaagaaggacccaccgcttgcagctgtaaccaccgccgtgcaggaacttttaaggctggcccaggcgcaccctgcaggaccaccaacactggatcccgtaaacgatctccaactgaaggatatgagcgtagtcgagggtggactgcgagccagaaaattggaagaactgatacagggcgcccagtgtgttcacagtccacggttcccagcacagtatctgaagcttcgtgaaaggatgcagatccagaaagagatggaacgcctgaggttcctactctctgaccaaagcttgctgctgttgcctgaataccaccagcgggttgaggttttgagaacactagggtacgtggacgaagcaggcaccgtcaaactggccggtcgggttgcctgtgcaatgagctctcacgaactattgctcacagaattgatgttcgacaatgccttgtccaccctgaggccagaggagatcgccgctctactcagcggcctggtgtgtcaaagccctggagatgccggcgatcagttgccaaacactctgaagcagggcattgaacgcgtgcgcgccgtggccaagcgaatcggagaggtgcaagtcgcgtgtggacttaatcagactgtcgaggagtttgtgggagaactcaatttcggcctcgtcgaggtggtgtatgaatgggcgcgggggatgcccttctctgagctcgctggcctgtcaggtacgcctgaggggctcgtggtgcgttgtattcagcgactggctgaaatgtgcagatcactgagaggggcagctcgcctggtcggagaaccggttctgggagcgaaaatggaaacagccgccacactgctgagacgtgacattgtgtttgcagcttcactgtatactcagtag

SEQ ID NO: 169183 - DNA, 3741 bp, Artificial Sequence
  derived and/or modified sequence
atgatggagactgagcggcttgtccttcccccacccgacccacttgatctgcccctcagagcagtggagctgggatgcaccggacactgggaactgttgaacctgcccggggcccccgaatctagcctgcctcacgggttaccaccatgcgcccctgacctccagcaggaggccgagcaactctttctcagctctcctgcttggctgccgttacacggggtggaacatagtgcaagaaagtggcagcgaaaaacagatccttggagtcttctcgccgttttgggcgctccggtcccaagcgacctgcaggcccaacggcatccaacaactgggcagatcctgggctacaaagaagtcctcttagaaaacacaaacctctccgccactacaagcctgagtctgagaaggcctcctggacctgccagtcagtccctctggggaaatcctacccagtaccctttctggcccggaggcatggatgaacccactataaccgacttgaatactagggaggaagccgaggaagagatcgactttgaaaaggacttgctgacaattccccccggcttcaagaaaggcatggatttcgcacctaaggattgcccgacacccgcacccggactgctgtctttgtcctgcttattagagcccctggatctggggggcggcgacgaagatgaaaatgaagccgtggggcagcccggaggccctcggggtgacaccgtgtccgctagtccgtgtagcgcacctctggcaagggctagttcacttgaggatctagtcttaaaggaagcctctaccgccgtgtcaactcctgaggctcccgagccacccagtcaggaacaatgggcaatacccgttgacgcgactagcccagttggagatttttacagactgatcccgcaacccgctttccaatgggccttcgaacctgatgtcttccagaaacaggcgattttgcacttggaaagacacgactcagtttttgtcgccgcccacacaagcgctggcaagacagtggtggcggagtatgcaatagctctcgcccaaaaacacatgacacgtaccatttacacaagtccaatcaaagctctctccaaccagaaattccgagactttcgcaatacatttggggacgtcggtctcctcaccggagatgtgcagctgcaccccgaggctagctgtctgatcatgacgaccgagatcctcagatcgatgctgtatagcggttctgatgtgatccgcgacctggagtgggtgatctttgatgaagtgcactatataaacgatgtggaacgcggagtcgtctgggaagaggtgctcatcatgcttcccgatcacgtgagtattatcttactgtccgcaacagtgccaaacgctttggaattcgcggactggattgggcgcctgaagaggcggcagatatacgtgatctccaccgtcacaagacccgtgcccctcgagcattacctgtttacgggaaattcgtctaagacccaaggggagctctttctgttgttggatagtcggggcgcttttcacaccaaagggtactacgctgccgtggaggcaaaaaaggagaggatgagtaaacacgctcagacttttggtgctaagcaaccgacacaccagggcggaccagcacaggaccgtggggtgtatctttcgctgcttgcttcgctgcggactcgtgcgcagctgccagtcgtggtgttcacattttctcgagggcgatgcgatgagcaagcaagcggtctcacctcgctagatctgacaacttcttccgagaaatctgagatccacctcttcttgcagcgatgcctggcccgccttagaggcagtgaccggcagctaccacaagtgcttcatatgtcagaacttctcaatcggggcctaggcgtccaccactctggcattcttcccatcctcaaggaaatcgtggaaatgctgttctctcgaggactagttaaggtgcttttcgccaccgaaactttcgctatgggcgtgaatatgcctgcccggaccgtggtgtttgatagcatgcgaaagcacgacggcagtacattccgggatttgctgccgggagagtacgtccagatggcgggccgcgccggaagacgcggacttgacccgacgggtacagttattctcttgtgtaagggtcgcgtaccagagatggctgacctacatcggatgatgatgggcaagcctagccaattacagtcccagttcaggcttacttacacaatgatcctaaacctattgcgtgtcgatgctctgagagttgaggatatgatgaaacgttctttttctgagtttccctctagaaaagattctaaagcccacgaacaggccctcgccgagctgactaagcggctcggtgcgctggaggaaccagacatgactggccaattggtggacctgcctgagtactattcctggggagaagagctaaccgagacacagcacatgattcaacgtcgtattatggaatccgtgaatggcttaaagtctctcagcgctggacgagttgtcgtggttaagaaccaggaacaccataacgccttgggcgtcatactacaagtcagctccaactctacatcaagggttttcaccaccctggtgctatgcgataaacccctgtcccaggatccccaggaccgaggccctgccaccgccgaggtcccttatccagatgacttagtgggcttcaagctctttctgccggaaggcccatgcgaccatacagtagtgaaactccagccaggggatatggcagccattacgacgaaggtgctaagagtgaacggggaaaagatactggaagatttttctaagcgccagcagcctaagtttaaaaaggacccccccctcgctgctgttactactgcagtccaggagctgctcagacttgcccaggcgcatcccgctggccccccaactctggacccagtgaacgacctgcagctgaaggatatgtccgttgtggagggcggcctgcgtgctcggaagttggaggagctgatacagggggctcagtgcgtgcattcgccgcgttttcccgcgcagtatctaaagctgcgcgagcgtatgcagatacaaaaggagatggaacggctccgttttctgctgagcgaccagtccctccttttgcttcccgagtaccatcagagagtagaggtcctgcgaactctggggtacgtggatgaagccggcaccgtgaagctggccggaagggttgcatgtgctatgtcctcacacgagctgcttctgacagaacttatgtttgataacgctctttcaacgctgaggcccgaagaaatcgctgccctcctcagtggactggtgtgccagtcgcccggtgacgctggcgaccaactgcctaacactctgaagcaggggatagaacgtgttagggcagtcgccaagcgaatcggtgaggtgcaggtggcttgcggccttaatcagacagttgaggagtttgtcggagagctgaactttggcctggtcgaggttgtgtacgagtgggcacgcggcatgcctttttctgagttagccggcttgagcggtactcccgaaggactcgttgtgcggtgtatccagcggctcgccgagatgtgtcggtctctcagaggggcggcgagactcgtgggtgagccagtgctaggcgctaaaatggagacggccgccacactgctcaggcgagacatcgtatttgccgcatctctttatacacagtag

SEQ ID NO: 169184 - DNA, 3267 bp, Artificial Sequence
  derived and/or modified sequence
atggatgagcctactattacagacctcaatacaagggaagaggcggaggaagaaatcgactttgaaaaggacttattgacaatcccacctggattcaaaaaaggaatggatttcgctcctaaagattgtccaacccctgcgcctgggctgctgtctttgtcctgtatgcttgagcccctcgacctaggcggaggggatgaggatgagaatgaggcggttggccagcctggcggtcctcgtggagatactgttagcgcctccccctgcagcgcacctctggcgagggcatcaagcctcgaggacctagtgttgaaagaggcatccacggccgtgtctactccagaggcacctgagcctccctcccaggaacagtgggcaattccagttgatgcgacatcacctgtcggggatttctataggctaatacctcagccggcctttcagtgggccttcgagcccgatgtgttccagaagcaggcaattctgcatctggagcgccacgattcagtgtttgtggctgcccatacatccgctgggaaaaccgttgtcgcagagtacgctatcgcactcgctcaaaaacacatgactcgaaccatatataccagccccataaaggctctgagtaaccaaaaattcagggacttccggaacacattcggtgatgttggactgctgactggagatgtgcagttgcatccagaggcctcctgtcttataatgaccaccgagattctgcgatccatgctgtacagtggatctgacgtgatacgcgacctggagtgggtgatctttgatgaggtccattacattaatgacgtcgaaagaggtgtcgtatgggaggaggtgctgattatgcttccagaccatgtctccatcatcctgctgagcgctaccgttcctaatgccttggagttcgccgactggatcggtcgccttaaacgccgtcagatatacgtaatcagcacagtgacacgcccggtccctcttgagcactacctgtttaccggaaatagctccaagacacagggcgaactgtttctgttactggattccagaggggcttttcataccaagggctactatgcggctgtggaggccaaaaaagagaggatgagcaagcacgcccagacgttcggagctaagcaacctacccaccagggcgggccagcacaggacaggggtgtgtacctgtcactgttagcctccctcagaacacgtgcccaactccctgttgtggtttttaccttctcccgggggcgatgcgatgaacaggcttccggtctgacctctctggacctgacgacttcttccgagaaatccgaaattcatctgtttcttcagaggtgcctagcaaggttgcgtggctccgacaggcagcttccccaggtactgcacatgtcggaactgctcaaccgcgggctgggtgtccaccacagcggcattctgcccatactgaaagagattgttgaaatgctgttttcccggggcctcgtgaaagtcctgtttgccaccgagacattcgcaatgggagtgaacatgccagcacgtactgtggtattcgattctatgagaaagcacgacggaagcaccttcagggacctgcttcctggagagtatgttcagatggcagggagagccggtcgtagaggcctggaccccaccggaacagtgattctgttgtgtaaagggagagttcctgagatggcagatctgcaccggatgatgatggggaagccctcccagctacagtctcagtttaggttgacctacacaatgattctcaacctcctgcgggtagacgctctccgggtggaggatatgatgaagagatcctttagcgagtttccctccagaaaggacagcaaggcgcacgagcaggctttggcagaactaaccaaaaggctgggggcgttagaggagccggacatgaccgggcagcttgtggaccttccagaatattactcctggggagaggagttaacagaaacacaacacatgatacagagaagaattatggagtctgtgaatggcctgaaatctctgtccgccggccgtgttgtggtggtgaaaaaccaggagcaccataatgctcttggggttattttacaggttagtagtaactctacctcaagggtgtttaccacattggtgctttgtgataagccgctgagccaggatcctcaagatcgaggccctgctacagcggaagtcccgtatccagatgatttggttgggtttaagctgttccttccggaaggcccttgtgatcataccgttgtgaaattgcaacctggggacatggccgctatcacgactaaggtgctgagagtgaacggagaaaagattctggaggacttcagcaaacggcagcaacctaaattcaagaaggaccctccacttgcagccgttaccaccgccgtgcaggagctgctgagactcgcgcaggctcaccctgcagggccaccaacccttgaccctgtgaacgacctccagcttaaggacatgagcgtcgtggagggaggcctgcgcgctagaaagctggaagagctaattcagggagcccaatgtgttcattctcctagattcccagcccaatacctgaagctgcgggagcggatgcagatccagaaggagatggaaagactgaggtttctgctgtcagaccagagcttactcctcttacccgaatatcaccagcgggttgaggtgctgcgcactttgggctatgttgacgaagctggtaccgtgaaactcgctggcagagtggcgtgtgccatgtctagccatgaactcctactgaccgagttaatgttcgataatgcactgtcgaccctcaggccggaggaaatcgcggctcttctcagcgggctggtttgccagagccctggcgacgccggagaccagctaccgaataccctgaagcagggcatcgagagggtccgggccgttgctaaaagaatcggggaggtgcaggtagcttgcgggctgaatcagaccgtggaggaattcgtcggagagctgaacttcggcttggtggaggtagtatacgaatgggccagagggatgcctttctcggagcttgccggcctgagtggcacccccgaaggattggtggtgagatgtatacaacggctcgcagagatgtgtagatctcttaggggcgccgcacgactagtgggggagcccgttttgggagccaagatggaaacagcggccactctgcttagaagagatatcgtttttgccgcctctctctacacccaatag

SEQ ID NO: 169185 - DNA, 3741 bp, Artificial Sequence
  derived and/or modified sequence
atgatggaaacagagcggcttgttctgcccccccctgacccactcgacttgcctttgcgagcagtggaattgggctgtacaggccactgggagctcctgaatctgcccggagcacccgagtcttcccttcctcatggcctgccgccatgcgcccctgatttgcagcaggaggccgaacaacttttcctgagctcacctgcatggctgcctcttcatggggttgaacattccgcccgaaagtggcagcgcaaaacagatccatggagcttgttagccgtcctgggggccccagtgccttccgacctacaggcccagagacatccaacgacagggcaaatccttggttataaagaagtgctgctagagaacactaatctgagtgctactactagcctctcccttcggcgtcccccgggcccagcatcccagtccctttggggcaaccccacgcagtatcccttttggccaggaggcatggacgaaccgacaataaccgatcttaatacacgcgaggaagccgaggaggagatcgatttcgaaaaagatcttttgactataccaccaggctttaagaagggcatggattttgcacctaaagactgccccacccccgcccctggactgctatcactctcctgcatgttggagcctctcgacctcgggggcggcgatgaagatgagaatgaggccgtgggtcagcccgggggcccgaggggggatacggtctctgccagtccatgctcggcgccgctggcaagagcaagttcacttgaggacctggtgctgaaagaggctagtactgcagtgtccacccccgaggctccggaaccgccttcccaggagcagtgggccattcccgtggatgcaacatctcctgttggtgacttttaccgccttattcctcagccagctttccagtgggcatttgagccagacgtgttccagaagcaggcgatcctgcacttggagcggcacgattcagtgtttgtggccgcacacaccagtgccggcaagaccgtagttgccgagtatgccatagccttggcgcaaaagcacatgaccagaacaatttacaccagcccgatcaaggctctgagtaatcagaaatttagggacttccggaatactttcggagacgtaggtctcttgacaggcgacgtgcagctccaccctgaggcttcatgcctgattatgactacagagattctccgttctatgctttactctggcagtgacgtgatccgcgatctcgagtgggtcatctttgacgaggtacactatattaatgacgtggaacgaggcgtggtgtgggaggaagtgcttattatgctgccagatcacgtatccatcatactcctgagtgctaccgtcccaaacgctctggaattcgctgattggatcggaaggctcaagaggagacaaatttacgtcatctcaaccgtcactagaccagtccctttggagcattacctgtttacagggaactctagcaagacacagggagaactgtttctgttattggattctcgcggggcgttccatacgaagggctactacgccgcggtggaggccaagaaggaaagaatgtctaagcacgcccaaacattcggagctaagcaacctacccatcagggcggtccagcacaggatcggggcgtttatttgtctctgcttgcctccctgagaaccagagctcagttgccagttgttgtgtttactttcagtagagggaggtgtgacgaacaagcaagcgggctgacttctctggacctgacaacaagcagcgaaaagagcgagatccacctgtttctccaaagatgcctggccaggctgagaggctccgaccggcaactgccccaagtcctccatatgtcagaactgctgaatagaggtttaggagtgcatcactctggcattttaccaattttgaaggagatcgtagaaatgctgttcagtcgcggcttggtgaaagtcctctttgcaaccgaaactttcgctatgggtgttaatatgcctgccagaaccgtagtgtttgattccatgaggaagcacgatggctccacctttagggatctgctgcccggcgaatatgtacagatggcagggagagccgggagacgcggacttgatccaaccggcacagtgattttgctctgcaagggacgcgttcctgaaatggccgatctgcaccggatgatgatgggcaagccctcccagctccagagtcagttccgtctgacctatacaatgattctcaatctactgcgagtcgatgcactacgcgtggaagacatgatgaagcgatcctttagtgagttcccctcccggaaagactctaaggcacacgagcaagccctggctgagcttactaaaaggctgggggctctggaagagcctgacatgacgggccagctcgtggacctacccgagtattacagttggggagaggagctaaccgaaacgcagcacatgatccagcgtcggatcatggaatctgtgaacggcctgaaatcactctccgcgggcagggtagtggtggtgaagaatcaagaacatcataacgccctcggcgtcatccttcaagtcagcagcaatagcacatcaagagttttcacaaccctagttttgtgtgacaaaccgttatcacaggacccccaggatcggggacccgccaccgccgaagtgccttatcccgacgacctggtggggttcaaattattcctgcccgagggaccatgtgatcacaccgtcgtaaagttacagccaggggatatggctgctatcaccaccaaggtcttacgagtaaacggcgaaaagattctggaggacttctccaaaaggcagcagcctaagttcaagaaggatcctcctttggcagctgtgaccacagctgtgcaagagcttttaaggctggctcaagcacacccagctggtccgcccacccttgaccccgtgaacgatttgcaactcaaagacatgtcggtcgtggagggggggctgcgggctcgtaagctggaggagctcatccagggggcacagtgtgtacactcaccacgcttccctgcccagtatctaaagttacgggaacgcatgcagatccagaaggagatggagcgcctgagatttctcttaagtgaccagagccttcttctgctgcccgagtatcaccaaagagttgaagtgctgcgaactcttgggtacgtcgatgaggcagggactgtgaagcttgctggaagagtcgcctgtgctatgtccagccacgagctgcttctgactgaattaatgtttgacaatgctttgtctacactgcggcctgaggaaatcgccgccctgctctccggccttgtgtgccagagtcctggggatgctggggaccagctgcccaatacgctgaaacaaggaatcgaacgggtacgcgcagtcgccaagaggatcggcgaagttcaggtggcttgcggccttaatcagaccgttgaggaattcgtcggagagctgaatttcggcttggtcgaagtagtgtacgagtgggctagagggatgccatttagcgaactagctggtctgtccggcacaccagaaggcctcgtcgtcaggtgtattcagcgccttgctgaaatgtgtaggagcctacggggtgctgctcgtctcgtcggggaacctgtgctcggggcgaagatggaaaccgccgccaccctattgcgcagagacatcgtgttcgccgccagcctttacacccagtag

SEQ ID NO: 169186 - DNA, 3162 bp, Artificial Sequence
  derived and/or modified sequence
atggatttcgcaccaaaagactgccctacacccgcaccaggactgctcagtctctcttgtatgctggaacctttagatctaggaggcggcgatgaggatgagaacgaagccgttggccagcctggtggaccacgtggcgacaccgtgtccgcaagcccatgctctgctccattggctcgcgcgagttcactggaggacctcgtgctgaaagaggctagcaccgccgtgtcaaccccggaggcccccgagcctcccagccaggagcagtgggccattcccgtggatgctaccagtcccgtcggagatttttatagactcatcccgcagcccgcctttcagtgggccttcgagccagacgtgttccagaagcaggccattcttcacctcgaaagacacgactcagtcttcgttgctgcgcatacttcggctgggaagactgtggtcgccgaatacgccatcgccctggcccagaaacatatgaccagaacaatttacaccagcccaatcaaagctctctccaaccaaaaatttcgcgatttccgcaacacctttggcgacgttggcctcctcacgggtgacgtgcaattacatcccgaggcaagttgtctgataatgacaacagagattctgcgcagcatgctgtactctgggtccgatgtgatcagagacctcgagtgggttatttttgatgaggtgcattacattaatgacgttgaaaggggagtcgtctgggaagaggtgctgatcatgctgcctgatcacgtgtctataattttactctccgccactgttcctaatgcactcgagtttgctgactggatcggccgtttgaagagaaggcagatctatgtcattagtaccgtgacccgaccagtgcccctggaacattacctcttcacgggtaacagcagcaagacgcaaggggaactgtttttgctcctggatagcaggggggctttccacactaaaggctattacgccgcggtggaggcaaagaaagagagaatgagcaagcacgcacagacttttggcgccaagcagcccacccaccaaggtggacccgcccaggaccgcggcgtatacctgtccctactcgcatctcttcggactcgagcacaactgcccgtcgtagtctttaccttcagtcgcggcaggtgcgatgagcaagcatccggcctcacatccttagatcttacaacctcctccgaaaaatcagagattcatcttttcctacaaaggtgtctggctcgcctgaggggatctgataggcagctgcctcaggtgttgcacatgagcgagctgctcaaccgagggctgggagtccaccacagcggtatactcccgatacttaaagaaatcgttgaaatgctcttttcaagggggctagtaaaagttttgtttgccactgaaacatttgctatgggagttaacatgcctgctaggaccgttgtcttcgactctatgagaaaacacgacggcagcacttttagggatctgttgcctggcgagtatgtgcagatggccggacgagccggccgtcgggggctggatcccaccggaacagtcattcttttatgcaaaggccgcgtccccgagatggctgacctgcaccggatgatgatgggcaagccttcccagctccagagccagtttaggcttacttacacaatgatactcaacctcttgagagtcgacgctctgcgtgttgaggatatgatgaaacgtagcttctccgaattccccagccgaaaagatagtaaggcccacgagcaggcacttgcggagcttacgaaacgcctcggtgccttagaggaaccggacatgaccggccagctggtcgacttgccggagtattattcttggggcgaggaactaaccgaaactcaacacatgattcagagaagaatcatggagtctgtgaatggacttaagtcactctccgccgggcgtgttgtcgtagtgaaaaatcaggaacaccacaacgccttaggtgtgatcctgcaggtgagtagcaacagtacatcccgagtatttaccactctggtgctttgtgataaaccactgagtcaggatcctcaggacagagggcccgcgaccgccgaggtgccataccccgacgacctcgtgggctttaagctgtttctccctgagggcccctgtgatcataccgtagtgaaattacagccaggtgacatggccgctataaccacaaaagtcctgagagttaacggggaaaagatccttgaagatttttcaaagagacagcagcccaagttcaaaaaagacccacctctggccgccgtgaccacggccgtccaggagctactgagactggctcaggcccatcctgccggccctcccaccctggatccagtaaatgatctgcagctcaaggatatgtccgtggtcgaggggggattacgcgctcgcaaactggaggaacttattcaaggggcccagtgtgtacattccccccggtttcctgcccagtacctgaaactgcgcgagcgcatgcagatccagaaggagatggaaagattacggttcttgttgagtgaccagagcctgctgctgctgcctgaataccatcagcgcgtggaggtattaaggacgttggggtatgtcgacgaggccgggaccgtcaagctggcgggccgggtcgcatgtgcgatgtcctctcacgaactcctgcttaccgagctcatgtttgataacgcacttagcacacttagaccagaggaaatagctgctctcctgtctggactagtgtgtcagtcccctggagacgccggcgatcagctgcctaacacactcaagcaaggtatcgagcgcgtcagagccgtggccaaacggatcggcgaggtccaagttgcgtgcggactgaatcaaacagttgaagagttcgtgggcgagctgaacttcggcctggtggaagtcgtgtacgaatgggcgcgtggtatgcctttttccgagttggcaggtctgtccggaactcccgagggtctcgtggtgaggtgcattcaacgactcgctgagatgtgtcgcagccttaggggcgctgcccgtctggtaggggagccggtccttggcgccaagatggagacagccgcaaccttgcttcggcgcgatatagttttcgctgcatcactctacactcagtag

SEQ ID NO: 169187 - DNA, 3162 bp, Artificial Sequence
  derived and/or modified sequence
atggatttcgctccaaaggactgtccgacgcctgctccgggcctactgtcacttagctgtatgcttgagcccctcgatctgggtggcggcgacgaggacgaaaacgaggctgtgggccagcctggtggaccaaggggagatacggtcagcgcctcaccttgtagtgcaccactggctcgcgcttccagcctggaagacctggtgcttaaagaggcgtcgactgcggtgtccacgccggaggcgcccgagccccccagccaggagcagtgggcaatccccgtcgacgccacctctcctgtaggggatttttatagactaatccctcaacccgcatttcaatgggctttcgaacctgacgtgttccagaagcaggctatcctgcatctcgaaagacacgatagtgtgttcgtcgctgcccatacctccgctgggaagactgttgtggcggagtatgccatcgccctcgcacagaagcatatgacacgtacaatttacacctcccctatcaaggctctatccaaccagaaatttagggactttcgcaacacgtttggggatgtgggactgctcacaggcgatgtgcagctacaccccgaagcctcatgcctgatcatgaccacagagatcctgcgttcaatgctgtactccggatcagacgtcataagggatctggagtgggtcatattcgatgaggtccactatatcaacgatgtcgaacggggggtagtgtgggaggaagtgctcattatgctgccagatcacgtgtccatcatccttctgagtgccacggtccccaatgctctcgagttcgcagactggatcggtcggctgaaaaggaggcagatctatgttatcagcaccgtcacgcgaccagtgccactggagcactacttgttcacgggtaattcttcaaagacacagggagagctgttcctgctgctcgattcacgtggagcatttcacacaaagggctactacgcggctgtggaggccaaaaaggagagaatgtctaaacacgcccaaactttcggcgcgaagcagcctacccatcagggagggccagcccaggaccgaggggtttacctgtcactcttagcctccctgaggactcgcgctcagctgccagtcgtggttttcacgtttagccggggcagatgcgacgagcaggcctccggactaaccagcctggacctgaccacgtcaagtgagaagagtgaaattcacctgttcctccaacgatgcctggcccggctgagaggcagcgaccgacagctgccgcaagtgcttcatatgtcggaactattgaatcggggactcggtgtgcatcactctgggatcctgcctatcttaaaggagattgtggagatgctgttcagccgcggtcttgtgaaggtgttattcgccactgaaaccttcgccatgggagtcaacatgccagcacggaccgtcgtgtttgactcaatgcggaaacatgacggatccacgtttagagacctgctgccgggcgagtacgtccaaatggcagggcgcgctggaaggaggggattagatccaacgggaactgtcattctgctgtgtaagggtcgtgtgcccgagatggccgacctgcacagaatgatgatgggaaagccatctcagctgcagtctcagttccgcctcacctacacgatgattctgaatctgcttcgtgtcgacgctctgcgcgttgaagacatgatgaaaagatcctttagtgaatttccttctcgcaaggattctaaggctcacgagcaggcccttgccgagctgacgaaaaggctgggagctctagaggaaccagacatgactggccaactggtagacttgccagagtactactcgtggggtgaggaactgacagagacccaacacatgatccaacgccgcataatggagtctgtcaacgggctgaagtctctctctgcaggaagggtggtggtggtaaaaaatcaggaacatcacaacgcactgggcgtgattttgcaagtgtcaagcaacagcacatctagagtttttactacactggtcctgtgtgataagccactctctcaagaccctcaggaccgcggaccggcaacggctgaggtgccatatccagacgatctagtagggttcaagctgttcctaccagagggcccctgcgatcatacagtcgttaagctgcagccgggcgacatggctgccataactactaaggtgctgcgggttaacggggagaaaattctcgaagattttagcaagcggcagcaaccgaaatttaagaaagaccccccccttgcagccgtgaccactgctgtgcaggagctgctccgtctcgctcaggctcacccagctgggccaccgacattggatccagtaaatgatctgcagctcaaggatatgagtgttgttgagggaggcctgagagcgcggaaactcgaggaactcatccagggtgcccagtgcgtgcacagcccaaggttccctgcgcagtaccttaaactgagagagcgaatgcagatccaaaaagagatggaaaggcttaggtttctgttgtccgatcagagtctcctgcttctgccagaataccaccagcgtgtggaggtccttcggaccctgggttacgtggatgaggcaggcaccgtgaaactcgctggaagggtggcctgtgctatgtccagccatgagctgctgctcacagagttaatgttcgataacgctttaagcacactacggcctgaggaaattgccgctctgttgagtggactggtttgtcagagccccggggatgcgggcgatcagctgccgaatacgctcaagcaggggatcgaaagggtcagagccgtcgcgaagaggattggcgaggtgcaagtagcgtgtgggttaaatcagactgttgaggagtttgttggagaactcaactttgggctcgttgaagtggtatatgagtgggctagaggaatgccattttccgagctggccggactctctggcacccccgagggactggtcgtaagatgtatccaacgcctggcagagatgtgtagaagcttgcggggagcagccagattggtgggtgagcctgtcctgggagccaaaatggaaactgcagctacactcctcagacgggacattgttttcgctgcctcgctgtacacccagtag

SEQ ID NO: 169188 - DNA, 3267 bp, Artificial Sequence
  derived and/or modified sequence
atggatgaaccgaccattaccgatttaaatacgagagaggaagctgaagaggagatagatttcgagaaggacttgctgactattccacccggttttaagaagggaatggacttcgctcccaaggactgcccaacccctgctccgggtttactgtccctttcctgcttgctggaacccctggatctgggcggcggcgatgaagacgagaacgaggcagtaggccagccaggcggccctaggggcgatacagtgtccgccagcccctgcagtgcccctctcgcccgggcttctagcttagaggacctggttctcaaggaggcgtcaacagccgtgtcaaccccagaagctcctgagccaccttcacaggagcaatgggccattccagtcgacgcaacatctcccgtgggagatttctaccggttgatccctcagcccgccttccagtgggctttcgaaccagatgtgttccagaaacaggccatcctgcacctcgagaggcatgatagcgtttttgttgctgcccatacctccgcgggaaagaccgtcgtagccgagtacgctatcgctctggcccagaaacacatgaccaggactatttacacctcccctatcaaggctctgagcaatcagaagttcagagatttcaggaacacttttggagacgtcgggctccttaccggggatgtgcaactccaccccgaggcaagctgtctgatcatgactacggaaatcttgagaagtatgctgtactcagggtctgatgttatccgggacctggaatgggtaatcttcgacgaagtgcactatataaacgatgtggagcggggcgtggtgtgggaggaggttttgatcatgctgcccgatcacgttagcattatcctgctcagcgccaccgtgccaaacgccctcgagtttgccgactggattgggcggctgaaacggcgtcagatttacgtgatttctaccgtgacacgccccgtccctctggagcactatctcttcacgggcaacagctctaaaactcagggtgagctgttcctgctcctagattccagaggcgctttccacacaaagggctactatgccgctgtcgaggctaaaaaagaacggatgtcaaaacatgcacaaaccttcggtgcaaagcaaccaacccatcaaggcggcccagcccaggaccgtggggtgtaccttagtcttctggcttcactacggacgagagctcagctgccagtggtggtgttcactttcagcaggggccgctgtgatgagcaggcgtcaggcctcacgtccctggacctgacaacttccagcgaaaaatccgagatccatctgttcttacagagatgccttgcaagacttagaggcagcgaccggcaactgccacaggtacttcacatgagcgaattactgaatcgtggactgggggtgcatcattccgggattctgccgatcctgaaggagatagtggagatgctattcagccgggggctggtgaaagtccttttcgcaactgaaacctttgccatgggagttaacatgccagcccggaccgtggtgttcgactccatgcgcaaacatgatgggtctacctttagggacctcttgcccggcgagtacgttcaaatggccggtcgggcaggcaggcggggcctcgatcctacgggtaccgtcatattactttgtaagggcagagtgcccgagatggcagacctgcaccggatgatgatgggaaaacctagccagctccagtcccaatttcgtctgacatatacaatgatcctgaatttactccgagtagatgccctcagggtagaggacatgatgaaaaggtctttctccgaatttccttctcggaaggattctaaggcgcacgagcaagcccttgcagaactgacgaaacgcctaggggccctggaagagccagacatgacgggacagcttgtcgatctccccgagtactacagctggggcgaggaactgacagagactcaacatatgattcagcggcggatcatggaatctgtcaatgggttgaagagcttgagcgccgggagggtagttgttgtgaagaatcaggaacatcataatgcactgggagttatcctccaagtaagtagcaattccacctctcgggtctttactacgctcgtcctgtgcgataagcccttaagtcaggatccgcaagatcggggccccgctaccgctgaggtcccatatccagacgacctggtggggtttaaattgttcctgccagaaggaccttgcgaccataccgttgttaagctgcaaccaggcgatatggccgcaatcaccacaaaggtgttgagggttaacggcgagaagatactggaagacttttctaagcgccagcagccaaaattcaagaaggacccccctctggccgcggtgaccaccgctgtgcaggaactcctccggctagcccaggctcaccccgctggaccacctaccttagatccagtgaatgatcttcagctcaaggatatgagtgtagtagagggcggcttaagggccaggaagctggaagagctgatccagggggcccagtgtgtgcactcccccagatttcctgcgcagtacctcaagctccgtgagcgcatgcagatccagaaggaaatggagcgactgcgattcttgctgagcgaccagtccctgctgctcctgccggaataccatcaacgcgtggaggtattgcggaccctgggctatgtggatgaagccggcacggtgaagctcgcggggagggttgcttgcgcaatgagttcccatgaactcctactgacagagttgatgttcgataacgcgttgtcaactctaaggccagaggaaattgcagctttattaagcggtttagtgtgccagtctccaggcgatgcaggcgatcagctccctaatacgttgaaacagggcatcgagcgcgtgcgagccgtcgcgaaaaggattggagaggttcaggtggcttgtggtttaaaccaaacagttgaagagttcgtgggggagctgaactttggcctggtcgaggtcgtctacgagtgggccaggggcatgcccttcagtgagcttgcggggttgtccggcacccctgagggactggtggtgcggtgtatccaacgattggcagagatgtgtcggtcccttcgaggagctgctaggttagtcggagagcctgtactgggtgcaaagatggagacagcggctacgctgttgcgcagggacatcgtttttgcagctagcctgtatacacagtag

SEQ ID NO: 169189 - DNA, 3162 bp, Artificial Sequence
  derived and/or modified sequence
atggacttcgccccaaaagactgtcctaccccagccccagggctgcttagcctgtcttgtctcctggagcccctcgatttagggggcggcgatgaggatgagaatgaggccgtggggcaacccgggggaccaagaggtgatacagtatcggcgagcccatgcagcgctcctttggctcgtgcgtccagcttggaggacttggtgctcaaggaggctagcactgccgtttcaacacccgaagcccccgaacccccgagccaggaacaatgggccatccctgtggacgcaacctcccccgttggcgacttctatcggctcatacctcagcctgcttttcagtgggctttcgaaccagatgttttccagaagcaggctatcctccatctggagagacacgatagcgtcttcgttgccgcacatacatctgccggaaaaaccgtagtcgccgagtacgccatcgccctcgcccagaagcacatgacacgcaccatctacacttcacctattaaagccctgtccaatcagaagtttagagatttccgtaatacgttcggagatgttgggctgctgaccggcgatgtgcagctacaccccgaagccagttgcttgatcatgactactgagatactgcgcagcatgctgtactccggttccgacgtgatccgcgacttggaatgggtgatcttcgacgaggtccattatatcaacgacgttgagagaggggtggtgtgggaagaagtcctcatcatgctgcctgaccatgtttccattattctgctgagtgcaacagtgcccaacgcactagagttcgccgattggatcggtagattgaagcgcagacagatctacgtgattagtactgtaacgaggcccgtgccactggaacactacttgttcacaggaaacagctcgaagacccaaggcgaattgtttctgctgctggactccaggggggcattccacacgaaggggtactacgctgccgtcgaagctaaaaaggagcgcatgagtaagcacgcccagacttttggcgcaaaacagcccactcaccagggtgggcccgcccaagataggggtgtatacttgtcactgcttgcttccctgaggacaagggctcaactgcctgttgttgtctttaccttctccagaggccggtgcgatgagcaggcttcgggactgacttccctggacttgaccacgtcttccgagaagtcagaaattcatctctttctgcagcgatgcctggcccgcctgcggggctcagaccgacagctgccacaggtccttcacatgtctgaactcctgaacagagggctaggcgtgcaccactctggcatacttccaatcctcaaggagattgtggaaatgctcttctccaggggactggtgaaggtcctgtttgcaaccgaaaccttcgctatgggtgtgaatatgccagctcgaactgtcgtatttgattctatgagaaagcacgatggttccacatttagggatctcttaccgggggagtatgtgcagatggcagggcgggctggtcggcggggtctagatcctaccgggacagtgattcttctgtgcaaggggcgcgtccccgagatggctgacctgcatagaatgatgatgggtaagccgagtcaactccaaagtcagtttagattgacctacaccatgatcctcaatttgcttagagtagacgccctgcgggtggaggatatgatgaaacgatccttctcagagttcccttccaggaaggactctaaggcccatgagcaggctcttgcggaacttacaaagagactcggggctctggaagagcctgatatgacaggccagctggtcgatttgcccgagtattactcatggggggaggaactcactgaaactcagcacatgatccagcggcgaattatggagtctgtgaatgggctgaaatcactatcagcaggtcgggtggtggtggttaagaatcaggagcaccacaatgccttgggggtaattttacaggtgagcagtaactccacctcccgcgtctttaccactctggttttgtgcgataagcctctctcccaggatccccaagaccggggacccgccactgcagaagtgccttatccagacgacctggtgggcttcaagctcttcctgccagaaggcccatgtgatcatacagttgtcaaattacaaccgggggatatggccgctattaccactaaggttctcagggtgaacggcgaaaaaatcttggaagatttctccaaacgacagcagcccaagtttaaaaaggatccgcctctcgccgccgtgactactgcagtgcaggaactccttaggttagcccaagctcatcctgccggtcccccaacactagatccggtgaatgacctccagctgaaggatatgtcagtggttgagggaggactgagggcacgaaaactggaggagttgatccagggagcacagtgtgtccactccccacgctttcccgcccagtacttaaagctccgggagaggatgcagatacagaaagaaatggagaggctccgattcttgttgtcagatcagtccctgctgctcctgcctgagtaccatcagcgtgttgaggtgctaagaaccttgggctatgttgacgaggccggaaccgtaaagctggccggaagggtagcgtgtgctatgtcaagtcacgaactgctgcttacggagttaatgttcgataatgccctctcgaccctgcggcccgaagagatcgccgcccttcttagcggcttggtctgccagagcccaggcgacgccggggatcagctgccaaatacactcaagcagggcatcgaacgggtgagagcagtcgctaaacgaattggtgaggtccaggtggcctgtggcctcaaccagacggttgaggaattcgtgggtgagctgaattttgggctcgtagaggtcgtgtatgagtgggcgcgaggtatgcctttcagcgagcttgccggcctgagtggtacaccagaggggctggtggtgcggtgcatccagcgcctcgctgagatgtgcaggagcttacgcggagcagctcgtcttgtgggcgagcccgttcttggcgccaaaatggagacagcagctactctcctaagacgagatatcgtatttgccgctagtctgtatacccagtag

SEQ ID NO: 169190 - DNA, 2643 bp, Artificial Sequence
  derived and/or modified sequence
atgatggagacggaacggttggttcttccacccccagacccgctggatctccctcttcgggctgtggaattgggctgtacgggacattgggaacttcttaatctcccaggggctccggagtccagtttgcctcacggtctgcctccttgcgccccggacctccagcaggaagccgagcagctctttctttccagtccagcctggctccccctgcacggtgtagaacattccgcccgcaagtggcagaggaagactgacccttggtctctcctcgccgttctgggcgctcccgtgccatctgatcttcaagcacaaagacaccctactaccgggcagattctggggtataaagaggtcctgctggaacactacctgttcactggcaatagtagtaagacgcagggggaattatttttgctgctcgattctcgcggcgcttttcatacaaaggggtactacgctgccgtggaggctaaaaaagaaaggatgtccaaacatgcacagaccttcggcgctaaacagccgacacaccagggaggcccagcccaggatcgaggagtgtacctgagccttctggcatccctgagaactcgcgcgcaattgccagtggtggtattcacgttcagccggggccgctgtgacgagcaggcaagtggattgacttcattggacctgacaacctcttccgagaaaagcgagattcacttgttcctgcagaggtgtctggcccgactccgcggcagcgatagacaactgccacaggtactccacatgagtgaattgctgaatcggggtttgggggtgcaccactccggcatcctcccgattctgaaagagatcgttgagatgctgtttagtcgcgggcttgtgaaagtattattcgcaacagaaaccttcgctatgggcgtgaacatgcccgctcgcaccgtggtgttcgactcaatgcggaaacacgatgggtcgacattccgcgacctgctgccaggggagtatgtgcagatggccggaagagccggaagacgcggtctagaccccaccgggactgtgattctcctgtgcaagggaagggtgcctgagatggcagaccttcaccggatgatgatggggaagccatcgcagctgcaatcccagttccgcctgacttacactatgatcttaaatcttttgagggttgatgctctccgcgtagaggacatgatgaagagatctttctccgaatttccatctaggaaagactctaaagcacacgagcaggctctggcggagctgaccaagcgactgggcgcgctcgaggagcctgatatgactggccagcttgtcgacctgcctgaatattatagttggggtgaagagttgaccgaaacccaacatatgatccagcgcaggatcatggagtctgtgaacggtctgaagagcctgagcgccgggcgggtcgtcgttgtcaaaaaccaggaacaccataacgccttaggcgtcatcttacaggtgagtagcaattctaccagccgggtctttaccacactcgtactatgtgataaaccactgtctcaagatcctcaggatcgcggacccgccacggctgaggtgccctaccccgacgatctagtcggcttcaaattattcttgcctgagggcccctgcgatcacactgtggtgaagctgcagcctggcgatatggccgccattactacgaaagtgctgcgggtgaatggcgagaagatcttagaggacttttccaaacggcagcagcccaagtttaagaaggaccctccactggccgctgtcactacagccgtgcaggagttgttgaggctcgcccaggcacacccagcaggtccccccactctggacccagtgaatgatctgcagctgaaagatatgtcagtagtagaaggcgggctccgtgctagaaaactggaggaactgattcagggggctcagtgcgttcatagccccaggttccccgcccagtatttgaagctgcgtgagcgtatgcagattcaaaaggagatggaaagactccgatttctgctgagcgatcagtctctcttgttgctgcctgagtatcaccagagagtggaagtgctacgaacgttgggatatgtggatgaagcaggtaccgtcaagctagccgggcgtgtggcctgcgctatgtcttcccacgagcttctgttaactgagttgatgttcgataacgccctctccacactccggcccgaagaaatcgccgccctgctgagcggcctggtgtgtcagtcaccgggggatgctggggaccagcttcccaataccctcaagcaaggcatcgagagggttcgggccgtcgctaagagaatcggggaggttcaagtcgcctgcggcctgaaccagacagtggaggagttcgtaggggagttgaattttgggcttgtggaagtggtctacgagtgggccagggggatgccatttagcgaactcgccggacttagtggcacccctgaggggcttgttgtgcgctgcattcagcggttggcggagatgtgcagaagcctgcggggcgcagctcgactggtgggagagcccgtactaggcgctaagatggagacagctgcaacactgctgaggagagacattgtgttcgccgcaagtctttatacccaatag

SEQ ID NO: 169191 - DNA, 3267 bp, Artificial Sequence
  derived and/or modified sequence
atggatgaacctacaatcaccgatctcaatactcgtgaagaagccgaggaagaaattgattttgagaaagacctccttaccatccctcccggcttcaaaaaaggcatggatttcgctcctaaggactgtcctacaccagcaccaggcttactttctctgagttgcctcctggagcccctggatctggggggcggcgatgaggatgagaacgaagccgtggggcagcccggggggccacggggagatacagtcagcgcttcaccttgtagcgcgcctttagcacgggcctcttcccttgaggacctggtcctgaaagaggccagcactgcagtgtccacccctgaagccccagaacctccaagccaggaacagtgggctattcccgttgatgcgaccagtcctgtaggcgatttctaccggctgattccccaacctgcgtttcagtgggcgttcgaaccggacgtattccagaaacaggcgattctgcacctggaaagacacgatagcgtgtttgtcgccgctcatacctctgccggcaaaacagtcgtggcggagtacgctattgctctggcccagaagcatatgacaaggacgatctacacatctcctattaaggctctgtctaaccagaaattccgggattttcgaaataccttcggcgatgtgggcctgctgaccggggacgtgcagcttcaccctgaagccagctgtctgatcatgacaacagagatcttgagaagcatgctgtactcagggtcagacgtgattcgggatctggagtgggtgatctttgacgaagtgcactacattaacgacgttgagcgcggagtcgtgtgggaagaggtcctgattatgctgccggatcacgtgtctatcatcctcctctcggccaccgttcctaatgctctcgagttcgcggattggatagggagattgaagcgccgccagatctacgtgatttctactgtgactagaccagttcccttggagcattacttattcaccggcaattctagcaagacacagggggagctttttctgctgctcgacagtcgcggcgcttttcatactaaaggctattacgcagctgtggaggccaagaaggagcgtatgtccaagcacgcccagacttttggggctaaacaacctactcatcaggggggcccagctcaagacagaggtgtgtacctttctctacttgcctctctgcgcactagagcccaactgcctgtggttgtgtttactttttctcggggcagatgcgacgagcaagcctcaggcttaacgagcctcgatctgactacgtctagtgaaaagagtgaaattcacctcttcctgcagcgatgcctagctcggctgagaggatccgacaggcagctccctcaggtcctgcatatgagtgagctgcttaacagggggctgggggttcatcacagtggaatcttacccattctgaaggagatcgtggagatgctgttctcacggggcctggtaaaggttctttttgcaacagaaacattcgcaatgggcgtcaacatgcctgctcggactgtagtgttcgatagtatgagaaaacacgacgggagtacatttcgggacttgcttcccggcgaatacgtacagatggcagggcgggccggtcgccgcggtctcgatccgaccgggaccgtcatcctgctctgtaaaggccgcgttcctgagatggcagacctccaccggatgatgatggggaagccttctcaactgcaatctcaatttcgattgacttacacaatgatcctgaatctgcttcgcgtggacgccctgcgggttgaggatatgatgaagcgtagcttcagcgagtttccaagtcgcaaagactctaaggctcatgagcaggcgctagcggagttgaccaaaaggctgggcgccctggaggagcccgatatgacggggcagctggtcgacctgcctgaatattattcttggggtgaggaattgacagaaacccagcacatgattcagcgccgcattatggaaagtgtgaatgggctcaagtcgttgtcagccggaagagtggtggtggtgaaaaaccaggagcaccacaacgctctgggcgtcatcctgcaggtctcatccaactcaacatctcgcgtgtttacaaccctggtgctgtgtgacaagccactgagtcaggatccacaggaccgcggtccagcaaccgccgaggtcccatatcctgacgatctcgtgggattcaaactcttcctgcccgaaggtccctgtgaccatactgtcgtgaagctccaacccggggatatggcagctatcacaaccaaggtgttgagggtaaacggagagaagattctcgaagatttttcaaaaagacagcagcctaagtttaaaaaggatccccccttggcggctgttaccacagccgtgcaggagttactgcgcctagcccaggcccatccagcaggaccccctacactggacccagtgaacgatctccagttaaaggacatgtctgtcgtggaaggggggctcagggcacgcaagctggaagagttgatacaaggcgctcagtgtgtgcacagtccaaggttccccgcccaatacctcaagttaagagagcggatgcagatccagaaggagatggaaagactccgcttccttctctctgatcagtctctactgcttctacccgagtaccaccagcgtgtggaggttttgaggaccctcggatatgtggacgaggcaggcacagtaaaattagcgggccgagtagcttgtgctatgagttctcatgaattacttcttactgagctgatgttcgacaacgcactgagtacactgcgccccgaggagatcgccgctctgctgagcggcctagtgtgccaaagcccaggcgacgccggggatcagctccctaatactctgaagcaagggatcgagcgcgtgcgggctgttgccaaacgcatcggtgaggttcaggtggcgtgcggcctgaaccagaccgtcgaggagttcgtaggtgagctcaatttcggcctcgtggaagtggtgtatgagtgggcccgcgggatgcctttctcagagttggcaggactttcaggcacccccgagggactagtggtgcgctgcatacagaggcttgccgagatgtgccggtctttgagaggagctgctcggcttgtcggtgaacctgttttgggcgcaaaaatggagactgcagccaccctgttaaggagggatatagttttcgccgccagtctgtatacccagtag

SEQ ID NO: 169192 - DNA, 2643 bp, Artificial Sequence
  derived and/or modified sequence
atgatggagacagagcgacttgttcttcctccccctgacccactggatctgcccctgagggcggttgagcttggatgcaccggtcactgggagctcctcaatttaccgggggctccagaaagcagcctgccacacggccttccaccttgcgctcccgacctgcagcaggaggcagagcaactgtttttgtcctctccagcctggctgccactacatggtgtggagcactccgcacggaagtggcaacgaaaaaccgatccttggtccctgttagccgtcctgggagcacccgtgccaagtgacctgcaggcccagagacaccctaccaccggtcagattcttggatacaaggaagtgttactcgagcattatctgttcactgggaactcttctaagacacagggtgagctttttctgctcctcgatagtcgaggcgcgttccataccaaaggctattacgcagctgtggaggccaagaaagaacgaatgagtaaacacgcacagaccttcggagccaaacagccaacacaccagggtggaccagctcaggaccggggggtttacttaagccttctggcctccttacgaactagagcccagctcccggttgtagtgttcactttctcacggggcaggtgtgatgaacaggcctccgggttaacatcgttagacctcacgacctcctcagaaaaatccgaaatccacttgttcctccagcggtgcctggccagacttcgcggaagtgaccgtcagcttccccaggtgctccatatgtcggaacttctgaacagaggattaggtgttcatcactccggaatattaccaattctcaaagagattgtggagatgctgttctctagggggttggtaaaggtcctattcgccacggaaacctttgctatgggtgtgaatatgccggctaggaccgtcgtcttcgattctatgcgaaagcacgatggcagtaccttccgagaccttcttcctggcgagtatgttcagatggcggggcgggcaggccggcggggactcgacccgactgggacggttatccttctgtgtaagggacgcgtcccagaaatggcagacctacaccgtatgatgatgggtaagccctcccagctccagtcccagtttcggctaacttacacaatgatcctcaacctcttgagggttgatgccttaagagtggaagacatgatgaagcgttcattcagtgagttcccttcacgcaaggactcaaaggcgcacgaacaggccctcgctgagctgacgaaaagattgggggcccttgaggagcccgatatgaccggccagctagtagacttgcctgagtattatagctggggcgaggaactgaccgagacgcagcacatgattcagaggcgaatcatggagtctgtgaatggactcaaatctctcagcgccggtagagttgtcgttgtgaagaatcaggaacatcacaatgccttaggcgtgattctgcaggtatccagtaattcaacgtcccgggtgtttactactttggttctgtgtgacaagcccctctctcaggatcctcaagaccggggacccgcaacagcagaggtaccttacccggacgatcttgtcggctttaaactgttcttgccggaggggccctgcgaccacacagtggtgaagctccagcctggcgacatggccgctatcacaaccaaggtgctacgcgtgaacggtgagaaaatcttagaggacttttccaagcgccagcagcctaagttcaaaaaagatcccccactggcggctgtcactaccgcggtgcaggagctgctgcggcttgcccaagctcaccccgccggaccacccactctggatccagttaacgatcttcagctcaaagacatgtcagtggtggagggcggtctccgagcccgcaaattagaggaactgattcagggcgctcagtgcgtccacagcccacgttttcccgctcagtatctaaaacttcgggagcgcatgcagatccagaaggaaatggaaagactgcggttccttctgagcgatcagagcctcttgctcttgcccgagtatcaccaacgagttgaggtcctccggaccttagggtacgtagacgaagcaggcactgtgaagttggccggccgggtggcctgcgcgatgtcatcccacgagctactgttgaccgagctgatgttcgataatgccctgtccaccctgcgacccgaggagattgcagccctcctctcaggactggtgtgtcaaagcccaggtgatgccggagaccagctccccaatacactgaagcaggggattgaaagagtgcgagcagtcgcaaaacgaattggcgaggtgcaggtggcttgcggcctcaaccaaacagttgaggagttcgtgggcgagctgaattttggcctagtagaggtggtgtacgagtgggcgcgggggatgcctttcagcgagctggctggtctgagtggaacccctgagggactcgtcgtgaggtgcattcagagactagctgagatgtgtcgatccctacggggagccgcacggctcgtgggagaacccgttcttggcgctaagatggagactgctgccactcttctgcgccgcgatatcgtcttcgcggcatcattatacacccagtag

SEQ ID NO: 169193 - DNA, 2643 bp, Artificial Sequence
  derived and/or modified sequence
atgatggagacagaaagattagtgctgccccccccggacccacttgatcttccattacgtgcagttgaacttggctgcacaggccactgggagctgttgaatttgcctggtgccccagagtcttccctaccccacgggttgcctccgtgtgctcctgatctgcagcaggaggcggaacagttatttttgtcctccccggcttggcttcccttgcatggagtcgaacattccgctagaaagtggcagagaaagacggacccgtggagcctgctggccgttctcggcgcccccgtcccgtcagatctccaggcgcaacgacacccgactactgggcaaatcctaggctacaaggaggtcctgcttgagcattatctcttcacaggaaactcctcaaaaactcaaggggagctctttctgctcctggactctagaggtgctttccataccaaagggtactacgctgcagtggaggccaaaaaagagcgcatgagtaaacatgcgcagacctttggcgccaaacagccaacgcatcaaggcggcccagctcaggatcgaggggtctatttgtcgctactcgcctccctgcgaactcgggctcagctgcctgtggtcgtgttcactttcagtcggggtcggtgtgacgaacaagcaagtggactgactagcttagaccttacaacctcttctgagaaaagtgaaattcacctgttcctccagcggtgtcttgcccgactgagaggctcagatcgtcagttgccacaagtgttacatatgtccgagttgttgaataggggcttgggtgtgcatcactctggaatccttccaatcctcaaggagattgttgagatgctcttctcgcggggactcgtaaaagtattattcgccacagaaacattcgcaatgggggtgaacatgccagcccggacagtggtgtttgactcgatgcgaaaacatgatggatctacatttcgggatctgctcccgggtgagtatgttcagatggcaggcagagccggaagaagaggcctcgatcccacaggcaccgtcattcttctctgcaaggggagggttcccgagatggctgacctgcatcgtatgatgatgggaaaacccagccaactgcagtctcagttccgtctgacgtatacgatgatcctcaacctgcttagagtggacgcactgcgcgtggaggacatgatgaaacggtctttttcagaattccctagccggaaggactccaaggctcacgagcaggcattagccgagctcactaagcggcttggggcactggaggagcctgacatgactggacagctcgtagacctgcccgagtattactcgtggggagaagagcttacagagactcagcacatgatccagcgccgtatcatggagtcagtaaacggattgaagagtctctctgcaggacgtgtagtcgttgtcaaaaaccaggagcatcataatgctttaggtgttattctgcaggtgagctctaacagcaccagccgtgtcttcactactttagtgctatgcgataaacccttgagccaggacccacaggacaggggacctgccaccgccgaggtaccataccctgacgatctggtcggctttaagctgttcttgccagaaggaccctgcgatcacacagtcgtgaagctgcaacccggggacatggcagctatcactacaaaagtattacgcgtgaacggggagaaaatactggaagacttttcaaagagacaacagccaaaattcaagaaggaccctcccttagccgcagttaccacagcggtgcaggaactgctcagactggcgcaagcgcatcccgcggggcctcctactttggaccccgtgaatgaccttcagttgaaagacatgtccgttgtggagggcgggctgagagcacgcaagctggaagaattgattcagggcgctcagtgcgtacacagcccaagatttcctgcacagtacctgaagctaagagagaggatgcaaatccaaaaggagatggagaggcttagatttcttctgagtgaccagagtctgttgcttctcccagaataccaccagagggtcgaggtgctgcgaacgctgggatacgtggatgaggcagggaccgtgaaattggcggggcgcgtcgcatgcgctatgtccagccatgagctgctccttacagaattaatgttcgataacgccctgtcaactctcaggcccgaggaaattgctgcactgcttagcggacttgtttgtcagtctcccggggatgccggagatcaactgcccaatacactgaaacagggcatcgagcgagtgcgggctgtggcaaaacggattggtgaggtgcaggtggcttgcgggctgaatcagacagttgaggagtttgtaggtgagcttaacttcggactcgtggaggtcgtgtacgagtgggcaagaggaatgcccttctccgagctagccggactcagcggaacccccgaaggtctggtcgttagatgcattcagcgccttgccgaaatgtgccggtccttaagaggtgcagcgcgcttagtgggcgaacccgtcctcggggccaaaatggagacggccgccacccttctcaggagagatatcgtattcgcagcttcactatatacccagtag

SEQ ID NO: 169194 - DNA, 2643 bp, Artificial Sequence
  derived and/or modified sequence
atgatggaaactgagcgccttgtgctacctccacccgaccccttggacctgcctctcagggcggtggaacttggttgcacgggtcattgggagctcctcaacctcccaggtgcaccagagtcatccctgccccacggcctcccaccatgcgcacccgacctccagcaagaagctgaacagttatttctgagctcaccggcatggctaccgctccacggcgttgaacacagcgccagaaagtggcagcgaaaaacggacccttggtcccttctggctgtactcggggcacctgtaccctccgatctgcaggcccagagacacccaaccacagggcagatcttgggctacaaggaagtgctgctggaacattacctgtttacggggaattcatcgaaaactcagggagagctctttctgctgctcgacagccgaggtgctttccacacaaaggggtactacgcagccgtagaggccaagaaggagaggatgtcaaagcacgcccagacttttggggctaaacaaccgacacatcagggtgggccagctcaggaccgtggggtatatttgtcgcttctggcatctttgcgtactcgggcccaacttcctgtggttgtgttcacgttttcacgcggtagatgtgacgaacaggcctctggcctgactagtctagaccttactacaagcagtgaaaagtctgagattcacctctttctgcagcgctgtcttgcgcgtctgcgaggttccgacaggcagctgccgcaggtgctgcatatgtccgagttgctgaaccgtggcctgggggtccaccactcgggcatcctgccaattctcaaagagatcgtggagatgctatttagtaggggcctcgtgaaggtcctctttgcaacagagacgtttgccatgggcgtcaatatgcctgcccgcacagttgtgtttgactcaatgcggaaacacgacggctcaacgttcagggatctcttgcccggcgagtacgtgcagatggccggtagagcgggccgcagaggcttggatcctaccgggacagtcattctactgtgtaaaggaagggtgcctgagatggccgacctccaccgtatgatgatgggtaaaccaagccagttgcagtcgcagtttcgcctgacttatacgatgatcctgaacttattgagagtggatgcactacgggtggaagatatgatgaagcgtagttttagtgagtttccatcccgtaaagatagcaaggcacacgagcaggccctggctgagctcacaaagcgactgggcgctctcgaggaacccgatatgaccggccaactggtggatctccctgagtactattcctggggcgaggagttgactgaaacccagcacatgattcagcggcgaatcatggagtctgtgaatggattgaagtcgctgagcgccggcagggtcgtggtcgttaaaaatcaggagcatcataatgcgctaggagtgatactgcaggtgtctagtaacagcacatctcgagttttcacaacacttgtcttgtgcgataaaccgctgtctcaagatccacaggacaggggcccggccaccgcggaggtgccataccctgacgacttagttggtttcaaactgttcctccctgagggaccttgcgatcatactgtggtgaagttgcaaccaggtgacatggccgctattacaacaaaggtgcttcgagtgaacggtgaaaaaatactcgaggacttctccaagcggcagcagccgaaattcaaaaaagaccctcctttagctgctgtgactacagctgtgcaggagctcttgcggcttgcgcaggcacacccagcgggcccacccaccttagaccctgtcaacgacctgcagctgaaggatatgtctgttgtagagggggggctccgcgctcgtaagctagaagaacttattcagggcgcgcagtgtgtgcatagtcccagattccctgcccagtatctaaaactgcgcgaaaggatgcagatccaaaaggaaatggagaggttgaggttcctgttaagcgatcagagcctgttgctcttgcccgagtatcaccaaagggtcgaagtgctgcgaactcttggctacgtcgacgaggctgggactgtgaagctagcagggagagtggcctgtgctatgtcttcgcatgagttgctgctcaccgaattgatgttcgataacgctctgtcaaccctcaggcctgaggaaatcgctgctttgctgtcaggactggtctgtcagagcccgggcgacgccggcgatcagctgccgaacactctcaagcaagggatcgaaagggtgagggcagtagccaagcgcattggagaggtgcaagtagcgtgcggactgaatcaaactgtggaggagttcgttggcgaactaaactttggattagttgaggtggtttacgaatgggccaggggcatgcccttttcagaactggctggactgtctgggaccccagagggtctcgtggtacgctgcattcaacgcctggccgagatgtgccggtcgttgcggggcgcagctcgcctcgtcggtgaacctgttcttggggctaagatggaaactgccgccactttgcttagaagagacatcgtgttcgctgcatcactgtacacccagtag

SEQ ID NO: 169195 - DNA, 3267 bp, Artificial Sequence
  derived and/or modified sequence
atggatgaacctacaattacggaccttaacacaagggaagaagcagaagaggagatcgattttgagaaggatctgttgactatacctcccggattcaagaaaggcatggactttgctccaaaagattgcccgacccctgcacccggactactgtctctcagttgccttctagagcccctcgatttgggggggggcgacgaagacgaaaatgaggccgtgggtcagccagggggaccaaggggtgatacggtgtccgcttcaccctgcagcgctcctctggcccgcgccagctcattggaggatttggttctgaaggaggcatctaccgcagtctcgacacccgaggctccagagccaccctcccaagagcagtgggcaatcccagtggacgccacatcccccgtgggagacttttaccgcctgatccctcagccagcctttcagtgggcattcgagccggatgtctttcagaagcaggccatcttacacctcgaaagacatgactctgtctttgtagctgcccacacgtccgccgggaaaaccgtcgtcgcagagtatgcgatcgctcttgcccaaaaacacatgaccaggactatatatacatcccccatcaaggccctctccaatcagaaatttcgggacttcaggaatacattcggggatgtgggattacttactggagacgtccagttgcaccctgaggcctcctgtcttatcatgactacagagattctaagaagtatgctatactcaggcagtgatgtgatccgtgaccttgagtgggtcatcttcgacgaagtacactacatcaatgacgttgagcgcggtgtggtctgggaggaggtcttgattatgctgcctgatcatgtaagcatcatcctcttgtctgcgaccgttcctaatgcgcttgaattcgccgactggattggccgcctgaagcgacggcaaatttacgttatttccacagtgacccggcctgtacccttggaacattacctgttcaccggcaactccagcaaaactcagggcgaactctttctcttgttggatagtcgaggagcctttcatactaaaggatactacgctgcagttgaagccaaaaaggagcggatgtctaaacatgcacagacattcggcgccaagcaacccacccaccagggcggccctgcacaggacagaggggtctatctttctctgctcgcatctctgagaacacgagcccaactgccagtggtagtgttcacattttctagaggacgctgtgacgagcaggcctccggtctgacctcactggatcttaccacatcctcagagaaatccgagattcacctcttcctgcagcgatgcctagctcgcttgcgcggctcagatcgtcagctgccccaggttctgcacatgagtgagttactgaaccgcggccttggcgtgcatcattcaggcatcttgcccattcttaaggagatcgtggaaatgctgttttccaggggtctggtaaaagtgttatttgcaactgaaactttcgcgatgggagtcaacatgcctgctagaaccgtagtctttgatagcatgaggaaacacgacggatcgaccttcagagatcttttaccaggggagtacgttcaaatggcgggtcgagccgggcggagaggtcttgaccccactggaaccgtgattctgttatgtaagggaagagtgccagaaatggctgatctgcaccgaatgatgatggggaagccctctcagctgcaaagccagttccgactgacgtataccatgattttaaacctgttaagggtcgacgctttaagggtggaagacatgatgaagaggagcttttctgagttcccttccagaaaggattccaaggcccacgagcaggctcttgctgagctgaccaagagactcggcgcattagaggagcctgacatgaccggtcagctggttgatctccctgagtactatagctggggcgaggagctgaccgaaacccaacacatgatccaaagaagaattatggagtcagttaatggcctcaagagtctcagcgctgggcgggtcgttgtggtcaagaaccaagagcatcataacgccctaggagtgatcctacaggtttcgtctaatagtacatcacgtgttttcaccacacttgtgttatgcgacaaacccctgtctcaggaccctcaagatcgaggtccagcgaccgccgaagtgccataccctgacgatctcgttgggttcaagctgttcctccccgagggcccctgcgatcatacagtggtgaaactgcaacccggcgatatggctgccattaccacaaaggtgctgagggtcaatggcgagaagatactcgaagatttttctaagcgccagcaaccaaagttcaagaaggaccctccgctcgccgcagtgacaaccgcagtccaggagctgttgagactagcacaagctcatcctgctggacctcccactctggatcccgtgaacgaccttcaactgaaagatatgtccgtggtagagggggggctgagagctcgcaaactggaggagctcattcagggagctcagtgcgtacatagtccacgcttccccgctcagtaccttaaactgagagagcgcatgcagattcaaaaggagatggaaaggcttaggttcctcttgtcagatcagtctcttctcttgctgcccgagtatcatcaacgagtggaggttctccggaccctgggttatgtggatgaagcgggaacagtgaagctggctggaagggtggcttgcgctatgagcagccatgaactgctgttgacggagttgatgttcgataatgccctgtctactctgcgtcccgaagaaatagcagcactgctgtccggcctggtgtgtcagagccctggtgatgcaggtgaccagctccctaataccctgaagcagggcatcgaacgtgtgcgcgccgtggcgaaaagaataggggaggttcaggtggcatgcgggctgaatcagacagtggaggagtttgtcggggaactgaatttcggtctcgtggaggttgtctacgagtgggcacgcggcatgcccttttctgagttggctggtcttagcggcaccccggaggggctggtcgttcggtgcattcagcggctggctgagatgtgcagaagcctgcggggggcagcccgcctggttggagagcccgtgctgggcgccaagatggagactgccgccacccttcttcgacgcgatatcgtgttcgcagcatcactgtacacccagtag

SEQ ID NO: 169196 - DNA, 3267 bp, Artificial Sequence
  derived and/or modified sequence
atggacgagccaactataacagacctgaacaccagagaggaagctgaggaagaaattgactttgaaaaagatctgctcactattccgcccggattcaaaaagggcatggatttcgcacccaaagattgtcccactcctgccccagggctactctctttgagttgcctgctcgagccccttgacctcggcggtggagacgaagacgagaatgaggccgtcggacagccaggaggacctcgcggcgatacagtcagtgctagcccttgttcggcccccttggcgcgagcatcttctctcgaagaccttgtgctgaaagaagcaagtaccgccgtctctaccccagaggcacccgaaccaccgtcccaagagcagtgggccatacccgtcgacgccacatctccagtgggagacttttacaggctgatcccgcagccagcttttcagtgggccttcgaacccgatgtgttccagaaacaggcaatcttgcacttggaaagacacgatagcgtcttcgtggcggctcatactagtgcaggaaaaacggtggtggccgagtatgcgatcgccctcgcccagaaacatatgacaaggacgatctatacttctcccatcaaagccctgtcgaaccagaaattcagggatttccgtaacaccttcggtgacgtcggactactgactggcgatgttcagctgcatccagaggcttcatgcttgatcatgaccaccgagatcctccgttcaatgttatattcgggctctgatgttattagggacttagaatgggtgatcttcgatgaggttcactacataaatgacgtggagcggggcgtggtgtgggaggaggtattaatcatgcttcccgatcacgtcagcatcattctcctatctgcgaccgtaccgaacgccctcgaatttgccgattggatcgggcgactgaaacggaggcagatctatgtaatatcaaccgttacccgacctgtgcccctggagcactacctcttcaccgggaattctagtaagacccagggagagctctttctgctcctcgacagtagaggggccttccataccaagggatactatgctgcggtggaggctaaaaaggagcggatgtctaaacatgcacagacattcggtgcaaagcaacctactcatcaggggggccctgcacaggatcgaggagtctacctcagtttgctcgccagcctgagaaccagggcccagctgcctgtggtcgtgtttactttttctcgggggagatgcgacgagcaagcgtcagggctcacttccctggatctcactacctcaagcgagaagagcgaaattcatctgtttctccagagatgtctcgcgcgcctccgcggaagtgatagacaacttcctcaggttctgcacatgtcagaactcctcaaccgggggctgggtgtccatcactctggaatccttccaatactcaaagagattgtggagatgctgttcagccggggactggtgaaagtactttttgccacagagaccttcgccatgggcgtgaacatgccagctcgaaccgtggttttcgatagtatgagaaagcacgatgggagcacgtttcgtgacctcctgccaggagagtacgtgcagatggccggtcgcgccggccgccggggcctcgatcctacggggacggttattttgctctgcaagggcagagtacctgaaatggctgatctgcataggatgatgatgggcaagccttcgcagctgcagtcccaatttcgcctgacctataccatgatattaaaccttctgcgcgttgatgcattgcgagttgaagacatgatgaagcggtccttttcagaatttcctagcaggaaagactcaaaggcccacgagcaggcccttgctgaactgacaaagaggctcggcgccctagaggagccggatatgacaggccagctcgttgaccttcccgagtattattcatggggagaagagctcactgaaacacagcatatgattcagagacggatcatggaatccgtcaatgggctgaaaagcctttccgctggacgagtagttgtggtgaagaaccaggagcaccataatgcacttggcgtgattctgcaggtaagcagtaacagcaccagccgggtattcactacgctggtattgtgtgacaaacctctctcccaggatccgcaagatcgtggacccgcaaccgcagaggtcccgtaccccgacgacttggttgggtttaagctgttcttacctgaaggaccctgtgatcataccgtggtcaaacttcagcccggagacatggccgctataaccacaaaggttttgagggtgaatggcgaaaagatccttgaggattttagcaagaggcagcagcctaagtttaagaaagacccacccctcgcggctgttacgactgcagtccaggagctgctccgactagctcaagcacaccccgcaggtccacctactctggacccagtgaatgatctgcagctcaaagacatgagcgtggtcgaaggaggtctcagagcccgaaagctggaagaacttatacagggtgcacagtgcgtgcactcgccaaggttccctgctcagtacctgaagctacgcgagaggatgcaaatacagaaggagatggagcggctgaggttccttctctccgaccagtcactgctgttgttacccgaatatcatcagagagtggaagtccttagaaccctggggtacgtcgacgaagccggaacagtcaaattagcagggagggtcgcgtgtgcaatgtcatcacacgaactgcttctgacggagctcatgtttgataacgccttgagtacattgagaccagaagagatcgctgctctcctcagcggtcttgtgtgccagagtccaggggatgccggagatcagcttccaaacacattaaaacagggcatagagagggtgagggccgtcgctaaacgaatcggagaggttcaggtggcatgtggtttgaatcagacggtggaggaatttgtaggagagctcaatttcggcttggtggaagtggtttatgagtgggcccgaggtatgcccttttctgagcttgctggactgagcgggacccctgaagggctggtggtccgatgcatacagagactggcggagatgtgtcggtcgctcagaggagcagcacgcttggtgggagagcctgtgttgggggctaaaatggagaccgcggctaccctcctgcgccgggacatcgttttcgctgcatctctctatactcaatag

SEQ ID NO: 169197 - DNA, 3267 bp, Artificial Sequence
  derived and/or modified sequence
atggatgagccgactatcactgatttgaacactcgggaggaagccgaggaagagatcgactttgagaaagatctcttgacgatcccacctggattcaagaagggtatggactttgccccaaaagactgtcccacccccgcacctggcctcctgtcactttcatgtatgttggagcctctggatttgggaggaggagatgaggacgaaaatgaagctgtgggacagccaggagggccgcgaggggacacagtctcagcatccccctgctcagcccccttagcaagggcttcaagtcttgaggacctggtgttaaaggaagcctccaccgcagtttcaactcctgaagccccggagccccctagtcaagaacagtgggccataccagtggatgcaaccagcccagttggtgatttctataggctgattcctcagcccgcatttcagtgggctttcgaacctgatgtcttccagaaacaagccatactgcatctggagcgccacgatagcgtcttcgtcgcagctcacaccagcgccggcaaaaccgtcgtggctgagtacgccatcgcactggcacagaagcatatgacacgtacaatctacaccagtccaatcaaagctctcagcaaccagaagttccgcgacttcaggaacacctttggcgatgtcggactgctgacaggcgacgtgcaactccatcccgaggcatcttgtctgataatgaccacagaaatactgaggagtatgctttacagtggtagtgacgtgatccgagacctggaatgggtgatcttcgatgaagtgcattacattaatgatgtcgaaagaggcgttgtttgggaggaagtgctgatcatgctgccagatcacgtgagcattatcctgctgtccgccaccgtacctaatgctcttgagttcgcagattggatcggcaggctcaaaagacggcagatatatgtgatctctacagtgacaagacctgtgcctcttgagcactatctcttcaccggtaatagcagcaaaacacagggcgaactttttcttctcctcgatagccgtggagcattccacactaaggggtactacgcagcggtggaggcgaaaaaggaaaggatgtcaaaacatgcccagacattcggcgctaaacagccaacccaccagggaggtcctgcccaggatcgaggggtgtacctcagcctcctggcatccctgcgtacgagagcgcagctgccagttgtggtgttcacattttcccgcgggcgctgtgatgaacaggcttccggtctgacctctttagaccttactacgtctagcgagaaatccgagatccacctcttcctgcagcggtgtcttgcccgactacgcggcagtgatcgccaactcccccaggtccttcacatgagcgagcttctcaatcgtggattaggcgtgcatcatagtggaatcctgcctattcttaaggaaattgttgaaatgctgttttcccgtggactggtaaaagtcctgtttgctactgaaacatttgccatgggagtcaacatgcccgcacgcacagttgtatttgatagcatgaggaagcacgacggtagcactttcagggatctattgccaggtgagtatgtgcaaatggctgggagagcggggagaagggggctggatcccactggaaccgtgatcttactctgtaaggggagggtcccggaaatggcggatctgcaccgtatgatgatggggaagccctcccaactgcagtctcagttcaggctcacctacactatgatcctgaacctactccgggtagatgccctgcgagtggaggacatgatgaagcgcagcttttccgagttcccatctaggaaggactcaaaggctcatgaacaggccctggctgaactgaccaagagactgggtgcactggaagagcccgatatgactggccagctcgtagatcttccagagtattacagttggggagaggagctgaccgaaacgcagcatatgatccaacggagaatcatggagtctgtgaatggcttgaagtcgctgtccgcaggaagggtggtcgttgttaagaatcaagaacaccataacgccctgggggtcatacttcaggtatcttctaatagcacctcgcgggtattcaccactttagttctgtgtgataagcccctcagtcaagacccacaggacaggggacctgccacggccgaagtcccctaccccgatgatctcgtcggttttaaattgttcctgccagagggcccttgtgaccacaccgtggtgaagctgcagcccggcgatatggccgccatcaccacaaaagtgctgcgcgtaaatggagagaagatattagaggatttttcgaaaagacaacaaccaaagttcaagaaagatcctccgctggccgctgtcaccaccgccgtgcaagaactattgaggcttgcccaggcgcaccctgccggccccccaacgcttgacccagtaaacgacctccagttgaaggacatgagcgtggtggaaggaggattacgggcacggaagctggaagaactgattcagggtgctcagtgcgtgcactcaccaaggtttcctgcccagtatttgaagctgagggaaagaatgcagatccaaaaggagatggaacgtctcagatttttgcttagcgaccagagcctgttgcttctaccggagtatcatcagagggtcgaggtcctgcgaaccctggggtacgtggacgaggctggcacggtgaaactcgccggccgagtcgcatgtgctatgtcgagccacgagctcctgctaactgagctgatgtttgataacgctctgtcaactctcagaccagaagagattgcagctttgctgagtggcttggtgtgccagtcccctggcgatgcaggcgatcaactaccaaatacactgaaacaagggattgaaagggtccgcgccgtagcaaaacgcatcggagaggtccaggtcgcctgtggcctgaaccagaccgtggaagagtttgtgggggagcttaatttcggccttgtcgaggtggtgtatgagtgggcccggggcatgcccttttccgagctggctggactttcaggcactccagaggggctggtcgtgagatgcatccagagactggccgagatgtgcaggagcttgcggggagcagcccgtctcgttggcgaacctgtacttggagccaaaatggaaacagcggcaacactgttgcgcagagacatcgtcttcgctgcatctctgtacacccagtag

SEQ ID NO: 169198 - DNA, 2643 bp, Artificial Sequence
  derived and/or modified sequence
atgatggagactgagcgacttgtactgccacctcccgacccgttagaccttcctcttagagcagtcgaattaggatgcactggccattgggagctgcttaatctccccggcgcccccgaatccagcttgccgcacggactgcccccttgtgctccagatttgcaacaggaagccgaacagctatttttatcaagcccagcttggctgccactccatggcgttgaacactccgcccgaaagtggcagagaaaaacggatccatggagtctgctggccgtgcttggagctcctgtccctagcgatctacaagcacaacggcaccccactaccggccagattctggggtacaaggaggtgctgctggagcattatctatttacaggtaactcttcaaagacccagggggagctgtttctgctgctggattcacgtggcgctttccacaccaaaggatattatgcagctgtcgaggccaaaaaggagcggatgtccaaacatgctcaaacattcggcgccaaacagcccactcaccaaggtgggcctgcccaagataggggggtatacctaagcctcttagcatccctcaggaccagggcacagctcccagtcgtggtcttcactttctcaaggggacggtgtgatgaacaggctagcggcttaaccagccttgacctgacaacctcctctgagaagtctgaaattcacctattcttacagcggtgtctggccagactgcgggggtctgacagacagcttccacaggtactccacatgtcagagctcttgaaccgcggcctcggcgtgcatcattcagggatcttacctatcctcaaggaaatcgtagaaatgctcttctctcggggtctggtgaaggtactttttgcgactgaaacctttgccatgggtgtcaacatgccagcgcggaccgttgtttttgattccatgcggaagcatgacggatccaccttccgagatctgctgcctggcgagtatgtacagatggcaggacgggcaggtcgccgggggcttgatcccactgggacagtgattctgttgtgcaaggggcgagtgcccgagatggctgacctccatagaatgatgatggggaaaccatcacagttgcaaagccagtttagactcacgtataccatgattctgaacctcttgcgggtcgatgctctgcgcgtcgaggacatgatgaagcgaagtttcagtgaattcccctcccgcaaagactccaaagctcatgagcaggcccttgccgagctcactaagcgcctgggagccttggaagaacctgacatgacagggcagcttgtggacctgcctgagtattactcatggggagaggagctgacggaaactcagcacatgatacaaagacgtatcatggagtccgtaaacggcctcaagtccttgtcagccggccgggtagttgtggtgaaaaatcaagagcaccacaatgccctaggagtgatcctgcaggtgtcctccaacagcacatcccgtgtctttacgactttggtgctgtgcgacaagcccctaagccaggatccacaggaccggggccctgcgacggcagaggtgccatatccagacgatctagttggatttaaactgttccttcctgagggtccatgtgatcatacagttgtgaaattgcagcctggcgatatggccgcaattacaacaaaggtgcttagggtaaacggggaaaaaatcctggaagacttctctaaacgccagcagccaaaattcaagaaagatccccctctagctgctgtaactacggcggtgcaagagctccttcgccttgctcaagcccacccagctggaccaccaacccttgatcctgtaaacgacctccagttaaaggatatgtccgtcgtagaaggtgggctgagggctaggaagctcgaggagctaattcagggcgctcagtgtgtgcactctcctcgcttccccgctcagtatctgaagctgcgggaacgaatgcagatacagaaggagatggaaagactgcgttttctcctaagtgatcagagtctgctcttgcttccagagtaccatcaacgagtggaagtcctgcggactctaggatatgtcgatgaggctgggacggtaaagctggctggcagggttgcgtgcgctatgagcagtcatgaactgctcttaaccgaacttatgtttgacaacgcactgtccacactgagacccgaggagatcgctgctctgctcagcgggctcgtgtgtcagagtccaggagatgcgggtgaccagctgccaaacaccctgaaacagggcatcgagcgcgtgcgcgctgtcgctaaaaggattggggaagttcaggtcgcttgcggactgaaccagactgtagaagagttcgtgggggaattgaattttggtcttgttgaggttgtgtatgaatgggctaggggcatgcccttttccgagctggcaggcctatctggaacccccgaaggactggtcgtgcgctgcattcagcgccttgctgaaatgtgccggagcttgcgcggcgccgcccggctcgttggggaacctgtgctaggcgctaaaatggagactgccgccaccttgttgaggagagacatcgtgttcgctgcatcattatacacccagtag

SEQ ID NO: 169199 - DNA, 3162 bp, Artificial Sequence
  derived and/or modified sequence
atggacttcgctccaaaggactgtcccactccagccccgggcctcctcagcctgagctgtctcctggaaccgctggacctgggaggcggtgacgaggacgagaacgaagccgtcggacagcctgggggcccacgaggcgataccgtgagcgcttcaccctgttctgccccgttggcgagagcctcatcactcgaggacttggttctgaaggaagcctctaccgctgtttctaccccagaagctcccgaacccccttctcaagagcagtgggcaattcccgtggatgcaacctctcccgtgggcgacttttacaggctcatccctcagcccgcatttcagtgggcttttgagcccgacgtcttccaaaaacaggctattctacatctcgagcggcacgacagcgttttcgtagcagcacatacaagtgcaggaaaaacagtggtggccgagtacgccatagctctggcccaaaaacacatgactagaacaatatatacatccccaatcaaagccctgagtaatcagaagtttagggatttcaggaacactttcggcgacgttggactactcactggggacgtccagctgcatccagaagcctcttgtctcattatgacaacagaaatcctccgaagcatgctgtatagtggatctgacgtcatccgtgatctggaatgggtaatttttgacgaggttcattacataaatgatgtggaaaggggggtggtctgggaggaggtattaatcatgctgcccgaccacgtctcaattatactcctttcggcaaccgtccccaacgcactggaatttgctgactggatcggacgattaaagcgaagacagatatatgtgatctctactgtgaccagacctgtcccattggagcactatcttttcactggtaactcctcaaagacacaaggggagctctttctgctactagactcgcgcggggctttccataccaaaggttattatgcggcggtggaagcaaaaaaagagagaatgtctaaacatgcccagacattcggggctaaacaacccacacatcagggcggcccggcacaagaccgtggcgtgtacctatcattattagccagcctgcggacaagggcccagctgccggtggtggtctttaccttctctagaggcaggtgcgatgaacaggcgtctggactgacctctttggacctgacaaccagctctgaaaaatccgagattcacttattcttgcagaggtgccttgcccgattacggggcagtgaccgtcagctgccacaggtcctccatatgtcggaactactcaacagagggctgggcgtccatcattcaggtatcctgcccatcctaaaagagattgtggaaatgctcttctcacggggcctggtcaaggtgctgtttgctaccgaaacatttgcaatgggggtgaacatgccagcacggaccgtggtgtttgactccatgaggaagcacgacggctctactttccgcgacctgctcccaggggagtacgtccagatggctggtagggctggcaggagaggcctggatcctacaggcactgttatcctgctgtgtaagggccgcgtgcctgagatggctgatctgcaccgcatgatgatggggaaaccaagccaactgcagtcccaatttcgcttgacttacacgatgatcctgaatctgcttcgggtagacgcattaagggtagaggacatgatgaaaagatcattctctgaattcccttcccgcaaagatagcaaagcccacgaacaggctctggccgagctgacaaaacggttaggtgcgcttgaggaacccgatatgactggacaactggtcgatctgccagagtattacagctggggtgaggagctcactgaaacccaacatatgatccagcggcgaatcatggagagtgttaatgggctgaagtccctttcagccggcagggtggtagttgtaaaaaaccaagagcaccacaatgcattgggtgttatcctgcaggtgagctctaactccacctcaagagttttcacgacacttgtgctgtgtgataagcccttgtcccaggatccacaggatcgcgggcccgctactgctgaggtgccctatcccgatgacctcgtcggctttaagctctttctccctgaaggcccttgcgaccatacagtggtgaaactgcaacccggtgatatggctgcaattacgactaaggtcctccgggttaacggtgagaagatcctcgaagacttttcaaagcgtcagcaaccaaaatttaagaaggatccaccgctcgcggccgtgaccacagccgtgcaggagttgctcagactggcacaggcacaccccgcaggacccccgactttagatccagttaacgatctgcaattgaaggacatgtccgtagtggagggaggtctgcgggcacgtaaacttgaggaactcatccagggagcgcaatgtgtccattccccccgtttccccgcacagtacctcaagctgagggaacggatgcagatccagaaagagatggagagattacgattcctcctttctgaccagtctctcctgctcctgcctgagtatcaccagcgtgtcgaggtgctcagaacacttgggtacgtggacgaggcggggacggtgaaactggcaggaagagttgcctgcgccatgtcttcgcatgaactactgctgaccgagttaatgttcgataacgccctttccacattacgccccgaagaaatcgcagcgctcttatccggactggtttgtcagtcccctggcgacgccggagaccaactcccaaacacattaaaacaagggatagaacgcgtgcgcgccgttgcgaagcggattggagaagtacaagtcgcatgtggactgaatcaaaccgttgaagaattcgtgggcgaactcaattttggactggtggaagttgtatatgagtgggcccggggcatgcctttttccgaacttgccggactgtcgggtactcccgagggtctggtggtcagatgcatccagcgacttgcggagatgtgtcgcagcctgcggggggcagcacgactggtgggcgagcccgtactcggagccaagatggaaactgcagctactctcctgcggcgggatattgtttttgctgcaagcctgtacacccaatag

SEQ ID NO: 169200 - DNA, 3162 bp, Artificial Sequence
  derived and/or modified sequence
atggactttgctccgaaagattgtcctaccccagcaccggggttgttgagcctgtcgtgcctcctggagccacttgacctgggaggcggggatgaagatgaaaacgaggcagtgggtcagcctggtggcccccgcggagacaccgtctctgcgagcccctgcagtgctccactggcccgcgcttccagcctggaggacctggttctgaaggaggcatctaccgcagttagtacgccagaggcccctgagccaccttcccaggaacagtgggccatcccggtcgacgccacatcccctgttggtgatttctaccggctcatcccgcagccggctttccaatgggccttcgaacccgatgtttttcagaagcaggcaattctgcatcttgagcgacatgatagcgtgttcgttgccgcccacactagtgccgggaagacagtagttgcggaatacgctatcgctttagcccaaaagcacatgacaagaacaatttacacttcacctattaaagctttgagcaaccagaagtttcgagacttcagaaacaccttcggtgatgttgggttgttaacgggcgacgtgcagctccaccctgaggcttcttgcttaattatgactacagaaattctcagatccatgctgtacagcggcagcgacgtgatcagagacctagagtgggtaatcttcgatgaagtgcattacatcaacgatgttgagaggggggtggtgtgggaagaggtgctcattatgctgccggaccatgtgagtattattctgctctcagcaactgtaccaaatgccctggagtttgctgactggatcggccgactaaagcggcgacagatttatgtgatatccaccgtgacacggcccgtccccttagagcactaccttttcaccgggaactcgagtaaaacccagggcgaactgttcttacttttggactccaggggcgcattccatacaaaaggctactacgccgccgtcgaggcaaaaaaagagcggatgtccaagcacgcccaaacattcggggctaaacagccgacacatcaggggggccctgcacaagatagaggcgtctacttatcactgctcgccagcctgcgcacacgcgctcaactgccagtggtggttttcaccttcagcaggggtagatgtgacgagcaggcctccggactgactagtctcgatctgactacctctagcgagaagtccgaaattcacctgtttctgcagcggtgtcttgcccggttacgaggctccgataggcagctcccccaagtgttacatatgtccgaactactgaaccgaggcctgggggtgcatcattctggcatcttacccattctgaaagagatcgtggagatgctgttttcgcgaggattagtaaaagtgctcttcgccacagagaccttcgcgatgggcgtaaacatgcctgcacgcacagtcgtgttcgatagtatgcgcaaacacgacgggtccaccttcagggacctgttgcctggtgaatatgtgcagatggcaggccgcgctggaaggcgagggcttgatccaaccggaacggtaattttactctgtaaggggcgagtcccagagatggccgacctacaccggatgatgatgggcaagcccagccaacttcagagtcagttcagactgacatatacaatgatactgaatttgcttcgagtggacgccttgcgtgtggaggatatgatgaaacggagcttctccgaatttccttctcgaaaagactctaaggcgcacgagcaggctctcgccgagctgactaagcgcctgggggccctggaagaacctgacatgactggccagctcgttgatctgccagaatactactcctggggcgaggaactcaccgagacccagcacatgattcagcggaggattatggagagtgttaacggattgaaatccttgagcgcggggagggtggttgtggtgaaaaaccaagagcatcataacgcactgggtgtgatcctgcaggtgagctctaattccacgtctagggtctttactactttggtcctgtgcgacaagcccttgagtcaggatcctcaggatagaggccccgccacagctgaggtcccataccccgatgatcttgtcggttttaaactatttcttcctgagggtccttgcgaccacaccgtggtcaagctgcagcccggcgatatggcggctattacaacgaaggtgcttcgggtgaatggagagaagatcctagaagacttctcaaagagacagcagcccaaattcaaaaaggatccaccactggccgccgtcaccaccgctgtccaggaactcttaagactggcccaggcccaccctgcagggcctcctactctcgatccggtaaatgatctgcagctcaaggatatgtccgtggtagaaggtggccttagagctagaaagttggaggagctgatccagggtgctcagtgcgtgcactccccacgctttcccgctcagtacctcaagcttagagaacggatgcagattcagaaagagatggagaggttgaggttcctgttatcagatcagtcactgctgctcctccctgagtaccaccagagggtagaggtactgagaaccctgggttatgtggatgaggctggcactgtaaaattggctggccgcgtcgcctgtgctatgtcatctcacgaactgctgttaactgagctcatgttcgacaacgcactctccaccctgcgtcctgaagaaatcgcagccctgctcagcggcctagtgtgccaatcccccggggatgccggggatcagttgccaaataccctgaagcagggaatcgagagggttcgagctgtggcaaagcgcattggtgaggttcaggttgcctgcggccttaatcagactgtggaagagtttgttggagagttgaactttgggcttgtagaagtcgtgtacgagtgggcccgcggaatgcccttttcagagctcgcaggcctgagcgggaccccagaagggttagtggtgaggtgtatccagagactggccgagatgtgcagatcactgcgtggggcggcccggctcgtgggggagccagttctcggagctaagatggagaccgcggcaaccctcctgcgccgcgacatagtctttgcggctagcctgtatactcagtag

SEQ ID NO: 169201 - DNA, 3162 bp, Artificial Sequence
  derived and/or modified sequence
atggactttgctcccaaggattgtccaacaccggcacctggcctgctgtccctcagctgtcttcttgagccacttgacctgggaggcggagatgaagacgaaaacgaagctgtcggccagccaggcggtccaaggggggacactgtctccgccagtccatgcagcgcacctctcgctcgagcttcgtctcttgaagatcttgtacttaaagaagcatctacagccgtaagcacccccgaggccccagaacccccctcccaggagcagtgggccatacccgtggacgctacgtcgccagttggtgatttctataggctcatcccacaaccggccttccagtgggccttcgagcctgacgtgttccagaaacaggccatactgcatctcgagcggcatgactcagtgtttgtcgccgcacatacatctgcagggaagactgtagtcgccgaatacgccattgcgctggctcagaaacatatgacgagaaccatctacactagccctatcaaggcgctctctaaccaaaagttcagagattttcggaacacctttggagacgtggggctcctcaccggagatgttcagctacacccagaggccagttgcttaattatgaccacggagatcctccgctcaatgctctatagcgggagtgatgtgattagagacctggagtgggtgatcttcgacgaagttcattacattaatgatgtcgaaagaggcgtggtctgggaagaggtcctcatcatgttaccagaccatgtgtccatcatcctgttgagcgcgactgtgcctaacgctttagaattcgccgactggattgggaggctcaaacgccgtcagatttacgtgatctctactgttacccggccagttcccctcgagcactacctgtttactggcaattcctcaaagacacagggagaacttttcctcctcctggatagtaggggcgcatttcacacaaaaggatattatgccgccgtggaagctaaaaaggagagaatgtcaaagcacgcgcaaacatttggagccaaacagccaacccaccagggaggccccgcacaagataggggggtataccttagcctgctagcctcgttgcgaactagagcccagctgccagtagtcgtgttcaccttttcccgcggccgttgtgacgagcaggcgtccggcttgaccagcttggatctgaccacatccagcgaaaaatccgaaattcatcttttcctccagcgctgtctggcccgcctgagaggcagcgacaggcagctgccacaggtactgcacatgagcgagctgcttaaccgaggcttaggggtgcatcatagcggtatcctgcccatccttaaagagatagttgaaatgctgttctcaagaggcctggtgaaagtgctttttgcaaccgagacctttgcgatgggcgtgaacatgcctgctaggaccgtggtttttgacagtatgaggaaacacgacggaagcaccttccgggatcttcttccgggcgagtatgtgcagatggccggaagggccggtaggcggggtctagacccaaccggcactgtcattctcctttgcaaaggccgagtgcctgagatggcagacttacatagaatgatgatgggtaagccctctcagttacagtctcagttcagactgacctatacgatgatcttgaacctgcttcgggtggatgccctccgtgttgaggacatgatgaagcgatctttctcagaattcccctcaaggaaagattccaaggcccatgaacaggcgttggcagagctcacaaaaaggctcggcgccttggaagagcccgacatgacagggcagttggtcgacctgccagagtattactcatggggagaagaactgacagaaacacaacacatgatacagaggcgcatcatggagagtgtaaatggcctgaaatccctgtctgctggtagagttgtggtggtgaaaaaccaggagcaccacaatgcccttggcgtgatcctccaggtgagttcgaattctacctcacgggtttttaccactctggtgctgtgcgataaacctttaagtcaggacccccaggatcgtggccccgccacggccgaagtcccctaccctgatgacctggtcggatttaagctgttcctccccgaaggaccttgcgatcacacagtcgtcaaattgcagcctggcgacatggctgccatcacgacaaaggtgctccgggtaaatggagaaaagatcctggaagactttagcaagcggcagcaaccgaagtttaaaaaggatcctcccttggctgccgtgaccacagccgtacaggaactgctgaggctggcccaggctcaccctgccgggccccctaccctggatcctgtcaacgacctccagctaaaggatatgtctgtggttgaaggaggtttgcgcgctcgaaagttagaggagctcatacagggtgcacagtgtgtgcattctcccaggttccctgctcagtacttgaaactgagagaacggatgcagattcaaaaggagatggaaagactacggttcctcctgagcgatcaaagtttgctgctgctccctgagtatcaccagagggtggaggtcttgcggactctgggatacgtggatgaggccggcacggttaagctggcgggtagggttgcttgcgcgatgagttctcatgagttactcctgaccgagcttatgtttgacaacgccttatctacgcttaggccagaagagatcgcagccctgctgtcaggccttgtgtgtcagagtcccggggacgctggggatcagttgcccaacacattgaaacaaggcatcgaacgcgtccgagcagtcgccaagcgcatcggagaggtacaggttgcttgcgggctgaaccagaccgtggaggagttcgtgggggagctgaactttggattggtagaggtggtatatgagtgggctcgcgggatgccattctccgaacttgcgggcttgtctgggacgcctgagggactggtggtgaggtgcatccagaggctcgctgaaatgtgtcgctccctcagaggcgctgccaggctggtgggggaaccggttctgggagccaagatggaaaccgctgccacgctacttcgcagggacatcgtatttgccgcatcgctatatacacagtag

SEQ ID NO: 169202 - DNA, 3741 bp, Artificial Sequence
  derived and/or modified sequence
atgatggagacagagcggctggtgctgcccccaccagaccccctggacctgcccctgcgggctgtggagctgggctgcaccggccactgggagctgctgaacctgcccggggcccctgagagcagcctgccccacggcctgcccccctgtgccccagacctgcagcaggaggccgagcagctgttcctgagcagccctgcctggctgcccctgcacggcgtggagcacagcgccaggaagtggcagaggaagacagacccctggagcctgctggccgtgctgggcgcccctgtgcccagcgacctgcaggcccagaggcaccccaccaccggccagatcctgggctacaaggaggtgctgctggagaacaccaacctgagcgccaccaccagcctgagcctgcggcggcccccaggccctgccagccagagcctgtggggcaaccccacccagtaccccttctggccaggcggcatggatgagcccaccatcacagacctgaacacccgggaggaggccgaggaggagattgactttgagaaggacctgctgaccatccccccaggcttcaagaagggcatggactttgcccccaaggactgccccaccccagcccctggcctgctgagcctgagctgcatgctggagcccctggacctgggcggcggagatgaagatgaaaatgaggccgtgggccagcccggcggccccaggggggacacagtgtctgccagcccctgcagcgcccccctggcccgggccagcagcctggaggacctggtgctgaaggaggccagcacagctgtgtccaccccagaggcccctgagccccccagccaggagcagtgggccatccctgtggatgccaccagccctgtgggggacttctaccgcctcatcccccagcctgccttccagtgggcctttgagccagatgtgttccagaagcaggccatcctgcacctggagagacatgattctgtgtttgtggccgcccacaccagcgctgggaagacagtggtggccgagtatgccatcgccctggcccagaagcacatgaccaggaccatctacaccagccccatcaaggccctgagcaaccagaagttccgggacttcaggaacacctttggagatgtgggcctgctgactggagatgtgcagctgcaccctgaggccagctgcctgatcatgaccacagagatcctgcgctccatgctgtacagcggcagtgatgtgatccgggacctggagtgggtgatctttgatgaggtgcactacatcaatgatgtggagcggggcgtggtgtgggaggaggtgctgatcatgctgcctgaccacgtgtccatcatcctgctgagcgccaccgtgcccaatgccctggagtttgctgactggattggccgcctgaagaggcggcagatctacgtgatcagcacagtgaccaggcctgtgcccctggagcactacctgttcaccggcaacagcagcaagacccagggcgagctgttcctgctgctggacagcagaggagccttccacaccaagggctactatgctgctgtggaggccaagaaggagaggatgagcaagcacgcccagaccttcggggccaagcagcccacccaccagggcggccctgcccaggaccggggcgtgtacctgagcctgctggccagcctgcggacccgggcccagctgcctgtggtggtgttcaccttcagccggggccgctgtgatgagcaggccagcggcctgaccagcctggacctgaccaccagcagcgagaagtctgagatccacctgttcctgcagcgctgcctggcccggctgcggggcagtgaccggcagctgccccaggtgctgcacatgtctgagctgctgaacagaggcctgggcgtgcaccacagcggcatcctgcccatcctgaaggagatcgtggagatgctgttcagccggggcctggtgaaggtgctgtttgccacagagacctttgccatgggcgtgaacatgcctgccaggacagtggtgtttgacagcatgaggaagcatgatggcagcaccttccgggacctgctgcccggggagtatgtgcagatggccggccgggccggccggcggggcctggaccccaccggcaccgtcatcctgctgtgcaagggccgggtgcctgagatggctgacctgcacaggatgatgatgggcaagcccagccagctgcagagccagttccggctgacctacaccatgatcctgaacctgctgcgggtggatgccctgcgggtggaggacatgatgaagaggagcttcagcgagttccccagcaggaaggacagcaaggcccacgagcaggccctggccgagctgaccaagaggctgggcgccctggaggagccagacatgacaggccagctggtggacctgcctgagtactacagctggggcgaggagctgacagagacccagcacatgatccagaggcgcatcatggagagcgtgaatggcctgaagagcctgtctgctggccgggtggtggtggtgaagaaccaggagcaccacaatgccctgggcgtcatcctgcaggtgagcagcaacagcaccagcagggtcttcaccaccctggtgctgtgtgacaagcccctgagccaggacccccaggaccggggccctgccacagctgaggtgccctacccagatgacctggtgggcttcaagctgttcctgcctgagggcccctgtgaccacacagtggtgaagctgcagcccggggacatggccgccatcaccaccaaggtgctgcgggtgaatggagagaagatcctggaggacttcagcaagaggcagcagcccaagttcaagaaggacccccccctggccgctgtgaccacagctgtgcaggagctgctgcggctggcccaggcccaccctgctggcccccccaccctggaccctgtgaatgacctgcagctgaaggacatgtctgtggtggagggcggcctgcgggccaggaagctggaggagctgatccagggcgcccagtgtgtgcacagcccccgcttccctgcccagtacctgaagctgcgggagaggatgcagatccagaaggagatggagcggctgcgcttcctgctgagtgaccagagcctgctgctgctgcctgagtaccaccagagggtggaggtgctgcggaccctgggctacgtggatgaagctggcaccgtgaagctggccggccgggtggcctgtgccatgagcagccatgagctgctgctgacagagctgatgtttgacaatgccctgagcaccctgcggcctgaggagattgctgccctgctgagcggcctggtgtgccagagccctggagatgctggggaccagctgcccaacaccctgaagcagggcatcgagcgggtgcgggctgtggccaagagaattggagaggtgcaggtggcctgtggcctgaaccagacagtggaggagtttgtgggggagctgaactttggcctggtggaggtggtgtatgagtgggcccggggcatgcccttcagcgagctggccggcctgagcggcaccccagagggcctggtggtgcgctgcatccagaggctggccgagatgtgccgcagcctgcggggagctgcccggctggtgggggagcctgtgctgggcgccaagatggagacagctgccaccctgctgcggcgggacatcgtgtttgctgccagcctgtacacccagtag

SEQ ID NO: 169203 - DNA, 3741 bp, Artificial Sequence
  derived and/or modified sequence
atgatggagacagagcggctggtgctgcccccaccagaccccctggacctgcccctgcgggctgtggagctgggctgcaccggccactgggagctgctgaacctgcccggggcccctgagagcagcctgccccacggcctgcccccctgtgccccagacctgcagcaggaggccgagcagctgttcctgagcagccctgcctggctgcccctgcacggcgtggagcacagcgccaggaagtggcagaggaagacagacccctggagcctgctggccgtgctgggcgcccctgtgcccagcgacctgcaggcccagaggcaccccaccaccggccagatcctgggctacaaggaggtgctgctggagaacaccaacctgagcgccaccaccagcctgagcctgcggcggcccccaggccctgccagccagagcctgtggggcaaccccacccagtaccccttctggccaggcggcatggatgagcccaccatcacagacctgaacacccgggaggaggccgaggaggagattgactttgagaaggacctgctgaccatccccccaggcttcaagaagggcatggactttgcccccaaggactgccccaccccagcccctggcctgctgagcctgagctgcctgctggagcccctggacctgggcggcggagatgaagatgaaaatgaggccgtgggccagcccggcggccccaggggggacacagtgtctgccagcccctgcagcgcccccctggcccgggccagcagcctggaggacctggtgctgaaggaggccagcacagctgtgtccaccccagaggcccctgagccccccagccaggagcagtgggccatccctgtggatgccaccagccctgtgggggacttctaccgcctcatcccccagcctgccttccagtgggcctttgagccagatgtgttccagaagcaggccatcctgcacctggagagacatgattctgtgtttgtggccgcccacaccagcgctgggaagacagtggtggccgagtatgccatcgccctggcccagaagcacatgaccaggaccatctacaccagccccatcaaggccctgagcaaccagaagttccgggacttcaggaacacctttggagatgtgggcctgctgactggagatgtgcagctgcaccctgaggccagctgcctgatcatgaccacagagatcctgcgctccatgctgtacagcggcagtgatgtgatccgggacctggagtgggtgatctttgatgaggtgcactacatcaatgatgtggagcggggcgtggtgtgggaggaggtgctgatcatgctgcctgaccacgtgtccatcatcctgctgagcgccaccgtgcccaatgccctggagtttgctgactggattggccgcctgaagaggcggcagatctacgtgatcagcacagtgaccaggcctgtgcccctggagcactacctgttcaccggcaacagcagcaagacccagggcgagctgttcctgctgctggacagcagaggagccttccacaccaagggctactatgctgctgtggaggccaagaaggagaggatgagcaagcacgcccagaccttcggggccaagcagcccacccaccagggcggccctgcccaggaccggggcgtgtacctgagcctgctggccagcctgcggacccgggcccagctgcctgtggtggtgttcaccttcagccggggccgctgtgatgagcaggccagcggcctgaccagcctggacctgaccaccagcagcgagaagtctgagatccacctgttcctgcagcgctgcctggcccggctgcggggcagtgaccggcagctgccccaggtgctgcacatgtctgagctgctgaacagaggcctgggcgtgcaccacagcggcatcctgcccatcctgaaggagatcgtggagatgctgttcagccggggcctggtgaaggtgctgtttgccacagagacctttgccatgggcgtgaacatgcctgccaggacagtggtgtttgacagcatgaggaagcatgatggcagcaccttccgggacctgctgcccggggagtatgtgcagatggccggccgggccggccggcggggcctggaccccaccggcaccgtcatcctgctgtgcaagggccgggtgcctgagatggctgacctgcacaggatgatgatgggcaagcccagccagctgcagagccagttccggctgacctacaccatgatcctgaacctgctgcgggtggatgccctgcgggtggaggacatgatgaagaggagcttcagcgagttccccagcaggaaggacagcaaggcccacgagcaggccctggccgagctgaccaagaggctgggcgccctggaggagccagacatgacaggccagctggtggacctgcctgagtactacagctggggcgaggagctgacagagacccagcacatgatccagaggcgcatcatggagagcgtgaatggcctgaagagcctgtctgctggccgggtggtggtggtgaagaaccaggagcaccacaatgccctgggcgtcatcctgcaggtgagcagcaacagcaccagcagggtcttcaccaccctggtgctgtgtgacaagcccctgagccaggacccccaggaccggggccctgccacagctgaggtgccctacccagatgacctggtgggcttcaagctgttcctgcctgagggcccctgtgaccacacagtggtgaagctgcagcccggggacatggccgccatcaccaccaaggtgctgcgggtgaatggagagaagatcctggaggacttcagcaagaggcagcagcccaagttcaagaaggacccccccctggccgctgtgaccacagctgtgcaggagctgctgcggctggcccaggcccaccctgctggcccccccaccctggaccctgtgaatgacctgcagctgaaggacatgtctgtggtggagggcggcctgcgggccaggaagctggaggagctgatccagggcgcccagtgtgtgcacagcccccgcttccctgcccagtacctgaagctgcgggagaggatgcagatccagaaggagatggagcggctgcgcttcctgctgagtgaccagagcctgctgctgctgcctgagtaccaccagagggtggaggtgctgcggaccctgggctacgtggatgaagctggcaccgtgaagctggccggccgggtggcctgtgccatgagcagccatgagctgctgctgacagagctgatgtttgacaatgccctgagcaccctgcggcctgaggagattgctgccctgctgagcggcctggtgtgccagagccctggagatgctggggaccagctgcccaacaccctgaagcagggcatcgagcgggtgcgggctgtggccaagagaattggagaggtgcaggtggcctgtggcctgaaccagacagtggaggagtttgtgggggagctgaactttggcctggtggaggtggtgtatgagtgggcccggggcatgcccttcagcgagctggccggcctgagcggcaccccagagggcctggtggtgcgctgcatccagaggctggccgagatgtgccgcagcctgcggggagctgcccggctggtgggggagcctgtgctgggcgccaagatggagacagctgccaccctgctgcggcgggacatcgtgtttgctgccagcctgtacacccagtag

SEQ ID NO: 169204 - DNA, 3267 bp, Artificial Sequence
  derived and/or modified sequence
atggatgagcccaccatcacagacctgaacacccgggaggaggccgaggaggagattgactttgagaaggacctgctgaccatccccccaggcttcaagaagggcatggactttgcccccaaggactgccccaccccagcccctggcctgctgagcctgagctgcatgctggagcccctggacctgggcggcggagatgaagatgaaaatgaggccgtgggccagcccggcggccccaggggggacacagtgtctgccagcccctgcagcgcccccctggcccgggccagcagcctggaggacctggtgctgaaggaggccagcacagctgtgtccaccccagaggcccctgagccccccagccaggagcagtgggccatccctgtggatgccaccagccctgtgggggacttctaccgcctcatcccccagcctgccttccagtgggcctttgagccagatgtgttccagaagcaggccatcctgcacctggagagacatgattctgtgtttgtggccgcccacaccagcgctgggaagacagtggtggccgagtatgccatcgccctggcccagaagcacatgaccaggaccatctacaccagccccatcaaggccctgagcaaccagaagttccgggacttcaggaacacctttggagatgtgggcctgctgactggagatgtgcagctgcaccctgaggccagctgcctgatcatgaccacagagatcctgcgctccatgctgtacagcggcagtgatgtgatccgggacctggagtgggtgatctttgatgaggtgcactacatcaatgatgtggagcggggcgtggtgtgggaggaggtgctgatcatgctgcctgaccacgtgtccatcatcctgctgagcgccaccgtgcccaatgccctggagtttgctgactggattggccgcctgaagaggcggcagatctacgtgatcagcacagtgaccaggcctgtgcccctggagcactacctgttcaccggcaacagcagcaagacccagggcgagctgttcctgctgctggacagcagaggagccttccacaccaagggctactatgctgctgtggaggccaagaaggagaggatgagcaagcacgcccagaccttcggggccaagcagcccacccaccagggcggccctgcccaggaccggggcgtgtacctgagcctgctggccagcctgcggacccgggcccagctgcctgtggtggtgttcaccttcagccggggccgctgtgatgagcaggccagcggcctgaccagcctggacctgaccaccagcagcgagaagtctgagatccacctgttcctgcagcgctgcctggcccggctgcggggcagtgaccggcagctgccccaggtgctgcacatgtctgagctgctgaacagaggcctgggcgtgcaccacagcggcatcctgcccatcctgaaggagatcgtggagatgctgttcagccggggcctggtgaaggtgctgtttgccacagagacctttgccatgggcgtgaacatgcctgccaggacagtggtgtttgacagcatgaggaagcatgatggcagcaccttccgggacctgctgcccggggagtatgtgcagatggccggccgggccggccggcggggcctggaccccaccggcaccgtcatcctgctgtgcaagggccgggtgcctgagatggctgacctgcacaggatgatgatgggcaagcccagccagctgcagagccagttccggctgacctacaccatgatcctgaacctgctgcgggtggatgccctgcgggtggaggacatgatgaagaggagcttcagcgagttccccagcaggaaggacagcaaggcccacgagcaggccctggccgagctgaccaagaggctgggcgccctggaggagccagacatgacaggccagctggtggacctgcctgagtactacagctggggcgaggagctgacagagacccagcacatgatccagaggcgcatcatggagagcgtgaatggcctgaagagcctgtctgctggccgggtggtggtggtgaagaaccaggagcaccacaatgccctgggcgtcatcctgcaggtgagcagcaacagcaccagcagggtcttcaccaccctggtgctgtgtgacaagcccctgagccaggacccccaggaccggggccctgccacagctgaggtgccctacccagatgacctggtgggcttcaagctgttcctgcctgagggcccctgtgaccacacagtggtgaagctgcagcccggggacatggccgccatcaccaccaaggtgctgcgggtgaatggagagaagatcctggaggacttcagcaagaggcagcagcccaagttcaagaaggacccccccctggccgctgtgaccacagctgtgcaggagctgctgcggctggcccaggcccaccctgctggcccccccaccctggaccctgtgaatgacctgcagctgaaggacatgtctgtggtggagggcggcctgcgggccaggaagctggaggagctgatccagggcgcccagtgtgtgcacagcccccgcttccctgcccagtacctgaagctgcgggagaggatgcagatccagaaggagatggagcggctgcgcttcctgctgagtgaccagagcctgctgctgctgcctgagtaccaccagagggtggaggtgctgcggaccctgggctacgtggatgaagctggcaccgtgaagctggccggccgggtggcctgtgccatgagcagccatgagctgctgctgacagagctgatgtttgacaatgccctgagcaccctgcggcctgaggagattgctgccctgctgagcggcctggtgtgccagagccctggagatgctggggaccagctgcccaacaccctgaagcagggcatcgagcgggtgcgggctgtggccaagagaattggagaggtgcaggtggcctgtggcctgaaccagacagtggaggagtttgtgggggagctgaactttggcctggtggaggtggtgtatgagtgggcccggggcatgcccttcagcgagctggccggcctgagcggcaccccagagggcctggtggtgcgctgcatccagaggctggccgagatgtgccgcagcctgcggggagctgcccggctggtgggggagcctgtgctgggcgccaagatggagacagctgccaccctgctgcggcgggacatcgtgtttgctgccagcctgtacacccagtag

SEQ ID NO: 169205 - DNA, 3162 bp, Artificial Sequence
  derived and/or modified sequence
atggactttgcccccaaggactgccccaccccagcccctggcctgctgagcctgagctgcatgctggagcccctggacctgggcggcggagatgaagatgaaaatgaagctgtgggccagcccggcggccccaggggggacacagtgtctgccagcccctgcagcgcccccctggcccgggccagcagcctggaggacctggtgctgaaggaggccagcacagctgtgtccaccccagaggcccctgagccccccagccaggagcagtgggccatccctgtggatgccaccagccctgtgggggacttctaccgcctcatcccccagcctgccttccagtgggcctttgagccagatgtgttccagaagcaggccatcctgcacctggagagacatgacagcgtgtttgtggccgcccacaccagcgctgggaagacagtggtggccgagtatgccatcgccctggcccagaagcacatgaccaggaccatctacaccagccccatcaaggccctgagcaaccagaagttccgggacttcaggaacacctttggagatgtgggcctgctgactggagatgtgcagctgcaccctgaggccagctgcctgatcatgaccacagagatcctgcgctccatgctgtacagcggcagtgatgtgatccgggacctggagtgggtgatctttgatgaggtgcactacatcaatgatgtggagcggggcgtggtgtgggaggaggtgctgatcatgctgcctgaccacgtgtccatcatcctgctgagcgccaccgtgcccaatgccctggagtttgctgactggattggccgcctgaagaggcggcagatctacgtgatcagcacagtgaccaggcctgtgcccctggagcactacctgttcaccggcaacagcagcaagacccagggcgagctgttcctgctgctggacagcagaggagccttccacaccaagggctactatgctgctgtggaggccaagaaggagaggatgagcaagcacgcccagacctttggagccaagcagcccacccaccagggcggccctgcccaggacagaggagtgtacctgagcctgctggccagcctgcggacccgggcccagctgcctgtggtggtgttcaccttcagccggggccgctgtgatgagcaggccagcggcctgaccagcctggacctgaccaccagcagcgagaagtctgagatccacctgttcctgcagcgctgcctggcccggctgcggggcagtgaccggcagctgccccaggtgctgcacatgtctgagctgctgaacagaggcctgggcgtgcaccacagcggcatcctgcccatcctgaaggagatcgtggagatgctgttcagccggggcctggtgaaggtgctgtttgccacagagacctttgccatgggcgtgaacatgcctgccaggacagtggtgtttgacagcatgaggaagcatgatggcagcaccttccgggacctgctgcctggagaatatgtgcagatggccggccgggccggcagaagaggcctggaccccactggaacagtcatcctgctgtgcaagggccgggtgcctgagatggctgacctgcacaggatgatgatgggcaagcccagccagctgcagagccagttccggctgacctacaccatgatcctgaacctgctgcgggtggatgccctgcgggtggaggacatgatgaagaggagcttcagcgagttccccagcaggaaggacagcaaggcccacgagcaggccctggccgagctgaccaagaggctgggcgccctggaggagccagacatgacaggccagctggtggacctgcctgagtactacagctggggcgaggagctgacagagacccagcacatgatccagaggcgcatcatggagagcgtgaatggcctgaagagcctgtctgctggccgggtggtggtggtgaagaaccaggagcaccacaatgccctgggcgtcatcctgcaggtgagcagcaacagcaccagcagggtcttcaccaccctggtgctgtgtgacaagcccctgagccaggacccccaggaccggggccctgccacagctgaggtgccctacccagatgacctggtgggcttcaagctgttcctgcctgagggcccctgtgaccacacagtggtgaagctgcagcccggggacatggccgccatcaccaccaaggtgctgcgggtgaatggagagaagatcctggaggacttcagcaagaggcagcagcccaagttcaagaaggacccccccctggccgctgtgaccacagctgtgcaggagctgctgcggctggcccaggcccaccctgctggcccccccaccctggaccctgtgaatgacctgcagctgaaggacatgtctgtggtggagggcggcctgcgggccaggaagctggaggagctgatccagggcgcccagtgtgtgcacagcccccgcttccctgcccagtacctgaagctgcgggagaggatgcagatccagaaggagatggagcggctgcgcttcctgctgagtgaccagagcctgctgctgctgcctgagtaccaccagagggtggaggtgctgcggaccctgggctacgtggatgaggccggcaccgtgaagctggccggccgggtggcctgtgccatgagcagccatgagctgctgctgacagagctgatgtttgacaatgccctgagcaccctgcggcctgaggagattgctgccctgctgagcggcctggtgtgccagagccctggagatgctggggaccagctgcccaacaccctgaagcagggcatcgagcgggtgcgggctgtggccaagagaattggagaggtgcaggtggcctgtggcctgaaccagacagtggaggagtttgtgggggagctgaactttggcctggtggaggtggtgtatgagtgggcccggggcatgcccttcagcgagctggccggcctgagcggcaccccagagggcctggtggtgcgctgcatccagaggctggccgagatgtgccgcagcctgcggggggccgcccggctggtgggggagcctgtgctgggcgccaagatggagacagctgccaccctgctgcggcgggacatcgtgtttgctgccagcctgtacacccagtag

SEQ ID NO: 169206 - DNA, 3267 bp, Artificial Sequence
  derived and/or modified sequence
atggatgagcccaccatcacagacctgaacacccgggaggaggccgaggaggagattgactttgagaaggacctgctgaccatccccccaggcttcaagaagggcatggactttgcccccaaggactgccccaccccagcccctggcctgctgagcctgagctgcctgctggagcccctggacctgggcggcggagatgaagatgaaaatgaggccgtgggccagcccggcggccccaggggggacacagtgtctgccagcccctgcagcgcccccctggcccgggccagcagcctggaggacctggtgctgaaggaggccagcacagctgtgtccaccccagaggcccctgagccccccagccaggagcagtgggccatccctgtggatgccaccagccctgtgggggacttctaccgcctcatcccccagcctgccttccagtgggcctttgagccagatgtgttccagaagcaggccatcctgcacctggagagacatgattctgtgtttgtggccgcccacaccagcgctgggaagacagtggtggccgagtatgccatcgccctggcccagaagcacatgaccaggaccatctacaccagccccatcaaggccctgagcaaccagaagttccgggacttcaggaacacctttggagatgtgggcctgctgactggagatgtgcagctgcaccctgaggccagctgcctgatcatgaccacagagatcctgcgctccatgctgtacagcggcagtgatgtgatccgggacctggagtgggtgatctttgatgaggtgcactacatcaatgatgtggagcggggcgtggtgtgggaggaggtgctgatcatgctgcctgaccacgtgtccatcatcctgctgagcgccaccgtgcccaatgccctggagtttgctgactggattggccgcctgaagaggcggcagatctacgtgatcagcacagtgaccaggcctgtgcccctggagcactacctgttcaccggcaacagcagcaagacccagggcgagctgttcctgctgctggacagcagaggagccttccacaccaagggctactatgctgctgtggaggccaagaaggagaggatgagcaagcacgcccagaccttcggggccaagcagcccacccaccagggcggccctgcccaggaccggggcgtgtacctgagcctgctggccagcctgcggacccgggcccagctgcctgtggtggtgttcaccttcagccggggccgctgtgatgagcaggccagcggcctgaccagcctggacctgaccaccagcagcgagaagtctgagatccacctgttcctgcagcgctgcctggcccggctgcggggcagtgaccggcagctgccccaggtgctgcacatgtctgagctgctgaacagaggcctgggcgtgcaccacagcggcatcctgcccatcctgaaggagatcgtggagatgctgttcagccggggcctggtgaaggtgctgtttgccacagagacctttgccatgggcgtgaacatgcctgccaggacagtggtgtttgacagcatgaggaagcatgatggcagcaccttccgggacctgctgcccggggagtatgtgcagatggccggccgggccggccggcggggcctggaccccaccggcaccgtcatcctgctgtgcaagggccgggtgcctgagatggctgacctgcacaggatgatgatgggcaagcccagccagctgcagagccagttccggctgacctacaccatgatcctgaacctgctgcgggtggatgccctgcgggtggaggacatgatgaagaggagcttcagcgagttccccagcaggaaggacagcaaggcccacgagcaggccctggccgagctgaccaagaggctgggcgccctggaggagccagacatgacaggccagctggtggacctgcctgagtactacagctggggcgaggagctgacagagacccagcacatgatccagaggcgcatcatggagagcgtgaatggcctgaagagcctgtctgctggccgggtggtggtggtgaagaaccaggagcaccacaatgccctgggcgtcatcctgcaggtgagcagcaacagcaccagcagggtcttcaccaccctggtgctgtgtgacaagcccctgagccaggacccccaggaccggggccctgccacagctgaggtgccctacccagatgacctggtgggcttcaagctgttcctgcctgagggcccctgtgaccacacagtggtgaagctgcagcccggggacatggccgccatcaccaccaaggtgctgcgggtgaatggagagaagatcctggaggacttcagcaagaggcagcagcccaagttcaagaaggacccccccctggccgctgtgaccacagctgtgcaggagctgctgcggctggcccaggcccaccctgctggcccccccaccctggaccctgtgaatgacctgcagctgaaggacatgtctgtggtggagggcggcctgcgggccaggaagctggaggagctgatccagggcgcccagtgtgtgcacagcccccgcttccctgcccagtacctgaagctgcgggagaggatgcagatccagaaggagatggagcggctgcgcttcctgctgagtgaccagagcctgctgctgctgcctgagtaccaccagagggtggaggtgctgcggaccctgggctacgtggatgaagctggcaccgtgaagctggccggccgggtggcctgtgccatgagcagccatgagctgctgctgacagagctgatgtttgacaatgccctgagcaccctgcggcctgaggagattgctgccctgctgagcggcctggtgtgccagagccctggagatgctggggaccagctgcccaacaccctgaagcagggcatcgagcgggtgcgggctgtggccaagagaattggagaggtgcaggtggcctgtggcctgaaccagacagtggaggagtttgtgggggagctgaactttggcctggtggaggtggtgtatgagtgggcccggggcatgcccttcagcgagctggccggcctgagcggcaccccagagggcctggtggtgcgctgcatccagaggctggccgagatgtgccgcagcctgcggggagctgcccggctggtgggggagcctgtgctgggcgccaagatggagacagctgccaccctgctgcggcgggacatcgtgtttgctgccagcctgtacacccagtag

SEQ ID NO: 169207 - DNA, 3162 bp, Artificial Sequence
  derived and/or modified sequence
atggactttgcccccaaggactgccccaccccagcccctggcctgctgagcctgagctgcctgctggagcccctggacctgggcggcggagatgaagatgaaaatgaagctgtgggccagcccggcggccccaggggggacacagtgtctgccagcccctgcagcgcccccctggcccgggccagcagcctggaggacctggtgctgaaggaggccagcacagctgtgtccaccccagaggcccctgagccccccagccaggagcagtgggccatccctgtggatgccaccagccctgtgggggacttctaccgcctcatcccccagcctgccttccagtgggcctttgagccagatgtgttccagaagcaggccatcctgcacctggagagacatgacagcgtgtttgtggccgcccacaccagcgctgggaagacagtggtggccgagtatgccatcgccctggcccagaagcacatgaccaggaccatctacaccagccccatcaaggccctgagcaaccagaagttccgggacttcaggaacacctttggagatgtgggcctgctgactggagatgtgcagctgcaccctgaggccagctgcctgatcatgaccacagagatcctgcgctccatgctgtacagcggcagtgatgtgatccgggacctggagtgggtgatctttgatgaggtgcactacatcaatgatgtggagcggggcgtggtgtgggaggaggtgctgatcatgctgcctgaccacgtgtccatcatcctgctgagcgccaccgtgcccaatgccctggagtttgctgactggattggccgcctgaagaggcggcagatctacgtgatcagcacagtgaccaggcctgtgcccctggagcactacctgttcaccggcaacagcagcaagacccagggcgagctgttcctgctgctggacagcagaggagccttccacaccaagggctactatgctgctgtggaggccaagaaggagaggatgagcaagcacgcccagacctttggagccaagcagcccacccaccagggcggccctgcccaggacagaggagtgtacctgagcctgctggccagcctgcggacccgggcccagctgcctgtggtggtgttcaccttcagccggggccgctgtgatgagcaggccagcggcctgaccagcctggacctgaccaccagcagcgagaagtctgagatccacctgttcctgcagcgctgcctggcccggctgcggggcagtgaccggcagctgccccaggtgctgcacatgtctgagctgctgaacagaggcctgggcgtgcaccacagcggcatcctgcccatcctgaaggagatcgtggagatgctgttcagccggggcctggtgaaggtgctgtttgccacagagacctttgccatgggcgtgaacatgcctgccaggacagtggtgtttgacagcatgaggaagcatgatggcagcaccttccgggacctgctgcctggagaatatgtgcagatggccggccgggccggcagaagaggcctggaccccactggaacagtcatcctgctgtgcaagggccgggtgcctgagatggctgacctgcacaggatgatgatgggcaagcccagccagctgcagagccagttccggctgacctacaccatgatcctgaacctgctgcgggtggatgccctgcgggtggaggacatgatgaagaggagcttcagcgagttccccagcaggaaggacagcaaggcccacgagcaggccctggccgagctgaccaagaggctgggcgccctggaggagccagacatgacaggccagctggtggacctgcctgagtactacagctggggcgaggagctgacagagacccagcacatgatccagaggcgcatcatggagagcgtgaatggcctgaagagcctgtctgctggccgggtggtggtggtgaagaaccaggagcaccacaatgccctgggcgtcatcctgcaggtgagcagcaacagcaccagcagggtcttcaccaccctggtgctgtgtgacaagcccctgagccaggacccccaggaccggggccctgccacagctgaggtgccctacccagatgacctggtgggcttcaagctgttcctgcctgagggcccctgtgaccacacagtggtgaagctgcagcccggggacatggccgccatcaccaccaaggtgctgcgggtgaatggagagaagatcctggaggacttcagcaagaggcagcagcccaagttcaagaaggacccccccctggccgctgtgaccacagctgtgcaggagctgctgcggctggcccaggcccaccctgctggcccccccaccctggaccctgtgaatgacctgcagctgaaggacatgtctgtggtggagggcggcctgcgggccaggaagctggaggagctgatccagggcgcccagtgtgtgcacagcccccgcttccctgcccagtacctgaagctgcgggagaggatgcagatccagaaggagatggagcggctgcgcttcctgctgagtgaccagagcctgctgctgctgcctgagtaccaccagagggtggaggtgctgcggaccctgggctacgtggatgaggccggcaccgtgaagctggccggccgggtggcctgtgccatgagcagccatgagctgctgctgacagagctgatgtttgacaatgccctgagcaccctgcggcctgaggagattgctgccctgctgagcggcctggtgtgccagagccctggagatgctggggaccagctgcccaacaccctgaagcagggcatcgagcgggtgcgggctgtggccaagagaattggagaggtgcaggtggcctgtggcctgaaccagacagtggaggagtttgtgggggagctgaactttggcctggtggaggtggtgtatgagtgggcccggggcatgcccttcagcgagctggccggcctgagcggcaccccagagggcctggtggtgcgctgcatccagaggctggccgagatgtgccgcagcctgcggggggccgcccggctggtgggggagcctgtgctgggcgccaagatggagacagctgccaccctgctgcggcgggacatcgtgtttgctgccagcctgtacacccagtag

SEQ ID NO: 169208 - DNA, 2643 bp, Artificial Sequence
  derived and/or modified sequence
atgatggagacagagcggctggtgctgcccccaccagaccccctggacctgcccctgcgggctgtggagctgggctgcaccggccactgggagctgctgaacctgcccggggcccctgagagcagcctgccccacggcctgcccccctgtgccccagacctgcagcaggaggccgagcagctgttcctgagcagccctgcctggctgcccctgcacggcgtggagcacagcgccaggaagtggcagaggaagacagacccctggagcctgctggccgtgctgggcgcccctgtgcccagcgacctgcaggcccagaggcaccccaccaccggccagatcctgggctacaaggaggtgctgctggagcactacctgttcaccggcaacagcagcaagacccagggcgagctgttcctgctgctggacagcagaggagccttccacaccaagggctactatgctgctgtggaggccaagaaggagaggatgagcaagcacgcccagaccttcggggccaagcagcccacccaccagggcggccctgcccaggaccggggcgtgtacctgagcctgctggccagcctgcggacccgggcccagctgcctgtggtggtgttcaccttcagccggggccgctgtgatgagcaggccagcggcctgaccagcctggacctgaccaccagcagcgagaagtctgagatccacctgttcctgcagcgctgcctggcccggctgcggggcagtgaccggcagctgccccaggtgctgcacatgtctgagctgctgaacagaggcctgggcgtgcaccacagcggcatcctgcccatcctgaaggagatcgtggagatgctgttcagccggggcctggtgaaggtgctgtttgccacagagacctttgccatgggcgtgaacatgcctgccaggacagtggtgtttgacagcatgaggaagcatgatggcagcaccttccgggacctgctgcccggggagtatgtgcagatggccggccgggccggccggcggggcctggaccccaccggcaccgtcatcctgctgtgcaagggccgggtgcctgagatggctgacctgcacaggatgatgatgggcaagcccagccagctgcagagccagttccggctgacctacaccatgatcctgaacctgctgcgggtggatgccctgcgggtggaggacatgatgaagaggagcttcagcgagttccccagcaggaaggacagcaaggcccacgagcaggccctggccgagctgaccaagaggctgggcgccctggaggagccagacatgacaggccagctggtggacctgcctgagtactacagctggggcgaggagctgacagagacccagcacatgatccagaggcgcatcatggagagcgtgaatggcctgaagagcctgtctgctggccgggtggtggtggtgaagaaccaggagcaccacaatgccctgggcgtcatcctgcaggtgagcagcaacagcaccagcagggtcttcaccaccctggtgctgtgtgacaagcccctgagccaggacccccaggaccggggccctgccacagctgaggtgccctacccagatgacctggtgggcttcaagctgttcctgcctgagggcccctgtgaccacacagtggtgaagctgcagcccggggacatggccgccatcaccaccaaggtgctgcgggtgaatggagagaagatcctggaggacttcagcaagaggcagcagcccaagttcaagaaggacccccccctggccgctgtgaccacagctgtgcaggagctgctgcggctggcccaggcccaccctgctggcccccccaccctggaccctgtgaatgacctgcagctgaaggacatgtctgtggtggagggcggcctgcgggccaggaagctggaggagctgatccagggcgcccagtgtgtgcacagcccccgcttccctgcccagtacctgaagctgcgggagaggatgcagatccagaaggagatggagcggctgcgcttcctgctgagtgaccagagcctgctgctgctgcctgagtaccaccagagggtggaggtgctgcggaccctgggctacgtggatgaagctggcaccgtgaagctggccggccgggtggcctgtgccatgagcagccatgagctgctgctgacagagctgatgtttgacaatgccctgagcaccctgcggcctgaggagattgctgccctgctgagcggcctggtgtgccagagccctggagatgctggggaccagctgcccaacaccctgaagcagggcatcgagcgggtgcgggctgtggccaagagaattggagaggtgcaggtggcctgtggcctgaaccagacagtggaggagtttgtgggggagctgaactttggcctggtggaggtggtgtatgagtgggcccggggcatgcccttcagcgagctggccggcctgagcggcaccccagagggcctggtggtgcgctgcatccagaggctggccgagatgtgccgcagcctgcggggagctgcccggctggtgggggagcctgtgctgggcgccaagatggagacagctgccaccctgctgcggcgggacatcgtgtttgctgccagcctgtacacccagtag

SEQ ID NO: 169209 - DNA, 3741 bp, Artificial Sequence
  derived and/or modified sequence
atgatggagaccgagcggctggtgctgcccccccccgaccccctggatctgccattgcgggccgtggagttaggttgcactggacactgggaactactgaatctaccaggtgctccagaatctagccttcctcatggcctgcctccttgcgctcccgatctgcagcaggaggctgaacagctctttctgtcaagcccggcttggctgccactgcatggtgtggagcactcagccaggaaatggcagaggaagaccgatccgtggtctctgttggcggtgctgggcgccccggtgcctagtgatttgcaggcccagcggcacccaactacagggcagatcctcggctacaaggaggtgcttctcgagaacactaacctttccgctactacaagtctttcactgcggcggcctcctggtcccgccagccagagtttgtgggggaatcctacgcagtaccctttttggcccggcggcatggacgaaccaaccattaccgatctcaatactagagaagaggctgaggaggaaatcgatttcgaaaaagacctcctgaccattccaccaggctttaagaaaggcatggacttcgcgccaaaagactgcccgaccccggcccctggtctgcttagcctgagttgtatgctcgaacctctggatctggggggcggagacgaagatgagaacgaggctgtagggcagccaggcggaccgcgcggtgacactgtgtccgcatccccttgtagtgctccacttgcccgcgcctcttctctggaagatctggtgctgaaagaggcatcaactgctgtgtccacccccgaggcacctgaaccacccagccaggaacagtgggctatccctgtcgatgccacatccccggtgggtgatttctaccggctgatcccgcagcccgccttccaatgggcatttgagcccgacgtcttccagaaacaggccatactccacttagagaggcatgatagtgtctttgtggccgcccacaccagcgccggaaaaaccgtcgtggcagagtacgcaatcgctctggcacaaaaacacatgactcggacaatctacaccagccccatcaaggctttgagcaatcagaaattccgcgacttcaggaacaccttcggggatgtgggactgcttacaggggacgtccagttacaccctgaagcctcttgtttgataatgaccactgagatcctgagatcaatgctgtattccgggtccgatgtgatacgtgatctagaatgggtcatattcgacgaggtgcattacatcaacgacgtcgaacgcggcgtggtgtgggaagaagtactgatcatgctgccggaccacgtgtcaatcatccttctttccgcaaccgtgcctaacgccctggaattcgcagattggatcggccgcttgaaaagacggcagatttacgtgataagtacagtcacacggcccgtccccctagagcattatctgtttaccgggaattcctctaagacccagggagagctgttcctgttgctggactcacgaggagcttttcacaccaagggctattacgctgccgtagaagctaagaaggagcgtatgtctaaacatgcacagactttcggagcgaaacagcccacccatcagggaggaccagctcaggacaggggagtctacctgtcgctcctggcctcactccgcaccagagcacaattacctgtggtcgtcttcacattttctcgcggcagatgcgacgaacaggcctcagggctaaccagtcttgatttgaccaccagttctgaaaagtccgaaatccacctctttttgcaacgttgccttgctaggctccgagggagcgatcgacaactgccccaagtgctccacatgtccgagttgctcaatcggggcctgggcgtgcaccacagtggtatcttgcctatcttaaaagaaattgtggagatgctcttctcaagaggtcttgtgaaagtcctgtttgcaaccgagactttcgccatgggagtgaacatgcccgcaagaactgtggtgtttgacagcatgcgcaagcacgatggttcaaccttccgcgatctgcttcccggcgagtacgttcagatggcgggccgtgcgggacggcgcggattggaccctacaggtactgtgatcctgctctgtaaagggcgggttcccgagatggccgatctgcataggatgatgatgggaaagccaagtcagctccagtctcagtttagactcacttatacaatgatcctgaatctgttgagggtggatgcactgagggtggaggacatgatgaaacggagcttctcagagttcccaagtaggaaggatagcaaggcccacgaacaggctctcgcagaactcaccaaacggctgggtgcattggaggagcctgacatgactggtcagctggtggatctccctgagtactattcatggggagaagaactcaccgaaacacagcacatgatacagagaaggatcatggaatcagtgaatggcttaaaatccctgagtgccggcagagtggtggtagtaaaaaatcaggaacatcacaacgccctgggcgtcatccttcaggtgagcagcaattccacaagccgtgtgtttacaaccctggtgctgtgcgataagcccctgagtcaggacccacaggaccggggacccgccacagccgaggtgccatatccggacgatctagtgggcttcaagctctttttgccggaaggaccttgcgaccacactgtcgtgaaactgcagcctggcgacatggcagctatcaccactaaggtcctgcgggtgaatggcgagaaaattcttgaggacttttccaaacgtcagcagccgaagtttaaaaaggatcctcccctggcagctgtcacgacagctgttcaagagctactccgattagcacaggctcatccggcaggaccccccaccctggatcccgtcaacgacctgcagctgaaggatatgagcgttgtggagggcggcttgcgagcacgaaaacttgaggaactgatccaaggcgcgcagtgcgtgcactccccccgcttccccgctcagtacttaaaactgagagaacgcatgcaaatccagaaggaaatggagaggctaagatttctgctctccgaccagagtctattgttgctgcccgagtatcatcaacgcgtagaggtactgaggacgctgggctacgttgacgaagccggtaccgtaaaactggctgggcgcgtggcctgtgccatgtcatcccacgaactgctgctgacggaactcatgttcgacaacgcactgtcaacactccgtcccgaggagatcgccgctctgctgagcggtttagtgtgccagtcacccggagacgcgggtgatcagcttccaaataccttgaagcaggggatagaacgcgtccgtgctgtggctaagaggattggtgaagtgcaagtggcctgcgggctgaaccagaccgtcgaggaattcgtgggagagcttaacttcggcctagtggaagtagtgtacgagtgggcaagagggatgcccttcagcgagctggctggcttgagcggaacacctgaaggcttggtcgtgaggtgtattcaaaggctggctgagatgtgtaggagccttagaggcgctgcccgactggtcggtgagcctgtgctgggagctaagatggagacagctgcgaccctgctgcgaagagatatagtgttcgcggcatccctgtatacacagtag

SEQ ID NO: 169210 - DNA, 3741 bp, Artificial Sequence
  derived and/or modified sequence
atgatggagaccgagcggctggtgctgcccccccccgaccccctggacctccctctgcgagctgtagagctgggctgcaccggccactgggagctactgaacctgcctggcgcccccgagagtagcttgccccacggcttgccaccatgtgcccccgatcttcagcaggaagcagagcagttgttcctctcatcgcccgcatggcttcccctccatggagttgagcacagcgctcggaagtggcagcgaaagaccgatccctggtctttgctggccgtgttgggggcacctgtgcctagcgatctccaggcacagaggcacccgacaaccgggcagatcctcgggtataaagaggtgctcttagaaaatacaaacttgtcagcaactaccagcctgagcttacgccggcctcccggcccagccagccagtccctatggggtaatcctacacaatatccattctggccgggcgggatggatgaaccaacaatcacggatctgaacacaagggaggaggcagaggaggagatcgactttgagaaggatttgctaaccattcctccagggtttaagaaaggtatggacttcgctcctaaggactgccccacccctgccccaggattgctgagcctttcttgtctactggaaccactcgacctaggtggtggcgacgaagacgagaacgaagccgtcggacagccggggggcccacgcggagacaccgtgtccgcctcgccttgcagcgccccactggccagggcatccagccttgaagatctggtgctcaaagaagcctcaactgcggtatctactcccgaggcccccgaacctccctcccaggagcaatgggctattccagtcgatgccacgagtccagtaggtgacttttacaggctgattccgcaacctgcctttcagtgggccttcgaacctgacgtttttcagaagcaggctatactgcacctggagcgacacgattcggtgtttgtggcagcccacacttccgccggaaaaacagtcgtcgccgagtatgcaatcgcgcttgcacagaaacacatgacccgaactatatatacaagtccaattaaagcactctctaatcagaagtttagagattttaggaatactttcggggatgtgggacttcttactggcgacgttcaactgcaccccgaagcgagttgcctcattatgaccaccgagatcctcaggtccatgttgtacagcgggtccgacgtgattagagacttagagtgggttattttcgacgaggtacattatattaatgatgtggagcgaggcgttgtgtgggaagaggtgcttataatgctgcccgaccacgtcagtattatcttgttaagtgctactgtcccaaatgcactggagttcgctgattggatcggcagactcaaaaggagacagatatacgtaatttccactgtgactcggcctgtccccttggaacactacttatttaccggtaacagctctaaaactcaaggagaactgttcctactcttagactcgagaggggcttttcatactaagggctactatgccgctgttgaagccaagaaggaacgtatgagcaagcacgcccagacttttggcgccaagcagccgacccaccaaggcggacccgcccaagatcgcggggtgtatctctcgcttctcgccagtcttagaacaagagcgcaactgccagttgtcgtttttactttctcacggggtcgctgcgacgaacaagcatcaggcctgacatcgcttgacctcactacttcctccgagaagtctgagattcacctgtttttacagcggtgcctggctcgcttgcggggctcagacagacaattgccccaggtccttcacatgtccgagctcctcaaccgcggtctgggagtgcaccactcaggaatcctacccatcttgaaagagatcgtcgaaatgttgtttagccgcggtctggtgaaagtcctattcgcaaccgagacctttgctatgggtgtgaatatgccagctcgaacagttgtgtttgatagtatgaggaagcatgacgggtccacttttcgcgatctgctccctggcgagtacgtgcagatggccgggagagcgggccgcaggggccttgatccaacaggcacagtgattctgctgtgtaaaggtcgtgtgcccgaaatggccgacctgcacaggatgatgatgggaaaaccaagccaactgcagtcgcaatttcggttgacatacactatgatccttaatttgctgcgagttgatgcattacgtgttgaggatatgatgaaaagatcattttctgagttccctagccgtaaagactctaaggcacacgagcaggcactggccgagctaacgaagcgcctcggggccttagaagagccggatatgaccggacagctggtcgacctgcccgagtattatagttggggagaagaactgacagaaacccaacatatgatccaaaggagaatcatggagagcgtcaatggtttaaagtctctgagtgctggaagggtggtcgtggtaaagaatcaagaacaccacaatgccctgggcgtcatactgcaggtgagttcgaacagcacctcacgggtttttaccactcttgtgctctgtgataagccactgtcacaggatccccaggatagggggcctgccacggccgaggtcccatacccagatgacctggttgggttcaaattgtttctgcctgagggcccttgtgaccacacagtggtgaagcttcagccgggcgatatggccgctatcactaccaaggtgctgagagttaacggagagaaaattcttgaggacttcagcaaaagacagcagccaaaatttaagaaggacccgcccctcgcggctgtcacaacagccgtccaagaactcctccgccttgcccaggcccacccagctggaccaccaactctggacccagtaaatgacctgcagctgaaagatatgtccgtggtggagggcggccttcgagcgaggaaactggaagagctaatccagggagctcaatgcgttcacagccctcggtttcctgcgcaatatttgaagttgagggaaaggatgcagatccagaaagaaatggaacgtttgcgattcctgctgtcagaccagtcgctactactccttccagaatatcatcagcgagtcgaggttcttcgaactcttggctatgtggacgaagcaggcactgtaaagctagctggccgggtggcctgcgccatgtctagccatgagttgttgctcaccgagctgatgttcgataatgcactaagtacattacgaccggaagaaatcgctgcgttgctgagtgggcttgtctgccagagccccggagatgccggagaccagctgcctaataccctgaagcagggaattgagcgcgttcgtgctgtagcaaagaggatcggcgaggtacaggtggcatgtgggctcaaccagaccgtagaagagttcgtcggcgagctcaattttggcttggtggaagtcgtgtacgagtgggctcggggtatgccattcagcgagctagccggcctaagcggtacacctgaaggtctggtggtgcgctgcatacagcgtttggcagagatgtgcagaagcctccgcggcgccgctcgtctcgtcggggagccagtcctgggagccaagatggagaccgccgctacactgttgcggagagatattgtctttgctgcgtcactgtacacccagtag

SEQ ID NO: 169211 - DNA, 3741 bp, Artificial Sequence
  derived and/or modified sequence
atgatggagaccgagcggctggtgctgcccccccccgaccccctggacttgcctctgcgtgcggtggagttgggctgtaccggccactgggagctgctgaacttacctggagcacccgaatcatccttaccgcatgggctccctccctgcgccccagacctccagcaggaagctgaacagttgtttctgtccagccctgcctggctgccactgcacggggttgagcacagtgctcgtaagtggcagagaaagaccgacccctggtctctgctagcggtgctgggggcacccgtcccttccgacctgcaggctcaaagacacccgaccacaggacaaattctcggctacaaagaggtactgctggaaaataccaacctctctgccacaacatctctctctctccgcaggccccccggacctgcctcccagagtctgtggggaaatccaactcagtaccccttttggcctggcggaatggacgagcctactataactgatttaaacaccagggaagaagctgaagaggagatcgactttgagaaggacctgctcacaattcccccaggctttaagaagggaatggattttgccccaaaagactgtcccacaccggcccccggtttgttgagcctctcgtgtctgttggagccattggacctagggggcggcgacgaagacgaaaacgaggctgtgggacagcctggggggccccggggcgatactgtgtcagcctccccgtgttcagccccccttgccagggccagctctttggaggatctggtgcttaaggaagcttctactgccgtctccacacccgaagcccctgagccaccttcacaggaacaatgggcaatccccgtcgatgcaacctccccagtgggggacttctatagattgatcccccagccagctttccagtgggcattcgagccagatgtctttcagaaacaggccattctccacctggaacgtcatgacagcgtgtttgtcgccgcccacactagcgcgggaaaaaccgttgttgcagagtacgccatcgctctggctcagaagcacatgacaagaacaatctacacctctccaatcaaagcactgtctaatcagaagtttagggacttcaggaacaccttcggcgatgtgggactgctgacaggggacgtccagttgcacccggaggcttcatgcttgatcatgaccactgagattctgcgctccatgttgtatagcggcagcgacgtcatccgagacttggagtgggttatctttgacgaagtgcactacatcaatgatgttgagcggggtgtggtctgggaggaagtattaattatgttgccagaccacgtgtccatcatccttctaagtgctactgtacccaatgccctagagttcgctgactggatcggaagactgaagagacggcaaatatacgtcatatccactgttacaaggcccgtcccactggagcactatctgtttaccggaaacagctcgaaaacacagggtgagctgttcttgcttctcgatagcagaggcgcctttcacaccaagggctattacgccgccgtagaagctaagaaagaacggatgagtaagcacgctcagacatttggcgccaagcagcctacccatcagggtggtcccgcacaggacaggggcgtgtacctgagcctcctggcatcgttgagaacccgcgctcaacttcccgtcgtggttttcacctttagtagagggagatgcgacgaacaagccagcggcctgacttccctagatttaactacgtcctctgagaagagcgaaatccatttatttctacaacgctgtctggcccgccttagagggtctgaccgccagctacctcaggtcctccatatgtcggagctgctgaaccgaggtctaggcgtgcaccattctggcatacttcccatcctaaaagagatcgtggagatgctgtttagccgcggtttagtaaaagtcctattcgcaacagagaccttcgccatgggagtgaacatgccagcccgcacagtggtctttgactccatgagaaagcacgatggctctacctttcgcgatctactacccggcgaatacgtccaaatggctggcagggcaggacgcaggggcctggatccaaccggtaccgtgatcctgttatgtaagggaagggttcccgagatggcggacttacaccgaatgatgatgggaaaaccaagccaattgcaaagccagtttagactcacttatactatgattcttaacctgctgagagtggacgcgctgagggtggaagacatgatgaaacgatccttctccgaattccccagtcgtaaggattccaaagcacatgagcaggccttagccgagcttacaaaacggctgggggccctcgaggaacctgatatgaccggccaactcgtagatctgccagaatattattcctggggagaagagcttaccgaaactcagcacatgatccagaggcgcatcatggagtccgttaacggactgaaaagcctatccgccgggagagtagtagtagtaaagaaccaggagcaccacaacgccttgggcgtgatccttcaggtttcgtctaactcaactagccgagtgttcacaacccttgtcctatgtgacaaacctttgagccaggatccacaagataggggacctgccacagctgaggtcccttatccagacgacctcgtgggctttaagctatttctacctgagggaccctgcgaccatacagtggtcaagctgcagcctggggacatggcagccataactacaaaagtgctgagggtgaacggggaaaagattctggaggacttctccaaacggcagcagcctaagtttaaaaaagacccccccctggctgccgttactactgctgtccaagaattattacgactggcccaggcacacccggccggccccccaaccctcgatccggtgaacgacctccagcttaaggacatgtctgttgtggagggaggactgagagcgaggaaacttgaagaactgatccaaggggcccagtgtgtgcattcacctcgatttcctgcccaatatttgaagttgagggagagaatgcaaattcagaaggaaatggagcggttgagatttttgctgtcggatcagagcctcctcctcctgcccgagtaccaccaaagagtggaagtgctgcgaaccctggggtatgttgacgaggcaggaaccgtgaaactggctggcagggtggcttgtgccatgagctctcacgagctgcttcttaccgagctgatgttcgataacgcactgtcaacactacgccccgaggagattgccgcactgctgtcagggttggtctgtcaaagcccaggggacgcaggagaccagctgccaaacacactgaagcagggcattgagagagtaagagcagtcgcaaagaggattggggaagtccaggtcgcctgtggcctgaaccagactgtcgaggaatttgttggcgaacttaatttcgggttggtggaggttgtctacgagtgggcccggggcatgccctttagtgagcttgctggtctctccggcacacccgagggactcgtcgtgcggtgcatccagagactagctgagatgtgccgaagcttgcggggtgccgcccgcctcgtcggcgagcctgtcctcggggcgaagatggaaacggcagccactctgctccggcgggatatcgtgtttgcagcctctctttacactcagtag

SEQ ID NO: 169212 - DNA, 3741 bp, Artificial Sequence
  derived and/or modified sequence
atgatggagaccgagcggctggtgctgcccccccccgaccccctggatctgcctctacgtgcagtcgaattggggtgcaccggacattgggagctgttgaacctgccgggcgcccctgagagcagtctgccacacggtttaccgccatgtgcacccgaccttcagcaggaggcagaacaattgttcctctcctcgcctgcgtggctgcctctgcatggggtggaacatagcgctcggaagtggcagcggaagaccgatccatggtctctcctcgcggtccttggggcccccgtcccatctgacttgcaggcccagcgccaccccaccacaggccagatcctcggctataaggaggtgctgctggaaaacacgaatctctccgcgacgacttcactgtcccttaggaggcccccaggcccggcatcccagtcactgtggggaaatcccacacagtatcctttttggcccgggggaatggatgagcctaccattacggatcttaacacacgggaggaggctgaagaggaaatagacttcgaaaaggacctgctgacaatcccccccggctttaaaaagggtatggatttcgctcccaaagattgcccgacgcctgcacccggcctgctgagtctcagctgtctgttagagcccttggacctgggcggcggcgacgaggacgaaaatgaagctgtcggccagcccggaggacccaggggcgacaccgtgtccgcttcaccctgtagtgctcctttggcaagagcgagcagcctggaggaccttgtattaaaagaggcaagtaccgccgttagcacacccgaggctccagagcctccatcccaagagcagtgggcaattcccgtcgatgcaacgtcacctgttggagacttttatcggctcattccccagcccgcattccagtgggccttcgaaccagacgtcttccaaaagcaggccattcttcaccttgaacggcacgactctgtatttgtggcagctcacacatccgccggcaaaactgtggtggctgaatacgcgattgcactggcccagaagcacatgactcggaccatttacaccagtcctatcaaagccttgtccaatcagaaattcagagatttccgcaatacttttggggatgtgggcctgctgactggggacgtgcagctgcaccccgaggcatcctgcctgattatgaccacagagatcctacgaagcatgctgtattcagggagtgacgttatccgagacttggagtgggtgattttcgatgaagtgcactatatcaacgacgtggaaagaggggtggtctgggaagaggttctcattatgctgccggatcatgtgagtattattctgctctcagcaaccgtgcccaacgcattggaatttgcggactggatcggcagactgaaacggcgacagatttacgtgatatctacagtgaccagaccggtacccctggagcattacctgttcactggtaattccagcaagacacaaggagagctgttcttgctgctcgactctaggggagctttccacactaagggctactatgcagccgtggaagcgaaaaaggagcggatgtccaagcacgcccagacctttggagctaagcaaccaacacaccaaggaggacctgcccaggatcggggagtgtacctttcccttctagccagccttcgcacaagggcccagttgcctgttgtggtgttcacctttagccgaggacgctgtgatgagcaggcctccgggctgacgtccttggacctcaccacaagctcagagaagtcagaaattcatctgttccttcagaggtgcttagcccggctccgcggaagtgacagacagctgcctcaggtgcttcacatgagcgaattacttaacaggggacttggcgttcatcatagtggaattcttcccatcctgaaagagattgtagaaatgctcttcagccgcgggctcgtgaaggtcttgttcgctactgaaacctttgccatgggtgtaaacatgcccgctagaaccgttgtttttgacagcatgcgcaagcacgatggctcaactttccgcgatctcctgcctggggaatatgtgcagatggccggtagggccggccggaggggcctggaccctacgggcactgttatcttgctgtgcaagggaagagtgcccgaaatggcggatctacaccgtatgatgatggggaagcccagtcagttgcaatcccaatttcggcttacctataccatgattctgaatctcctccgtgttgacgcactccgtgttgaggacatgatgaagcgctcattttccgagttccccagcaggaaggactcaaaagctcacgaacaggccctcgcggagctcaccaaaagactgggtgcgctggaggaacccgacatgaccggccagctggtggacctcccggagtattactcctggggagaagagctgacggaaacccagcatatgatccaacgcagaatcatggagagcgtcaacggcctgaagtctctcagcgctggccgagtggtcgtggtcaaaaaccaggaacaccacaatgccttgggggtgatactgcaggtgagcagcaattccacaagtagggtgtttactaccctagtgttgtgcgacaagccactgagccaggatccacaggacaggggccccgccacagccgaggtgccttacccagatgatctcgtgggctttaaattgttcctgcccgaggggccttgtgatcatactgtcgtgaagttacagcccggcgatatggctgctatcactacaaaagtgctgagggttaatggggaaaagatcctggaggattttagtaagcggcaacagcccaagtttaagaaagaccctccgctggccgcagtaaccacagccgtgcaagaactactgaggctcgcacaggcccaccccgctggaccacccacgttagatccagtgaacgatttgcaactcaaagacatgagtgtggtcgaggggggattgagggctcgtaagctggaggagttgatccagggtgcccagtgcgtgcattcgccaaggtttcccgcacaataccttaagctgcgggagcggatgcagattcagaaggagatggaaagactccggttcctgttatccgaccagagcctcctgctgctgccggagtaccaccaacgcgtggaagtcctccggaccctgggttacgtggacgaggcggggaccgtcaagctagcagggcgagtcgcgtgcgctatgtcctctcacgagctgctcctaaccgagctcatgtttgacaacgccctgtcgacgctgaggccagaagagatcgccgcccttctgtccggattggtgtgccaatctcctggcgacgccggcgaccagctccccaacaccttaaagcaaggtattgaaagagtccgggctgtcgccaagcggattggcgaggtccaggttgcttgtggcctgaatcagaccgtggaagagttcgtcggagaactcaattttggactggtggaggtggtctatgaatgggctaggggaatgcccttttcagagcttgctggattatctgggacgccagaaggtctggtagtgcgatgcatacaacgcctagctgaaatgtgtcgctccctgcgaggcgcggcccggctcgtcggggaaccggtcctgggggcaaagatggagactgcggctaccttactcagaagggatatagtgttcgctgcctcgctttatacccagtag

SEQ ID NO: 169213 - DNA, 3741 bp, Artificial Sequence
  derived and/or modified sequence
atgatggagaccgagcggctggtgctgcccccccccgaccccctggatctccccctgagggcagtggagctcggttgtacgggtcattgggagctactcaacctcccaggggccccggaaagcagcctgccccatgggcttccaccttgcgctccagacctgcaacaggaggccgagcaattattccttagttcccctgcttggctgccccttcacggagtggagcatagcgcccgcaagtggcagcggaagaccgatccatggtccctcctagcagttttgggagctccggtaccctctgatctgcaggcccagcgccatcccacgacaggacagatcctgggatataaggaggtattgctggaaaatactaacttgtccgctaccacgtctctgagcctgcgaaggccacccgggcctgccagccagtctttgtggggtaatcccacccagtatcccttttggcccggcggaatggacgagcctaccatcacagacctcaacacgcgggaagaagctgaggaggaaatcgactttgagaaagacttgctgacaattcctccaggctttaagaagggtatggatttcgctccaaaagattgcccgacaccagcccctggcctattgagcttgtcttgcctcctggagcccctggacctgggggggggggacgaagacgagaatgaagcagtcgggcagccgggaggccctcgcggtgatacagtcagcgcctcaccctgcagcgccccactcgcccgtgcatcctctctggaggatctggtcttgaaagaggcaagtactgccgtgtctacacccgaggccccagagcctcccagccaggagcaatgggcaatacctgtagacgccacaagccccgtgggtgatttctataggctgattccacaacctgctttccaatgggcatttgagcctgacgtgtttcaaaagcaggccatcctacacctcgaacgtcatgactccgtcttcgtggcggcccacaccagcgctgggaaaacagtggtcgctgagtacgcaatcgcgctggctcagaagcacatgacgcgcacgatctacactagcccgatcaaggccctatccaaccagaaattcagagactttcgtaacactttcggcgacgtgggactgcttactggtgatgtacaattacacccagaggcctcctgcctcattatgacaacggaaatactcagatccatgctatatagcggatctgatgtgatccgggacttggagtgggtgattttcgacgaggtacattacataaatgacgtggagagaggcgtcgtctgggaggaagtcctcattatgctccccgatcatgtatctattatacttctgtccgccactgttcctaacgcactagagtttgcagattggattgggcggctaaagagaaggcaaatatacgtcatcagtaccgtcactcggcccgtgcctctggagcattacttgtttactggaaattcatccaaaactcagggtgagctgttccttctgctagattcccggggcgccttccacacaaagggctattacgccgctgtggaagccaagaaagaacgaatgtccaagcatgctcaaacctttggcgccaaacagcccacacatcagggaggcccagctcaggaccgcggggtatacctttcattgctggcttcactgagaacgagggctcagctgccagtcgtggtgtttacttttagcagaggcagatgtgatgaacaagcgagcggactgacatccctcgaccttactacgtcttctgaaaaatccgaaatccatcttttcctgcagagatgtctagccaggttgaggggctcagacaggcaactgcctcaggtgctgcatatgagcgagttacttaaccgaggtctgggtgtgcatcattccggaatcctccctatcctgaaggagatcgtcgaaatgctcttttctaggggtctggtaaaggtgcttttcgccacggagaccttcgccatgggcgttaacatgcccgctaggacagttgtcttcgactccatgaggaaacacgatggctcaacattccgcgacctgctgccgggtgaatatgtgcagatggccggccgcgctggtaggcgaggcttagaccccactgggacagttatcttactttgtaagggaagggtgccggagatggcagatctccatcgcatgatgatgggcaaaccgagccagcttcagagccagtttagactgacatatacaatgattcttaatttgctgcgggtggatgcgctgagggtggaggatatgatgaagagatcattcagcgagtttccttccaggaaggattctaaggcccacgaacaggccctggctgagctgacgaagcggctgggggcactggaggagccagacatgacaggacagttagtcgatctacccgaatattattcttggggcgaggaactgactgaaactcaacacatgatccagcgaaggatcatggagagtgttaatggcttgaagagcctgtcggccggacgtgtggtggtggtgaagaaccaggaacaccacaatgccctgggtgtgatcctccaagtctcaagtaattccacttctcgagtgtttactacacttgtgctgtgcgataagcccctgagtcaggatccacaggaccgtggacctgcaacagccgaggtcccatatcccgatgatctggtggggttcaagttgttcctgcccgagggcccgtgcgaccacacagtggtgaaactgcagccgggtgacatggctgcaatcaccaccaaagtgctgagggtgaacggcgagaaaatccttgaggatttttcaaagcgtcagcagcctaagtttaagaaagaccccccactcgccgccgtcacgaccgcagtgcaggagctactacggttggctcaggcacaccctgcgggcccgccaaccttggatcctgtgaacgatctgcagttgaaggatatgtccgtggttgagggcggtcttagagcacgtaagctggaggaactcatccaaggcgcccagtgcgtgcacagcccgagatttccggctcaatatttgaaactccgagagcgcatgcagattcagaaggaaatggaacggctgcgatttttgttgtcagaccagtccctgctcctgcttcccgaatatcaccaaagagtggaggtgcttagaaccctcgggtacgtggacgaggcaggcactgtaaagctcgctggcagagtggcatgcgccatgagcagccacgaacttctcctgactgaactcatgtttgataacgctttgtctaccctgcgaccagaggagattgccgctctgttgagcgggctcgtgtgtcaatcccctggtgacgccggagatcagctgccaaatactttaaaacaggggattgagcgtgtgcgcgccgtcgccaaaaggattggcgaggtgcaggtagcgtgcgggctgaaccagaccgttgaagaattcgttggcgagctgaactttggcttggttgaagtggtatacgagtgggcgcgcggcatgccattctcagagctggctggcctgagtggcacacctgaaggattagtggtgagatgcatacaaagactggctgagatgtgcaggtccctacgaggagctgccagactcgtgggtgagcctgtgctcggcgctaagatggaaactgccgcaaccctcttgcggcgagacatagtgttcgctgcatcactttatactcagtag

SEQ ID NO: 169214 - DNA, 3267 bp, Artificial Sequence
  derived and/or modified sequence
atggacgagcccaccatcaccgacctgaacacccgggaggaggccgaggaagagatagactttgagaaggacctccttaccataccccctgggtttaagaaggggatggactttgcgcccaaggactgccctacccccgcaccaggacttctatccctctcctgcatgctggagccgctagacctgggaggaggcgatgaggacgagaacgaggctgtgggtcagccaggcgggcctagaggagatacggtatccgcttccccctgctccgcccccctggcaagagcttcttccctcgaggatctggtcctgaaagaagcctctaccgcagtgtccaccccggaggcccctgaaccccctagccaggagcagtgggcgatccctgttgacgccaccagccctgtgggcgatttttacagactcattccccaaccagcctttcagtgggcattcgagcccgatgtctttcagaagcaagcaatcctgcacctggaacgccacgattcagtgttcgtggccgcccatactagtgctggcaaaaccgttgtcgctgaatacgcaattgccctggctcagaaacacatgactcggacaatttacacctctcctattaaggctctgagcaaccaaaagttcagagactttcggaatacttttggggatgtggggctgttgaccggcgacgtccagttacaccctgaagcgagctgcctcataatgaccacagagatcttaagatccatgctgtactctggatccgatgtgatcagggacctggaatgggtcatcttcgatgaagtccactacatcaacgatgtggagagaggcgtcgtctgggaggaagtcttgatcatgctccccgatcatgttagtataatcttgctaagcgccaccgtccccaacgctctggaattcgcagactggatcggtcgactcaagcggcgccagatttacgtgattagcacagtcacaagacccgtaccattggagcactatctgtttacaggcaactcttctaaaacacagggcgaactctttttactgctggacagtaggggggcctttcatactaaggggtactatgctgcggtggaagctaagaaggaacgcatgtctaagcacgctcagacctttggcgcgaaacagccaacccatcagggtggccctgctcaggatcggggagtatatctcagtctgttggcaagtctgcgtacaagagcccagctgccagtggtggttttcaccttctcgaggggccggtgcgacgagcaggccagtggcctgacttccctggaccttacaaccagtagtgagaagagcgagatccacctttttctgcagagatgcctcgcgcggctgcgagggagtgaccggcaattgccccaggtattgcatatgagtgagttgctgaataggggactgggagtccaccactccggtattctgcctattctgaaagaaatcgtagaaatgttgttctctagaggactagtgaaggtgcttttcgccaccgaaaccttcgcaatgggagtgaatatgcctgcacggacagtcgtgtttgattctatgaggaagcatgatgggtcaaccttccgggacctactgcccggcgaatacgtgcagatggctggaagagctggccggagagggctggacccaaccgggacagtgatcctgctgtgcaaaggacgagtgccagaaatggccgatctgcaccgcatgatgatgggaaagcctagccagctgcaaagccaattccgcctgacatacacaatgattctgaatttgctgagagtggatgccttaagggttgaagatatgatgaaaaggtctttctccgaatttccaagtcgaaaagattcaaaggcccatgaacaggcactagctgagctgaccaagcgcctgggagccctcgaagagcctgatatgaccggacagctagtggaccttcctgagtactacagctggggcgaggagttgaccgagacccaacacatgatccagcgccgtatcatggagtccgtcaatgggctaaaaagcctgtccgctggtcgagttgtggtggttaaaaaccaagaacaccacaatgccctcggtgtgattttgcaggtaagttctaactccactagtcgggtctttacaacattggtcctctgtgacaagcccctaagccaggatccccaggatcgtggcccggccactgccgaagttccatatccggacgatctagtgggctttaagctattcctaccagagggaccatgtgaccacaccgtggtgaagctacagcctggagatatggcagctattaccacgaaggtcctgcgagtcaacggcgaaaaaatccttgaggacttcagcaaaaggcagcagcccaaattcaaaaaagaccctccactggccgctgtgaccacagccgtacaggagttactgagactggcacaggcgcatcccgccggaccacctaccctggaccctgtcaatgacctgcagctcaaggatatgtcagtggtggaaggggggctgagggctaggaaactggaggaacttatccagggcgcccagtgcgttcacagtccacgtttcccggcccagtacctcaagcttcgagagcggatgcagatccagaaagagatggagaggcttcggtttttactcagtgaccaatcactcctgctgctccctgaatatcatcagcgcgttgaggttctgcggacgctgggttatgtggacgaggcggggacagtgaaactggccggacgcgtggcgtgcgcaatgtcttcccacgaacttctcctgacggagctgatgttcgacaacgccttgagcacactgagacctgaggaaatcgcagcactgctgtctggcctcgtgtgccaatcacctggcgacgctggtgatcagctgcccaacaccctgaagcaggggatcgagcgcgttcgcgcagtagctaaacgaatcggcgaagtacaggtggcatgtgggctgaaccagacagtagaggaatttgtcggagagctgaacttcggtctcgtggaagttgtctatgagtgggctaggggcatgccttttagtgagctggccgggctgtccggcactcctgaaggcctggtggttagatgtattcagcgcttggccgagatgtgccgctcactgcgaggagcagctaggctcgttggagagcccgtgctcggggccaagatggagactgctgctactcttctgcgcagagacatcgtgtttgctgctagtctgtacacacaatag

SEQ ID NO: 169215 - DNA, 3741 bp, Artificial Sequence
  derived and/or modified sequence
atgatggagaccgagcggctggtgctgcccccccccgaccccctggacttaccattacgtgcagtagaactgggctgtaccggacattgggaacttcttaacctgccgggagcccccgaatccagtctaccccatggcctgcccccatgcgccccagatctccagcaggaggccgagcagctgttcctcagttctcccgcctggctgccactacatggcgtagagcatagtgccaggaagtggcagcgcaagaccgacccttggtctctgctggccgttttgggtgcccctgtgcctagcgatctccaggcgcagaggcaccctactactgggcagattctggggtataaagaagtgttgctggaaaataccaatctgagcgcaaccacctccctgagcctgcgacgccctccggggcctgcctcacaaagtttgtggggcaatccgacacagtatcccttctggcctggagggatggatgagcctacaatcacagatctgaacacgagggaggaagctgaggaagagatcgacttcgagaaagacttgctcactatccccccaggcttcaaaaaaggcatggattttgcaccaaaagactgccccaccccagcgcccggtctattatcattaagttgtatgttggaacctctagatttgggtggaggggacgaggatgaaaacgaagccgtcggtcagcccggtgggcccagaggagataccgtgagcgcttctccctgttccgcacctttagcacgggccagctcactagaagacctggtgctgaaagaagccagcacggccgtgagcacccccgaggcccctgagccacccagtcaggagcaatgggccatccccgtggatgctacatctccagtcggcgacttctataggttgattccgcaacccgcttttcagtgggccttcgaacccgacgtgtttcaaaaacaggcgattttgcacctggagcgccacgactcagtgtttgtggcggcccatacgtcagcaggcaagactgtcgtggctgagtacgctattgcgctggctcagaaacatatgacacgaactatctatacctcaccgatcaaggccctcagtaaccagaagtttcgcgatttccggaataccttcggcgatgtgggcctcttgaccggagacgtgcaattgcaccccgaggctagctgcctcatcatgacaacagagatcctgaggagcatgctctattctggctcagacgtgatccgtgatctcgaatgggtgatcttcgatgaggtgcactatatcaatgacgtggagagaggcgttgtctgggaagaagttctcatcatgttacccgatcacgtgtctatcatcctccttagtgctacagtcccaaatgcactggaatttgcggactggatcggtagattgaaaaggcgccaaatatacgtgattagtacagttacaaggcccgttcccctcgagcactaccttttcacgggtaactcaagtaagacacagggcgagttgttcctgcttctcgatagcagaggggcgttccatacaaaaggctactacgcggccgtggaagcaaagaaagagagaatgtccaagcacgcacagaccttcggcgctaaacagccgacacatcagggtggccctgctcaggatcgaggggtgtacttgagtctccttgcctctttgcgcacaagggcacaattacccgtggtcgtgttcaccttttccagaggacggtgtgatgagcaggcttctggactcacgtctcttgacctgaccaccagcagtgagaagagcgagatccatctctttctccagcgttgcctggctcgcctccggggctccgaccggcagctgccccaagtgttgcatatgagtgagctactgaacagagggctgggggttcaccattcagggattctgccaattctgaaagagatagtcgaaatgttattctcccgaggactcgtgaaagtccttttcgccaccgagacctttgcaatgggcgtcaacatgccagccagaacagtggtcttcgactccatgaggaagcatgatggctcaacgtttagagacctcctgcctggggagtacgtgcagatggcagggagagcgggccgaaggggcttagatcccactgggacggtcatattgctctgtaagggccgggttcccgagatggcagacctacataggatgatgatgggcaagccttcccaacttcagagtcagtttcgtcttacatacacgatgatccttaaccttctccgtgtcgacgccttaagagtcgaggatatgatgaagaggtctttctcagaattcccctcgcgtaaagattcgaaggcccatgagcaggcactggccgaactcacaaaacgcctgggagccctggaagagccggacatgactggacagctggttgacttacctgaatactattcatggggcgaagagttgactgagactcagcacatgatccaacgcagaatcatggaaagtgtgaacggcttaaagtcactgtctgccggcagggtggtagttgtaaagaatcaggaacaccataatgctcttggagtgatcttgcaagtgtcctcaaattcgaccagcagagtatttaccaccttagtgctgtgtgataagcctctgagccaggatccccaagatcggggaccagctacagccgaagtcccataccccgacgatcttgttggcttcaaactattcctcccagaagggccatgtgatcataccgtggtcaaactgcagccaggtgacatggctgctatcaccactaaggtcctgagagttaatggggagaaaattctggaggacttttccaaacggcaacagcctaaattcaaaaaggatcctcccctggcagcggtaacaactgctgtacaagagctgctacgcctggcccaggcccacccagcaggccccccaacactggatcctgtcaatgatttacagcttaaggacatgtcggtggtggagggggggctgagagcacgtaagctggaggagttgattcagggggcccagtgtgtgcattctcctaggttcccggctcagtaccttaaactccgggaacgtatgcagattcaaaaagagatggagaggctgcgcttcctcctctcggatcagagtttgctgttgttacccgagtatcaccagcgcgtagaggtgctccgaacgttggggtacgtggatgaagccgggactgtcaaattagccggacgcgtggcatgtgcgatgtcatcgcacgagctgcttctgacagagctcatgtttgataatgccctgtccaccctgaggcctgaagagattgctgccctcctaagcgggctggtgtgccagtctccaggtgatgccggggatcagctgccgaatactctgaaacagggaattgaaagggtgcgggctgttgcaaagcgaatcggtgaggttcaggttgcctgtgggttgaaccaaacagtggaagagtttgtcggcgagcttaactttggcctagttgaagtcgtatatgagtgggcacgggggatgccattttccgagctggccggcttgagcggtacacctgagggccttgtcgtaagatgcatccagagactggcggaaatgtgccggagtctcaggggcgctgccaggcttgtcggtgagcccgtacttggcgcaaagatggagacggcagcaacgttgctgcgcagggacatcgtcttcgcggcgtccctgtacacccaatag

SEQ ID NO: 169216 - DNA, 3162 bp, Artificial Sequence
  derived and/or modified sequence
atggacttcgcccccaaggactgccccacccccgcccccggcctgttgagcctcagttgtatgctcgagccattggacttgggcgggggggatgaggacgagaatgaggcggtagggcagcccggaggaccccgtggcgatacagtgtccgcatctccatgcagcgcacccctagcccgtgccagctctctcgaagacctggtcttaaaagaagcttcaaccgcagtcagtacacctgaggccccagagccacctagtcaggagcagtgggctattcccgtagacgcaacaagtcccgttggcgacttctatcgtcttattccccaaccagcatttcaatgggccttcgaaccagatgtgtttcaaaaacaagcaattctccatttggaaaggcacgatagcgtttttgtggccgcgcatacttcagccggaaagaccgttgtcgccgagtatgcgatcgccctggctcaaaagcatatgacgaggaccatatatacaagtcccataaaggcactctctaatcagaaattcagggacttccgtaacacgtttggcgacgtgggactcttaacgggtgatgtgcaattgcatcctgaggcttcctgcttaatcatgacaactgagatcctgcggagcatgttgtattctggatccgatgtgataagagatctggaatgggtgatctttgacgaagtccactatatcaacgatgtcgaaagaggagtggtgtgggaagaagtccttatcatgctcccagaccacgtgtctatcatcttactgtctgctaccgtgcctaatgcacttgagtttgctgattggatcgggcggctgaaacgacgccagatttatgttatctcaaccgtaacacggcctgttccattggagcattacctcttcacagggaattcaagtaaaacacagggcgagctgtttctgctgctggacagccggggcgcgttccatactaagggatactacgccgctgtcgaggctaagaaggagagaatgtcaaagcacgctcagaccttcggcgcaaagcaacccacacaccagggcggaccggctcaggatcggggcgtttatttaagcctcttggcttcccttagaacgcgagcccagctccccgtcgtggtgttcactttctccaggggcagatgtgacgaacaagcatccggactcacaagtctcgatttgacaacctcgtccgagaaaagcgagattcacctattccttcagaggtgtctggcgagactgcgcggaagcgatagacagcttccccaggtgctccatatgagcgagcttttgaataggggattgggcgtgcaccattctgggatcctccccattctgaaagaaatcgttgagatgcttttttcacgcggtctcgtgaaggttttgttcgctaccgaaacctttgccatgggagtcaacatgccagccaggacagttgttttcgactcgatgcgcaagcatgacggcagtacctttcgtgatctgcttccgggcgaatacgtacagatggccggcagagcaggccgcagagggctggatccgaccggcaccgtgatcttactgtgtaagggaagagttcctgagatggccgatctgcatagaatgatgatgggtaaacccagccagctccaaagccaatttcgcttgacttacaccatgattctcaatctgctccgagtcgatgctttacgggttgaggatatgatgaaaagatccttttccgagttcccgtctcgtaaggatagcaaagcgcatgagcaggctctcgccgaacttactaaacgtttaggagccctcgaggaaccagatatgactggacagcttgtggacctgcccgaatactatagctggggtgaagagttaaccgaaacccagcacatgattcagcgacgcatcatggagtcggtgaatggcctaaaaagcctctccgcggggagggttgtggtagttaagaaccaggagcaccataatgccctgggggtaatccttcaggtctccagtaactctacaagccgagtcttcactaccctggttctatgcgacaaacccctgtcgcaggatccccaagacagagggcctgctaccgcagaggtgccataccctgatgatctggtgggctttaaattatttttaccagagggcccttgcgaccatacagttgtgaagttacaacccggggacatggcggccattaccacgaaggtacttcgagttaacggggagaaaattttggaggattttagtaaacgccagcaaccaaagttcaaaaaggatcccccgctagctgccgtgaccactgcagttcaggaactccttaggctggcccaggcacatcccgccgggccaccaactctggacccagtcaatgatctgcagcttaaggatatgagcgtcgtcgaaggtggactgagagctagaaagctggaggagctaatccaaggagcccaatgtgtccattctccacggtttccagctcagtacctcaagctccgggaacggatgcagatccagaaggagatggagcgcctgcgcttcctgctgtctgatcaaagccttctcttgttgccggaataccatcagcgggttgaagtcctacggacactggggtacgtggacgaggccggcaccgtcaagttggcaggccgggtcgcctgcgccatgagttcacacgaactgctcctgaccgaactgatgttcgacaacgccctttcaactcttcggccagaagagattgccgccctgctttcaggtctggtgtgtcagtcccccggcgacgctggcgatcagttgcccaacactctcaagcagggaatagagcgcgttagagcagttgccaagcgcatcggcgaggtgcaggtagcgtgtgggctgaaccagactgtcgaagaattcgtgggcgagttgaacttcggcctcgttgaggttgtttacgagtgggcccgcgggatgccattttccgaactggctgggctgagcggcacacccgagggattagttgtgaggtgtattcagcggctggctgaaatgtgtagaagcctccgtggggcagcacgcctggtaggtgaacctgttcttggtgcaaagatggaaaccgcagccacccttctgcgccgggatattgtgttcgcggccagcctctacacccagtag

SEQ ID NO: 169217 - DNA, 3162 bp, Artificial Sequence
  derived and/or modified sequence
atggacttcgcccccaaggactgccccacccccgcccccggcctgttatctctttcctgtatgctcgagcccctcgacctgggtggaggggacgaggacgagaacgaagccgtgggtcagcccggtgggccacggggagacacggtgtcagcttcaccctgttcagccccattggcaagggcatccagcttagaggatctagtgctgaaggaagccagtactgcagtatcaactcctgaagctcccgaacctcctagtcaagaacagtgggctatacctgtggatgcaacgagtcctgttggagacttctatcggctcatcccacagcctgccttccagtgggcatttgagcctgacgtgtttcagaaacaagcaatacttcacctggagaggcacgactcagtattcgtggctgcccatacatccgccgggaaaaccgtggtagccgaatatgcgattgcgttggcccagaagcatatgacccgcacaatctacacatctccaataaaggccctgtccaatcagaaattccgagactttcggaacacatttggggatgtaggtctgctaactggggacgtacagctgcatcctgaagcatcgtgcctgattatgactaccgagattctccgcagtatgctatattctggcagcgacgtgatccgcgacctggagtgggtgattttcgacgaagtgcactatatcaatgacgttgagaggggcgtcgtttgggaggaagtcttgatcatgttgccggatcatgtctctatcatcctgcttagtgcaaccgtgcctaacgctcttgaattcgccgactggatcggacggttgaaaaggaggcagatttatgtcatctcaactgtcaccaggcctgtcccactagagcactacctgtttactgggaacagtagtaaaacgcaaggcgaactgttcctcctattggacagtcgtggggcatttcacactaaggggtattatgcagcagtggaagctaaaaaggagcgtatgtctaagcatgcgcagacttttggcgccaaacagcccacccatcaaggcggtccagctcaggataggggtgtgtatttaagccttctggcatctcttcgtacaagggcgcaactccccgtggtggtctttacattctctcggggaagatgtgatgaacaggccagtggcctgaccagcctcgaccttactacttcatctgaaaaatcagaaattcacctgttcctacaacgctgccttgcccggttgagagggtccgatcgccagcttccccaggtgcttcatatgtcggaactgctgaatagaggcctcggggtgcaccattctgggattcttcctattctgaaggagattgtggaaatgctcttttctcgcggactcgtgaaggttctatttgcaactgagacctttgcaatgggggtcaacatgcccgcgcggacagtggtcttcgattccatgaggaaacacgatggttctacattccgcgaccttctccccggagagtatgttcaaatggcaggccgggccggccggcgcggactggatccgaccggtaccgtcatcctactgtgtaaaggaagggtccccgagatggccgacctgcacagaatgatgatgggtaaaccatcccagttgcaatcccaatttagactcacatacacgatgatcctgaacctgctcagggtcgatgcactccgggtcgaggatatgatgaagcgctcgtttagcgagtttccttcccggaaggacagcaaagcacacgagcaggctctggctgaattgaccaagcgcctcggtgccttagaagagccagacatgaccgggcaactagtggacctgccagagtattactcttggggcgaggaactcacagaaacccagcatatgatccaaagacggattatggagtctgtgaatgggcttaagtctctctctgctgggcgggtggtagttgtcaaaaatcaggagcatcataatgctttgggcgtgatcctacaggtgtcttccaactcaacgtcgcgtgtctttaccactctggtgctgtgtgacaagcccctgtctcaggatccccaggatcggggcccagccacggctgaggtcccttaccccgacgacctggtgggcttcaagttgttcttgccagaaggaccctgcgaccatacagttgtcaaacttcagccgggggatatggcagccattaccactaaggtgctcagagtgaacggagagaaaatcttggaagacttttccaaacgccagcaaccaaagtttaagaaagacccacccctggcagcagtgactacagccgttcaggaacttctgagactggctcaggcccacccggcaggcccccccactctcgacccagtgaacgacctccagctgaaggacatgtcagtagtcgagggcggtctcagagccaggaagttggaggagctgatccagggcgcacagtgcgtacacagccctcgctttcccgcacagtatctcaagctgagagagcgaatgcaaatccagaaagagatggagcgtctgagattcctactcagcgaccaaagcttgctcctgctgcctgaatatcatcagagggtcgaggtgcttcggacccttggctacgtggatgaggcaggaaccgtgaagctggccgggagggtggcctgcgcgatgagttcccacgaactcctcctcaccgagctgatgtttgataacgcattgtctacgttgcggccagaagagatcgcagccctcctaagtggactggtttgccagtccccaggagacgcaggggatcagctgccaaacaccctgaaacagggtattgagcgagttcgggcggtcgctaaaagaattggggaggtgcaggttgcgtgtggtctgaatcagactgtggaggaatttgtcggcgaattgaatttcggacttgtggaagtcgtttacgaatgggcacgggggatgccgttttctgagctggccggattatcagggacccccgagggcctcgtggtgcggtgcattcagcggttggcagaaatgtgtcgcagccttagaggggccgccaggcttgtaggcgaacctgtactgggcgctaaaatggaaaccgctgccactttgctaagaagggacatcgtctttgccgcttctctgtacactcagtag

SEQ ID NO: 169218 - DNA, 3267 bp, Artificial Sequence
  derived and/or modified sequence
atggacgagcccaccatcaccgacctgaacacccgggaggaggccgaagaggaaatcgactttgaaaaggacttgctgactattccccccggcttcaagaaggggatggatttcgctccaaaagactgtccgacacccgccccaggattgctgagcttgagctgtctgctcgagccccttgatttgggcggaggggatgaagacgaaaacgaggcagtcggacagcctgggggcccaagaggcgacactgtatcagccagtccctgcagtgcaccgctggcacgcgcatcctctctcgaggaccttgttctcaaagaggctagcactgccgtcagcactcccgaggcccccgagcccccttcgcaagagcagtgggcaataccagtggacgccacttctccagttggtgatttctatcggttgatcccccaaccagcctttcagtgggcgttcgagcccgacgtttttcagaaacaggctatcctgcatctggagcgccacgacagtgtgttcgttgccgcacacactagtgctgggaagactgtggttgcagagtacgcaatcgcactggcccagaagcatatgacaagaacaatctacacatcgcctatcaaagctttgagtaatcaaaaatttcgggactttaggaacactttcggagatgtgggactactaaccggcgacgtacagctgcatcccgaagctagttgtctcatcatgacgacagaaatcctgagaagcatgctgtacagtggctctgacgtaattagagatttggagtgggtcatatttgatgaggtacattatattaatgacgttgagcggggtgtggtttgggaggaagtgctcattatgctgcctgatcatgtgagcatcatattgttaagcgccacagtgccgaatgccctcgagttcgccgactggatcggacgactgaaacgccgccagatttacgtcatctcaaccgttacgagacctgtgcctctcgagcactacttgtttactggaaattctagtaagacccaaggtgaacttttcctgctcctcgatagccgaggagcttttcacactaaagggtattacgctgccgtcgaggcaaagaaagagagaatgtcaaaacacgcgcagacattcggcgcaaagcaacccacacaccagggtggtcccgcccaggacaggggcgtgtatctgagcctgctggcttccctgaggacacgcgctcagctcccagttgtagtgtttacgttttctagaggaaggtgtgatgagcaagcgtccggacttacgtcactggatctaacaaccagcagcgagaagagtgaaatccacctgtttctccaaagatgcctagctagactgagggggtcagatcggcagctgccacaggtgctacacatgtctgaactgctgaacaggggacttggggtccaccatagcggtattctgcctattctgaaagagatcgtggagatgttattctcacggggactggtgaaggtcctgtttgccactgagacctttgccatgggtgttaacatgcccgctcgcactgtcgtgtttgacagtatgagaaaacacgacggttccacttttagggatctgctccctggggagtatgtacagatggccggtcgcgctggtcgaaggggactggatccaactggaacagtgatcctgctttgtaaggggagagttccagaaatggctgatttgcacagaatgatgatgggtaagccaagtcaactccagagccagttcagacttacatacaccatgatcttaaatttgctgcgcgtggacgcactgcgggttgaagatatgatgaagcgatccttcagtgaatttccctccagaaaggacagtaaggctcatgaacaggctcttgctgagttaactaaacgcctcggcgctttggaggaaccagacatgaccggtcagctggtggatcttcctgagtattatagttggggagaggagctcactgagacccaacatatgatccagcgacggataatggagtctgtcaacgggctgaagtctttgagtgccggtcgcgttgttgtggttaaaaaccaggaacatcacaatgcccttggggttattctgcaggtgagctcgaactcaaccagtagagtttttaccaccctggtgctatgcgataaaccactaagccaagaccctcaggatcgggggcccgccacagcagaagtcccttaccccgacgacctcgtggggttcaaattgtttttaccagagggaccctgcgaccacactgtggtgaaactgcagcctggagatatggccgccatcaccaccaaggttcttagagtcaacggagagaaaatcctcgaagacttctcaaagcgccagcagccaaaatttaagaaagaccctcctctcgccgctgtgactactgccgtccaggagttgctgcgtctcgcgcaggctcacccggccggtccaccaactctggaccccgttaacgatctgcagctgaaggacatgagtgttgttgaaggcgggctgcgggcccggaaacttgaagagcttatccagggagctcaatgtgtccactcgcctcgatttcctgcacagtacctaaaactgcgcgaaagaatgcagattcagaaggagatggagagactccgttttctactttctgaccagtctctgttgctgctgcccgaatatcaccaaagagtcgaagttctccgtacactcgggtatgtcgacgaggctgggaccgtgaagttggctgggcgcgtggcatgtgccatgtcttcccacgaacttctactcacagaacttatgtttgacaatgctttaagcactcttcgcccggaggaaatagctgcactattaagcggtctggtgtgtcagtccccaggcgatgcaggagaccaacttccaaataccctgaagcaagggatcgagagggtgcgagctgtggccaaacggatcggcgaggtgcaggtggcctgcggattgaaccagacagttgaagaattcgtcggcgagctgaactttgggctagtggaggtggtgtacgagtgggccaggggaatgccgttttctgaactcgccgggttgtccgggacccccgaagggctggtagtgcggtgtattcaacggttggcagaaatgtgcagaagccttagaggcgccgcaagactcgtcggcgagccggttctgggagctaaaatggaaacggccgctaccctgcttaggagagacatcgtgtttgccgcttctctctacacgcaatag

SEQ ID NO: 169219 - DNA, 3162 bp, Artificial Sequence
  derived and/or modified sequence
atggacttcgcccccaaggactgccccacccccgcccccggcctgctctccctcagttgtctactagagccactcgacttaggaggaggagatgaggatgaaaatgaagctgttggccagccaggcggccccaggggggacacagtgtctgctagcccttgctccgctcctcttgctcgggcttcttcccttgaggatctcgtgctgaaagaggcaagtacagccgtgtctacacccgaagccccagaacccccaagtcaggagcaatgggccattccagtggacgcaacatctccggtcggggatttttaccggctgattccccaaccagctttccagtgggcattcgaacctgatgtattccagaaacaggccatattgcacctagagagacatgattccgtgttcgtcgccgcgcatacaagcgcaggaaagactgtggtagcagagtacgcaatcgccctggcacagaagcacatgactcggacaatatatacctcccctattaaggccctgtccaatcagaaattccgggactttcgaaacacctttggagatgtgggacttctgacaggtgatgtgcagcttcatcctgaggcgtcctgtctgattatgaccaccgagatcctaaggagtatgctgtactctgggtctgatgtgattcgggatcttgagtgggtaatttttgacgaggtacactatataaatgacgtagagagaggcgtcgtgtgggaagaagttttgattatgctgccggatcacgtgtcgatcatccttctctctgccaccgtgcccaacgctctggaattcgctgattggatcgggcgccttaagcggagacaaatctatgtaatcagcaccgtgacaaggcccgtgcccctggagcattacctctttaccgggaactcgtctaagacacagggtgaactgtttttgctactcgacagtaggggggccttccataccaagggatattatgcagctgtcgaggcaaaaaaggaacggatgtcaaaacatgcccaaacatttggcgccaagcagccgactcaccaaggtgggccagcacaggatcgcggcgtttacttgtccctgctggcaagcctgaggacaagggcgcaactgcccgtggtggtattcacattttctcggggaagatgcgacgaacaggctagcggcttgacctccctcgatttgactactagctcagagaaatctgaaatccacctgtttctgcagcgttgtctggccagactgaggggcagcgacaggcagctgccacaggtgttacatatgtccgagttacttaatcgcgggctcggagttcaccattccggcattctacctatcttgaaagagatcgtggaaatgctattttcccgtgggctcgtgaaggtcttgttcgccactgagacctttgctatgggcgtaaatatgcccgcccggactgttgtgtttgactcgatgcggaagcatgacggatcaacttttagggacctactcccaggcgagtatgtgcagatggctggcagggccggtcgcagggggctggatccaactggaaccgtgattctcctatgtaagggtagggtgcctgagatggcagatttacacagaatgatgatgggcaagcccagccagctccaaagccagttcagactcacctataccatgattctcaatctgttgagagtagacgccttgcgcgtcgaagatatgatgaagaggagcttctctgagttccccagcagaaaggatagtaaggcacacgaacaggctctggctgagctcacaaagcgacttggagccctggaggaacccgatatgactggacagctggtcgatttaccagagtactactcttggggtgaggagttaaccgagacacagcatatgatacaaagaaggattatggaaagtgtcaatggtctgaaaagcttgtccgcaggtcgagtagtggttgtgaagaatcaagagcaccacaatgcccttggggtgattctgcaggtctcttcaaacagtactagtagggtgtttacaacattggtgctgtgcgataaacctctatcccaggatccacaggaccgaggtcctgccactgcggaagtcccataccctgatgatctggtgggcttcaaattgttcctgcccgagggcccttgcgaccacactgtggtcaagcttcagccaggggatatggccgccatcacaacaaaggtgttgagggtcaacggggaaaagattctcgaggactttagtaaacggcaacaacccaagtttaagaaggatccgcctctggccgcagtaactaccgccgtgcaggagctgttgagattggcgcaggcccacccggcagggccgcccaccctcgaccccgtgaatgatcttcagttaaaggatatgtctgtggtcgaaggcggcctgagagcacgtaaacttgaggagcttattcagggcgcacagtgcgtgcactcccccagatttcctgctcagtacctgaagttaagggagcgcatgcaaatccagaaagaaatggaaagactccgcttcttactgtctgaccagagtctgctgctccttcccgaataccatcagagggtggaggtcctgcggactctaggctacgttgacgaggccgggaccgtgaagctggctggccgagtcgcttgcgccatgagctcccatgagctcttgctcaccgagctgatgtttgacaacgccctttccaccctgaggccagaagagatcgcagccctcctcagcggtttggtctgccaatcacctggtgatgcaggcgatcaactccccaatactcttaagcagggcattgaacgtgtccgagctgtggctaagcgcattggcgaagtccaagttgcatgcggtctgaaccaaacagtggaagagtttgtgggggaactaaacttcgggttagtggaggtagtttatgaatgggcaagaggaatgccattttcagaattggcaggtctctctggaacccctgagggtctcgtcgtgcgctgtatacaaagacttgcggaaatgtgccgcagcctcagaggggcagcgcgcttggtcggggagcccgtcttaggagctaagatggaaaccgccgctactctgttaagacgggatatcgtgttcgctgcgtccctatacacccagtag

SEQ ID NO: 169220 - DNA, 2643 bp, Artificial Sequence
  derived and/or modified sequence
atgatggagaccgagcggctggtgctgcccccccccgaccccctggaccttccattgagggccgtcgagctgggttgcactggacattgggagctgcttaatctgcctggtgctccggaatcttcgctaccacatgggcttcccccctgcgcacctgaccttcagcaggaagcagaacagctcttcctttcctccccagcctggcttcctctccacggcgtggagcactctgcacgcaaatggcagaggaaaaccgatccctggtctctactggctgttctgggggcgcccgtaccgtctgaccttcaagctcagaggcacccaacaaccggacagattcttggatacaaagaggtgttattagaacactatcttttcacaggcaatagcagcaagacccagggggagctgtttctcctcctcgactccaggggcgcatttcacactaaaggatactacgccgctgtggaagccaaaaaagaacggatgtcaaagcatgcccagacattcggcgccaagcagccgacacatcaaggcgggcccgcgcaggatagaggcgtgtatctgtcactactcgcctctctgcgcactagagcccagttgcccgtagttgtgttcactttttcgaggggtcggtgcgacgaacaagcctcaggccttacgtcgctagacctcaccacctctagcgagaaatccgagatccatcttttccttcaacggtgtctggcccggttgcgtggatccgatcgccagctgccccaggtgctacacatgtctgaactcttgaatcgcggtctgggcgtacatcattcgggcatcctcccaatcctgaaagaaatagttgagatgttgtttagtagagggttggtgaaggtattgttcgcaactgaaaccttcgccatgggagtgaacatgcccgcccgcactgtggtctttgattcaatgcgaaagcacgatggctctaccttccgtgacctgctcccgggggagtatgtccagatggccgggcgagccggaagaagaggtcttgatcccacgggcactgtcatcctgctgtgcaaaggacgagtgccagaaatggctgacttacacagaatgatgatgggaaagccttctcagctccagtcacagttcagactaacttacacaatgatcctaaatctccttcgggtcgacgccttgcgcgtcgaagatatgatgaaaaggtccttttcagaatttccatcacggaaggatagcaaagcacacgaacaggctcttgccgagctcacgaaacggctgggcgctctggaagaaccggatatgaccggccagctggtagatttgcctgagtactattcatggggcgaagaactgactgagacccagcacatgattcagagaagaatcatggagagtgtgaatggccttaagagcctttctgcaggtcgcgtggttgtagtgaagaatcaggagcaccataatgcactgggagtgattctgcaggtctcttccaattcaacttctagagtcttcacgacactcgtcctatgcgataaaccactgtcacaggatccacaggaccggggaccagctacagcagaggtcccttatcccgacgatctcgtcggcttcaagctgttcttgccagaaggcccttgcgaccataccgtggtgaaattacagcccggggatatggccgccatcaccaccaaagtactaagggttaatggcgagaagatcttggaggactttagcaagcgtcaacagcccaagtttaagaaggaccctccgctggccgccgtgaccaccgccgtgcaggaattgcttcgtttagcgcaggctcaccctgctggccccccaacccttgatccggttaatgaccttcagctgaaagatatgtcagttgtcgaaggggggctgagagctagaaagttggaagaactcatccagggcgcgcagtgtgtgcacagcccccggttcccggctcagtacttgaagctccgcgaaagaatgcagatccagaaggagatggaacggctgcggttcctgctgagtgaccagtctctccttcttttgccagagtatcaccaacgggtagaggtgctgcggactctgggttatgttgacgaagcaggaacagttaaactcgccggtagagtcgcgtgcgcaatgtcctcccacgagctgttgctcacagagctgatgtttgacaatgccctgtctaccctgagacctgaagaaattgccgctctgctgagtgggctggtgtgtcaaagccctggggatgctggagatcagctccccaataccttgaagcagggtatcgaacgagtgagagcagttgccaaacggataggcgaagtgcaggtggcttgtggcctgaaccagacagtcgaagagttcgtaggagagcttaattttggcctggtggaagtagtctacgagtgggctagggggatgcctttctcagaacttgctggtcttagcggcaccccagaggggttggttgtgcgatgtatccagagactggctgagatgtgccggtccctcaggggagccgcccgccttgtgggcgaaccagtcctgggagcaaagatggagaccgctgctacactgttacgacgggatatcgtctttgctgcttccctctatacacagtag

SEQ ID NO: 169221 - DNA, 3267 bp, Artificial Sequence
  derived and/or modified sequence
atggacgagcccaccatcaccgacctgaacacccgggaggaggccgaagaggagattgactttgaaaaggatctacttacaatcccaccaggattcaaaaagggcatggactttgcgcccaaggactgtccgacccccgctccgggcctgttatctttatcctgtctgctggaacccttggatctgggcgggggcgacgaggacgaaaacgaggccgttggacagcccgggggccctaggggcgatacggtcagtgcttccccttgttctgccccgctcgcacgagcttctagccttgaggatttagtgctcaaggaagcgtctacggctgtcagtacaccagaggcacctgagcctccgtctcaggaacagtgggcaatcccagtggacgcaaccagccccgtaggcgatttttatcgactgattccccagccagctttccagtgggcctttgaacccgacgtttttcagaagcaggctatattgcacctggagcggcatgactccgtgtttgttgctgctcatacctccgctggtaaaaccgtggtcgccgaatacgccattgctctggcacagaagcacatgactcggaccatttatacaagccccattaaagcactgtctaatcaaaagtttcgcgattttcgtaatacctttggagatgtgggtcttcttaccggcgatgtacagctgcatcctgaagcatcttgcctcatcatgactaccgagatcctgaggtctatgctttactctgggagcgatgttattcgcgacctggaatgggttattttcgacgaagtgcattacattaatgatgtggagaggggggtagtgtgggaggaggtgctcataatgctaccagatcacgtatccataattctgctctctgcaacagtccccaacgccctcgagttcgccgactggattggcaggctcaaaagacgacagatatacgtgatatcaacggtgacacgtcccgtgccactggagcattacttatttaccggcaacagttctaagactcagggtgaattatttttgttacttgattctcgtggggcgtttcacactaagggctactatgcagcagtggaggccaagaaagaacggatgtccaaacacgctcaaacttttggagcaaagcagcctacacaccagggcggcccagctcaggatcgaggagtttacctgagcctattggctagtctaaggacaagggcacaactccctgtggtggtgttcaccttttctcgcgggaggtgcgatgagcaggccagtggtctgactagcctggacttaaccacttcatctgagaaatctgagattcaccttttcctgcagcggtgtctagcgagactccggggatctgaccggcagctaccccaagtgctgcacatgagcgagcttctcaaccgcggtttgggggtgcatcacagcggcatcttgcctattcttaaggagattgtggaaatgctgttctcccgggggctggtgaaagttctgtttgccaccgaaaccttcgcaatgggggtaaatatgcctgcccggaccgtcgtgtttgatagtatgaggaagcacgatgggtccaccttccgcgacctgctccccggggagtacgtccagatggcagggcgcgctggccgccgaggcctcgatcctacaggcactgtgatcctactctgtaaggggcgtgttccggagatggcagatttgcacaggatgatgatgggcaagccatcgcaactgcaatctcaattccgcctcacctacacaatgatcctgaacctcttgagggtcgatgcattgcgtgttgaagatatgatgaagcgcagttttagtgaatttcccagccggaaagactccaaggctcatgaacaggcgttagccgagcttactaaacgcctgggggccctggaagaacccgatatgaccggccagctggtcgacttaccggagtactatagctggggcgaagagctgacagagactcagcatatgatccagcggcgaatcatggagagcgtgaatggactgaaaagcctcagtgccggtcgagtcgttgtagtcaagaatcaagagcaccacaatgctcttggtgtcattttacaggtcagttctaattccacctctcgagtgtttacgaccctggtgctgtgcgacaaaccacttagccaggatcctcaggaccggggccccgctacagcggaagtcccatatccagacgacctggttgggtttaaactgtttctccctgagggtccatgcgaccacacggtcgtgaaattacagccaggcgatatggcagccatcaccacaaaggtgctgagagttaacggcgagaaaatcctggaggacttttctaagcgacagcagccgaagtttaagaaggatcccccgttggcagcagtgaccaccgcagttcaagagctgctccggttggctcaggctcatcccgcaggccctccgaccctggatccagtcaatgacctccagctcaaggatatgtccgttgtggagggtggcctgcgggccagaaagctggaagaactgattcaaggcgcacagtgcgtccattccccccggttcccagcacagtacctgaagcttcgggagcgaatgcagatccagaaggaaatggagcgcctgcgctttttgctttctgaccagtcattgcttctgcttcctgaataccatcaacgcgtcgaagtgttgcgcaccttgggctacgtggatgaagcaggaacagtgaagctcgcagggagggtagcctgtgccatgtctagccacgagcttttgctaactgagctgatgtttgacaatgccctcagcacattgcgtccggaagaaatcgctgccctgctttccgggctcgtttgtcagtcccccggggacgccggtgaccagctcccgaacacactgaagcagggcatcgagagggtcagggccgttgccaaacgcatcggtgaagtccaggtagcatgcggcttgaatcagaccgtagaagagttcgtgggagagctgaactttggcttggtcgaggtggtgtacgagtgggcccgggggatgccatttagtgaactggccggcctgtcaggtacccccgagggacttgtggtgagatgtatccagcgcttggctgagatgtgtaggagcttacggggtgccgctaggctggtaggcgaacctgtgttgggcgcaaagatggagacagctgcgaccctactccgccgcgatatcgtctttgccgccagcctctatactcaatag

SEQ ID NO: 169222 - DNA, 2643 bp, Artificial Sequence
  derived and/or modified sequence
atgatggagaccgagcggctggtgctgcccccccccgaccccctggacctgcctttacgggcagtggaactgggttgcacaggccactgggagctcctgaacctccctggggcccctgaatcaagtttgccccatggcctaccaccctgcgctcccgatttacagcaagaagccgagcagctgttcctttcttctcctgcttggctgcctcttcacggagttgagcactccgcacggaaatggcagaggaaaaccgacccctggagtctgctggcagtgctgggcgctcccgtccccagtgacctccaggcgcagaggcatcctacaaccggacagatcctgggctacaaggaagtcctcttagaacactacctttttaccggaaacagttccaaaactcaaggcgagctgttcctgctcttagatagccggggtgcatttcacaccaaagggtactatgctgcggttgaagcaaagaaagaaaggatgtccaaacatgcccagaccttcggggccaagcaacccacacaccagggtggtcccgcacaggacagaggggtgtatctctcacttctggcctctctgcggacccgggcccagttgcccgtggtggtgttcacatttagcagaggtaggtgtgatgaacaagcatcgggcctcacaagccttgacctcactaccagctcagagaagtccgaaatccatcttttcctgcagcggtgtctggcacgtctgagaggtagcgatcggcaacttccgcaggttctgcatatgtctgagctgcttaacagagggctgggagtgcaccatagcggcatcttacccattctgaaggaaatcgttgagatgcttttctcaaggggactcgtgaaggtcttatttgccaccgaaacttttgccatgggcgttaacatgcctgctcgcactgtggttttcgactctatgcgtaagcacgacggatccacattccgcgaccttttacctggggagtacgtacaaatggccggtcgggcaggtaggagggggctcgacccaaccggcaccgttattctcttatgcaagggcagagtgcctgaaatggctgaccttcaccgcatgatgatgggcaagccaagtcagcttcaatcccagttccggctcacctacactatgatcctcaatctattgagagtggatgcactgcgcgtagaagacatgatgaagcgcagtttctcagaatttccttccaggaaagactctaaagcacatgaacaggctctggcagaattaactaaaaggttgggggccctggaagagcctgacatgacgggccaattagtcgacctgccggagtattactcttggggcgaggagctgactgaaacccagcacatgatccagcgtagaattatggagtctgtgaacgggctgaaatcactgagcgccggccgcgttgtcgtagtcaaaaaccaggaacaccataatgcattaggcgttatcctgcaggtctcgtcaaattccacctctcgggtatttacgacactcgttttatgtgacaaaccactctctcaggacccgcaggatcggggtccagccacagccgaagtgccttacccggacgacctcgtaggctttaagctatttctacctgagggaccatgcgatcatacggtggttaaattgcagccaggggacatggccgctatcacaactaaggtcctaagggttaacggggaaaaaatcctggaagactttagcaagcgacagcagcccaagtttaaaaaggatccgcccctggctgctgttacaacagccgtgcaggagttgctgcggctggcacaggcacaccctgcagggcctcctaccttagatcccgtgaatgacttacagcttaaggacatgtctgtggtggagggtggcttaagggcccgcaaactggaggaactcatacagggggcccaatgcgtgcactcccctcggttccctgcccaatacctgaagcttagggagaggatgcagattcagaaggagatggagaggttacgcttcctgttgagcgatcaaagcctgcttctcttaccggaataccaccaacgcgtggaagtgctgcgcactcttgggtatgttgatgaggctggaacagtgaagttagcgggccgagttgcctgtgcgatgagtagccatgagctgttattgactgagctgatgtttgataatgccctgagcaccctgagacctgaggagatcgccgcactcctatccggactcgtttgtcagagccctggggacgcaggcgaccagcttcccaatacattgaaacaggggatcgagcgtgtgcgagctgttgccaaacggattggcgaggtgcaggtggcttgcggactgaaccagacagtggaagaattcgtgggcgaactgaactttggcctcgtagaagtcgtctacgagtgggctaggggcatgccttttagtgagttagcaggtttgtccggaacacccgaaggtctcgtggttcgctgcatccaacgcctggcagagatgtgccgttccctgcggggcgctgcccggcttgtcggagagcctgtgctgggcgccaaaatggagactgcggccacattgctccgccgcgacatcgtgttcgcagccagcttgtatacccagtag

SEQ ID NO: 169223 - DNA, 2643 bp, Artificial Sequence
  derived and/or modified sequence
atgatggagaccgagcggctggtgctgcccccccccgaccccctggaccttccactgagggccgtggaactcgggtgtacaggccattgggaacttctgaatctgcccggagcccccgagtcatctcttccccacggcctgcctccctgtgcccctgatctgcaacaggaggccgagcaactgttcctgtcctctcccgcctggctgcctttacatggcgtggaacattccgccaggaaatggcagcgcaaaaccgatccatggagcctgctggccgtgctgggcgctcccgttcccagtgatctgcaggcacagagacatcctactacaggtcagatcctgggctacaaggaggtgctgctggagcactacctcttcaccgggaactcatccaagacccaaggagaattatttcttctgcttgatagccgcggcgcgttccacactaaaggctattacgctgcagtcgaggcaaaaaaagagcgaatgagcaagcacgcacagactttcggagccaagcagcctacccaccagggcggcccggctcaagacagaggggtatacctctcacttttagcatcattgagaacccgcgcccagctgcctgtcgtcgtttttacgttctcccgcggaagatgtgacgagcaggcttctggcctgactagtttagacctgactacaagctcagagaagtctgaaatccacctgttcctccagcgctgtctagcgcggctgcggggaagtgacagacaactaccgcaggtgctccatatgagcgagctgctcaatagaggtttgggcgttcatcacagcggcatcctgcccattctgaaagagattgttgagatgctatttagtcggggactggtcaaggtgctctttgccacagagaccttcgcgatgggggtgaatatgccagcgcgcacagtcgtcttcgactctatgagaaaacacgatggctctacttttcgtgacctgctgcccggcgaatatgtgcaaatggctggtcgagccgggcgtcggggtctcgaccctaccgggacagtgattctcctgtgcaaggggcgcgtgcccgagatggcagacctgcacaggatgatgatgggcaaacccagccagctgcagagccagttccgtctgacttacaccatgatattgaacttactgagagtcgacgccctcagagtggaagacatgatgaagcgttcttttagcgagtttccttcccggaaggactcaaaggctcacgagcaggctctggcggaactgaccaagcggctaggagccctcgaggagccagacatgaccgggcagctggtggacctgccagaatattattcctggggagaggagctgaccgaaacccagcacatgatccagcggcgaatcatggagtccgtgaacgggctgaagagtctctccgccggcagagtggtagtcgtcaaaaaccaagagcatcataatgccttgggtgtcatcctgcaggtctcaagcaatagtacaagccgcgtgttcacgaccctggtcctgtgcgacaagccactgagtcaggacccgcaggaccgtggtcccgctacagctgaggtgccgtaccctgacgacctggtaggctttaagctcttcctccccgaaggaccatgcgatcataccgtcgtcaagctgcagcctggggacatggccgctataactaccaaggtgctgagggtgaatggagaaaaaatcctggaagatttctcaaaacgccagcaacctaaattcaaaaaggatccgcctcttgccgccgtcacaacggccgtgcaggaactgctgagattggcccaggctcaccccgccgggcctccaacactggatccagttaacgatctgcagctcaaggacatgtccgtagtggaaggaggcttgagagcgaggaagttagaggagctgattcagggcgcgcaatgtgtacacagtccaagatttcccgcccagtacctcaaactgagagaaagaatgcagatacagaaagagatggagcggttgcggttcctccttagcgaccagagtctgctgctcctaccagagtaccaccagcgcgtggaggtcttgcgaactctgggttacgtggatgaagccggcactgtgaaattggccgggcgggtggcctgcgctatgtccagccacgaattgctgttgaccgaactgatgttcgacaacgccctgtcaaccctaagacctgaagagatagctgccttattgtcaggactggtctgtcagtctcccggcgacgcaggggatcagctcccaaacacacttaagcagggaatcgagcgcgtccgagcagtagccaagcgcatcggtgaggtccaggtggcttgtggcctcaatcaaacggtcgaagaatttgtaggcgagttaaactttggtttggtcgaggtcgtgtatgagtgggcccgcgggatgccgttctcggagctggcaggactgtcaggcacacctgaaggtctggtggtaaggtgcattcagcgtttggctgagatgtgccgctcattgcgtggggccgcacggctggtgggggagccagtgctaggggccaagatggaaaccgccgcaaccctgctaagacgggacatcgtgttcgcggctagcctctacacccaatag

SEQ ID NO: 169224 - DNA, 2643 bp, Artificial Sequence
  derived and/or modified sequence
atgatggagaccgagcggctggtgctgcccccccccgaccccctggaccttccactgcgggccgtcgaacttgggtgtactggtcactgggagttactcaatctgcccggagcaccagagagtagcctgcctcatggattgccaccttgtgctcccgacctgcagcaggaggcagagcaactgtttttaagctccccagcttggctgcctctgcacggcgtggaacactccgccagaaaatggcagcgcaagactgatccctggtcactgctcgctgtcctgggtgcccccgtcccaagtgacttgcaagcgcagcgacaccccactaccggacagattctcggatataaagaggtgctcctagaacattatctatttacaggcaactcctcaaaaacacagggcgaactattcctgctgctagattcccggggggcgtttcacacaaaaggctactacgcagctgtggaagccaaaaaagagcggatgagtaagcatgctcagacattcggagctaagcagcctacacaccagggaggaccagctcaggaccgcggcgtttatttgtctcttttggcttccctgcgaactcgggctcagctcccagttgttgtgtttacttttagccgcggccggtgtgacgaacaagcgtccggactgacctcactcgacttaaccacaagctccgagaagtccgagatccacctgtttctgcagcgatgcctcgcgcggctgagaggctcagatcgccagctgccacaagttctccacatgtcagagctgctaaatcgcgggctcggggtgcatcattctggaatccttccgattctcaaggagattgtggagatgctgtttagtagagggctggtgaaggtcttgtttgcgacggagacgttcgcaatgggcgttaacatgccagcacgcactgttgtgttcgacagtatgcggaagcatgatggatctaccttccgcgatctgttgcctggagagtatgtgcaaatggctggccgagcaggaaggcggggcctcgatccgaccggtacagtaatccttttatgcaaaggtcgagtgcccgagatggctgatctgcatcgtatgatgatggggaagccaagccagctacagagtcagtttaggcttacatacacaatgattctgaacctgctgcgggtcgatgccctacgtgttgaggacatgatgaagcggtcctttagcgagtttccctctaggaaagactctaaggcccatgagcaggcgctggctgagttgaccaaaaggctgggagctttagaggaaccagatatgaccggacagctcgttgatcttcccgagtactatagctggggcgaggaactaactgaaactcagcatatgattcagaggcgaatcatggagagcgtcaacggccttaaaagtctgtcagctggacgggtggtagtcgttaagaaccaggagcaccacaatgctctgggtgtgattctgcaggttagttcaaattctacatcacgggtgttcactactcttgttctatgcgataagccattgtcacaggaccctcaggataggggtcctgctaccgccgaagtaccgtacccagatgaccttgtggggtttaaactcttcctcccggaggggccctgcgaccacacagttgtcaagctgcagccaggcgatatggcagctattaccactaaagttctgcgcgttaatggtgagaagatactagaagatttctctaagcgacaacaacctaaattcaaaaaagacccaccgttagctgctgtgactaccgctgttcaagaactgctccgacttgcccaggcccatcctgccggaccgccaaccctcgaccccgtgaacgacctccaactgaaagatatgagtgtggtggaaggcggcctcagagccagaaagttggaggaacttatccaaggcgcgcaatgcgtacattcaccccgcttccctgctcagtacttgaagcttagagagcgaatgcagatccagaaagagatggagcgactgcgattcctactgtccgaccagagcctgctgcttctccccgagtaccaccagcgggtggaagtgctgaggacacttggatatgtagatgaggcaggaactgtgaagttggccggaagagtggcctgcgcgatgtccagtcatgagcttttactcactgagctgatgtttgacaacgcactcagcaccttgagaccagaggaaatcgctgcccttctgtccgggctggtctgtcaatctccgggcgacgccggggatcagctgcccaacacgctgaagcaggggattgagagagtgcgtgcagttgctaaaaggatcggtgaggtgcaggtagcctgcggcctgaatcagaccgtcgaagagtttgtgggtgagcttaattttggcctggttgaagtggtctacgagtgggcccgaggcatgcccttctccgagctggcagggctcagcgggacccccgaagggctggttgtgcgatgcattcagagactggccgaaatgtgccgctccctcaggggcgccgccaggctggttggggagcctgtcctgggagctaagatggaaacggcggcaaccttgctccggagagacattgtgtttgcggcaagcctttacacccagtag

SEQ ID NO: 169225 - DNA, 3267 bp, Artificial Sequence
  derived and/or modified sequence
atggacgagcccaccatcaccgacctgaacacccgggaggaggccgaggaggagattgatttcgagaaggacctcctgactattccccctggctttaaaaaagggatggatttcgccccaaaggactgtccaacacccgcacccggcctgctctctctaagctgtctcctggaacccctggatttgggcgggggcgatgaagatgagaatgaggctgtaggccaaccagggggaccaaggggcgatacagtgtccgcaagtccctgctcagcaccgttggcaagagcctcttcattagaagatctggtcctcaaggaggcatcaaccgcagtaagcacgccagaagctccagagccaccctcccaggagcagtgggccatccctgttgacgctacaagcccggtaggagacttctaccgcctgattccccaacctgcctttcagtgggctttcgagcctgacgttttccagaaacaggccatcctgcatctggaacggcatgatagtgtctttgtggcggcacatacaagcgctgggaagaccgtcgtcgctgagtatgctatcgctctagcccagaaacatatgactaggacaatctacaccagccctattaaagccctgtccaaccagaagtttagagattttcggaatactttcggcgacgttggactcctcactggggacgtccagctccacccagaagcctcatgtctaataatgacaaccgaaattctaagaagcatgctgtactccggcagtgatgttattcgggacctagaatgggtgatatttgatgaggtgcactacatcaatgacgtagagcgcggggtcgtctgggaagaagtgttgatcatgttacctgatcacgtgtccattattctactatccgcaactgtcccaaatgctttggagtttgccgactggattggtcgtctgaaacgaaggcaaatttatgttatcagcacagttactcgcccagtgcctctcgagcactacctgttcacgggtaacagctctaagactcagggagagctgttcttgcttctggacagccgaggggccttccatactaaaggctattatgcggccgtggaagcaaaaaaggaaaggatgagtaagcatgcgcagacctttggagcaaagcagccgacccaccagggaggaccggcacaagatagaggggtgtatctgagccttcttgcctcactccgtacccgcgctcagttgcccgtcgtggtgttcaccttttccaggggcaggtgcgacgaacaagcaagcgggctgacctcactggaccttacaacaagcagcgagaagagtgagatccacctcttcctgcagaggtgtttggcacggttaagaggatcagataggcagctgccgcaggtcctgcatatgagcgaactgcttaacagagggctgggagtccaccatagcgggatcctgccaatcctgaaggagatcgtggaaatgctgttctcccgggggctggttaaagtgctttttgccaccgagaccttcgctatgggcgtgaacatgccggcgcggactgtcgttttcgacagcatgcggaaacacgacgggtctacatttcgggatctgctgcctggtgagtatgtgcagatggcgggccgcgccggccggagggggttggaccctacagggaccgtcatcctcctatgtaagggtcgagttccggaaatggcggatttacaccggatgatgatgggaaaacctagccagttgcagtcccagtttcggctgacttacaccatgattctcaatctgctgagggtggacgccctccgcgtggaagacatgatgaagaggtccttctctgaattcccttcgcgaaaggatagtaaagctcacgaacaggcactggctgaacttacaaaacgtctcggcgctctggaagaacctgatatgaccgggcagttggtcgacttacccgagtattactcttggggggaggagctaaccgaaactcagcacatgatccagcgccgcataatggaaagcgtgaacggattgaagagcttgtcagccggtagggtcgtcgtggttaaaaaccaagaacatcataatgctctaggggtcatccttcaggtgtcctccaacagtacttcgagagtttttaccacacttgtcctgtgtgacaagcccctcagccaggacccccaggacagaggcccagccactgctgaggtgccctatccagatgacctagttgggttcaagctgtttctgcccgaaggcccctgtgatcacactgtggtaaagctgcaaccaggcgacatggccgccatcaccacgaaggtactgcgcgtgaatggcgagaaaatcttggaggatttttctaagcggcaacagccaaagttcaagaaggatcccccactggccgcagttactacagcggtgcaggagctcctacggctggcgcaagcccatccggccgggccgccaaccttggatcccgtgaatgacctccagctgaaggacatgagcgtggtagagggaggcctgcgcgctagaaaactggaagaactgatccagggagcccagtgtgtgcactcaccaagattccctgcgcaatacttaaagttacgggagcgcatgcagatacagaaggagatggagagattacgttttttattgagcgaccagtccctactgctgctgcccgaataccatcagcgagtggaagtgctgcgtaccctgggctacgtggatgaggcaggcactgtgaagcttgctgggcgggtggcatgtgccatgagctctcacgagcttctgttaactgaactgatgtttgataacgccctcagcactcttaggcccgaagagattgcggccttgctgtctggattggtatgccaatcccccggcgacgccggggaccagctccccaatacccttaagcaaggcatcgagcgggtccgtgccgtggctaaaaggatcggcgaggtccaggtagcctgcgggttgaatcaaaccgtggaagagtttgtcggcgaactcaacttcggtctggtcgaggtggtttacgagtgggccagaggaatgcccttctctgaattagcaggattgagcggtaccccagagggactggtggtgaggtgtatacagcggttggctgagatgtgccgctcactgaggggggccgctaggctcgtgggtgaacccgtgctgggagccaaaatggagacggcagctactttattgagacgggacattgtgtttgcagcctctttatatacccaatag

SEQ ID NO: 169226 - DNA, 3267 bp, Artificial Sequence
  derived and/or modified sequence
atggacgagcccaccatcaccgacctgaacacccgggaggaggccgaggaggagattgatttcgaaaaagacctgttaacaataccccctggcttcaagaagggcatggactttgcgccgaaagattgccctacaccagctcccggcttgttaagtctgagttgtctgctggagcccctagacctgggtgggggagatgaagacgaaaacgaggcggtaggacaaccaggcggacctcggggtgacacagtgagtgcgagcccttgtagcgcaccgctagcccgggcctcatcactagaagacctggttctgaaggaggcgagcactgccgtgtctacacctgaagcccccgagccgccctcccaggaacagtgggcgatccccgttgatgcgacttcgcccgtgggcgacttctatagactaatacctcagccagcattccagtgggctttcgagcccgacgttttccagaagcaggccatacttcatctggagcgccatgacagcgtgtttgtggcagcccacacgagtgcgggaaagacggtggttgctgaatacgcaatcgcactcgcccagaagcacatgacccgcacaatttataccagcccgatcaaagccttaagcaaccagaaattcagagactttaggaacacgtttggtgatgtggggttactgacaggcgatgtccagctccaccctgaagctagctgcctcattatgacaactgagatcctccggagtatgctctactctggctctgacgtgatccgagaccttgaatgggtcatttttgatgaggtccattatatcaatgatgttgagagaggcgtagtgtgggaagaagtgctgatcatgcttccagaccatgtgagtataatcttactgtccgctacagtacccaacgcgctagagtttgccgactggatcggacggctcaaacggaggcagatttatgtgatcagcacagtcactaggcccgttccactcgagcactatctgtttacgggaaacagctccaaaacccaaggcgaattattcttgttgctcgacagtagaggcgcttttcacacaaagggttactatgcggcggttgaagccaagaaggagaggatgagcaagcacgctcaaacattcggagccaaacagccaacacaccaaggagggccggctcaggaccgcggggtgtacctttccctcctggccagtttgagaacccgggcccagctccccgtcgtggtattcactttttcccggggtaggtgtgacgagcaggcttccggcttaactagtttggatctgaccacaagttcagaaaaatctgaaattcatctgtttctccagagatgcctcgcgcggcttcgaggctccgacaggcagctgccccaggtgctccatatgagcgaactcctcaaccgaggcctcggggtccaccactcaggtattttgcctatattgaaggagatcgtggaaatgctgttcagccgaggcctggtcaaagtcctgtttgcaactgagacctttgcaatgggggtgaacatgcctgctaggacggtcgtgttcgattccatgagaaagcatgacgggtccacatttcgagacctacttcctggagaatacgttcagatggcagggcgcgccgggaggcgggggcttgatcctaccgggactgtaattctactttgtaagggacgtgtccccgagatggctgatctgcaccgtatgatgatgggcaaaccgtctcagctccagtcacaattccggctgacatacacgatgattttgaacctcctgcgagtcgacgcactcagagttgaggacatgatgaagcggagttttagcgagttcccatcacggaaggactctaaagcccacgagcaggctctcgccgagctgacaaaaaggctgggggccctggaggaacccgacatgacgggccaactggtggatctcccagagtattactcatggggtgaagagctgactgaaacccagcatatgattcagcgtcgtattatggagtctgtaaacggactcaagtccctgagtgctgggcgcgttgtagtggtgaagaaccaggagcaccacaacgcgctcggcgtgatcctgcaggtgtcatcaaactccacaagtagggtgtttacgactttggtcttatgcgacaagcccttatcccaggacccccaggacagaggacctgctaccgctgaagtgccctaccctgacgatttagtcggcttcaagctgtttctccctgaagggccctgcgaccatacggtggtcaagcttcaacctggagacatggccgccatcaccaccaaagttctcagagttaacggcgaaaaaattctcgaggacttttcaaagcgccagcaaccaaagttcaagaaagatcctcccctggctgccgtcacaacagcggttcaagagttgttacgcctggcacaggcacatcctgctggaccgcctacactcgaccctgtgaacgatctgcaactgaaagatatgtccgtggttgagggaggtctacgagcccgtaagctggaggaactcattcaaggagctcaatgtgttcattctcccagatttccagcccagtatctgaagttgcgcgaaagaatgcagatccagaaggaaatggaacgcttgcgattcctgctgtccgaccagagccttctgctcctgcctgaatatcatcagagagtggaagtcctaagaaccttgggatacgttgatgaggctggcacggtgaaactcgccggacgggtcgcttgcgcgatgagctcgcatgagctgttgcttaccgagcttatgttcgataacgcactttcaactcttcgaccggaagagatcgcagcgctgctctcagggctggtctgccagagtccaggggatgcaggtgaccaactcccaaacaccctgaaacagggaatcgagcgggtgcgagccgtagctaaacggatcggggaagttcaggtcgcatgtggactcaatcaaaccgttgaggagtttgtgggggaactaaactttgggttagtggaggtggtgtacgaatgggctcgcggaatgcccttttctgaattggctggattaagtgggacaccagaggggctggtggtgaggtgtattcaaaggctggcagaaatgtgccgatctctgcgcggcgccgctcgcttagttggcgaaccggtactgggcgccaaaatggagacagcggcaaccctgctgcggagagatatcgtcttcgccgcatctctttacacacagtag

SEQ ID NO: 169227 - DNA, 3267 bp, Artificial Sequence
  derived and/or modified sequence
atggacgagcccaccatcaccgacctgaacacccgggaggaggccgaggaagaaatcgactttgagaaagacttgctgacaattccccctggattcaaaaaagggatggatttcgcccccaaggactgccctacaccggccccaggtctactgagcctttcttgtatgctagagcccctagatctgggcggaggggacgaagacgagaatgaggccgtgggtcagccaggcggccccagaggcgatacagtgtcagcgagcccatgctcggccccattggcccgggcgtcatccctcgaggatctggtgctcaaagaggcatccactgccgtttccacaccggaggctccagagccaccttcccaggagcagtgggccattcctgtggatgcaaccagccctgtaggggacttctacaggctgatcccccaacccgccttccagtgggctttcgaacccgacgtcttccagaaacaggcgatcttacatttggaacgacatgatagcgtgtttgtggccgcccataccagcgcgggtaagacagttgtcgcagagtacgcaatcgctctggctcagaagcatatgacacgcacgatatacacatcgcccattaaagcactgtctaaccagaaattccgagactttcgaaacactttcggtgatgtcggcttgttgacaggagatgtgcagctccatcctgaagcctcttgcctgatcatgacaactgagatcctgcgctctatgttgtatagcgggagcgatgtaattcgagatttggaatgggtaatattcgacgaggtacactacatcaatgacgttgaaagaggtgtcgtgtgggaggaagtgctcataatgctacctgatcacgtcagtattattctgctatccgcgaccgtgcccaacgcgttggagttcgccgactggataggcagactcaagcggagacaaatctatgtaattagtacagtgactagacccgtgccccttgagcattatctgtttacggggaactcatcaaaaactcagggggagctcttcctgttacttgactcccgcggggcatttcatactaagggctattacgctgccgtggaggctaagaaggaacgaatgagtaaacatgcccaaaccttcggcgcaaagcagcccacccaccagggcggccctgcacaggaccggggcgtgtacctatctttactggcctctctaaggacgagagctcaacttccagtggttgtctttacattctcccgcggcaggtgcgatgaacaggcctcaggcttaacatccctcgacctcactacctcctcagagaagagtgaaatccatctcttcctacagagatgtcttgctaggctcagaggaagtgataggcagcttccccaagtccttcacatgtctgaactactcaaccgcggactgggtgttcaccatagcgggattctgccgatcctcaaggaaatagtagagatgttattttctagaggcctggtcaaggttttgttcgctacagagaccttcgccatgggagtgaacatgccagcccgaacagtagttttcgacagcatgcgtaagcatgacggctctaccttccgggatttgctgcccggcgaatacgtacagatggctggaagggccgggagacgaggtctggaccccaccggcaccgtcatcctgctgtgcaaaggaagggtcccagaaatggctgacctgcaccgcatgatgatgggcaagccgtcacagctccagtctcagtttcggctcacatatacaatgatactgaatcttttgagggtcgacgcgctccgagtggaggatatgatgaaaagaagcttcagcgagttcccctctcgaaaagattctaaagcccacgagcaagcgctcgcggagctgacaaagcgcctcggggccctcgaggagcctgacatgactgggcagctggtcgacctgcccgaatattactcttggggggaagagcttaccgagacccaacacatgatccagagacgcattatggaatcagtgaatggcctgaaatcccttagcgcggggagggttgtggtcgtgaagaaccaggagcaccacaacgctctcggggttattctgcaggtgagtagcaattcaacatctcgtgtgttcacaactctggtcttgtgtgataagccgcttagccaggacccacaggataggggtccagccactgcggaagtaccctatccagatgatctagttggattcaaactgttcctgcctgagggcccttgcgatcacacggtggtcaaactgcagccaggggacatggcagctatcaccaccaaagtcttacgggtcaacggggaaaaaatcctagaagatttctctaagaggcagcagcctaaatttaagaaggaccctcccctggccgccgtgaccactgcagttcaagaattgctgaggctcgcacaggcgcacccagccggcccccctactcttgaccccgttaacgacctccagctcaaagacatgtccgtggtagagggcggactgcgtgcaagaaagctggaagagttgatccagggggcccagtgtgtgcatagtcctcgatttccagcacaatatctgaaactgcgagaacggatgcagattcagaaggagatggagaggctgaggtttctattgagtgatcaatctttactcctgcttcccgagtaccaccagcgcgtcgaagttcttcgaactctgggctatgtcgacgaagccggaaccgttaagctggcaggccgcgtagcttgcgcaatgtctagtcacgaattgctactcactgagttaatgtttgacaacgccctgtccacactgcggcctgaagagattgccgcgttgttaagtgggttggtgtgtcagagtccgggggacgctggcgatcagttgcctaataccctcaaacagggcattgagcgggtgagggctgtggcaaagcggattggtgaggtccaggtcgcgtgtggcctgaatcagactgtggaggagttcgtgggggagcttaacttcggccttgtggaggtggtatacgaatgggcacgagggatgccctttagcgagctcgctggattaagtgggacacccgaaggtctcgtggtgcgatgcattcagcgcttagccgaaatgtgccgctctttgaggggggccgccagactggtcggggagccagtcctcggagctaaaatggagactgcagccaccctgctgcgccgtgatatcgtctttgcagcctctttgtatacccaatag

SEQ ID NO: 169228 - DNA, 2643 bp, Artificial Sequence
  derived and/or modified sequence
atgatggagaccgagcggctggtgctgcccccccccgaccccctggatctgcccctcagggcagtcgagctggggtgcactggacattgggagctcctgaacttacctggggcgccagagtcttcactgcctcacggactccccccatgcgccccagaccttcagcaggaagccgagcagctgtttctctcctctcccgcatggctgccacttcatggagtggagcactccgcccggaagtggcaaaggaagacagacccatggagccttctggctgtcttgggcgcccctgttccttcagatctccaggctcagcggcacccaacgacgggccagattttgggctacaaggaggttctgctagaacactatcttttcaccggaaatagtagtaaaacccagggggaactgtttctgctgctggatagtcggggcgcttttcacacaaaaggttactatgctgccgtcgaagcaaaaaaggaacggatgtcaaaacacgctcaaacctttggcgccaaacagccaacccaccagggcgggcccgcccaggatcgcggcgtgtatctttccctactggcctccctccgcaccagagcacaactgcctgtggttgtatttaccttttcacggggtaggtgtgatgagcaggcgtcaggcctaaccagcttggaccttaccaccagctcggagaagtctgagatccatctgtttctgcagcggtgcctcgcaaggctcaggggttctgacaggcagctaccccaggtgctgcacatgtctgaactcctaaaccggggtctgggtgtacaccactccggtatcctgcctatattgaaggagatcgtagaaatgctgttctcacgcggattagtaaaggtgctgtttgcaaccgaaacctttgccatgggcgtcaacatgccagcacggaccgttgtcttcgacagcatgagaaagcacgacggcagcaccttccgggatcttcttcccggggagtatgtgcagatggctggcagggcaggaagacgggggctcgacccgactgggactgtaatcttgctgtgcaagggtagagtgcccgagatggcggacttacaccgcatgatgatgggaaaacccagtcaactacagagtcagtttaggttaacctacaccatgattctcaacctgttgcgggtggacgcactccgggttgaggacatgatgaagcggtctttcagcgagttccctagtcggaaagactcgaaagctcatgaacaggcactggccgaattaacgaaaagactaggcgctttagaggagcctgacatgaccggacagctggttgatctacccgaatactattcttggggcgaagaacttacggaaacccagcatatgatccagagaagaatcatggagtccgttaacggccttaagtccttgtccgctgggcgggttgtggttgtgaagaatcaggaacaccacaacgccctgggcgtgatactacaagttagttctaacagcacttcacgagttttcacaaccctggtcttatgtgacaaacccctgtcacaagatccacaggacagaggacctgctaccgcggaagtaccctacccagatgacttagtcggttttaaactgtttctgccagaaggtccctgtgaccacacagtcgtcaaactacagccaggggatatggctgctattaccacgaaagtactgagagtgaacggcgagaagatcttagaggatttttccaaacgccaacagccaaagtttaaaaaggacccccctctcgccgccgtgaccacggccgtgcaagagctgctgcggctcgctcaagcccatcctgccggaccgcctaccctcgatccagtgaatgacctacagctgaaggatatgagcgtggtggagggaggacttcgcgcccgcaaactcgaggaattgattcaaggcgcgcagtgtgtgcacagcccccgctttcccgcccaatacctgaagttacgtgaaaggatgcagattcagaaggaaatggaacggctgcgttttttgctttccgaccagtccttgctgctgttacccgagtatcaccagcgggtcgaggtcctccgaaccctaggctatgttgatgaggcaggcaccgtcaaactcgcaggcagggtggcctgcgcgatgagttcacacgagctgctgctgacggagcttatgtttgacaatgctctcagcactttgcggccagaggaaattgccgctctgctttccggcttagtgtgtcagtccccaggggatgctggggatcaactgcctaataccctgaagcagggaatcgaacgggtaagagcggttgctaaaaggatcggagaagttcaagtcgcctgtggcctgaaccagaccgttgaagagttcgtcggagagctgaacttcgggctggttgaggtggtctatgagtgggctcgcggaatgccatttagcgaacttgcaggtctgtcagggacgcctgaagggctcgtcgttaggtgtatacaacggttagcagagatgtgcagatcactgcgtggtgcagcacgactcgtgggtgagcctgtgctcggggccaagatggaaaccgccgcgacactcctgcgtagggacatagtttttgccgcatcactgtacacccaatag

SEQ ID NO: 169229 - DNA, 3162 bp, Artificial Sequence
  derived and/or modified sequence
atggacttcgcccccaaggactgccccacccccgcccccggcctgctgtccctgtcgtgcctgctggagcccctcgatcttggaggtggggatgaagacgagaacgaagctgtggggcagccaggcggaccgcggggagatactgtgtctgcatcgccctgcagcgccccattagcacgggccagttcgctagaagatttggtgctgaaggaagcttctaccgccgtctcaactcctgaggcacccgaaccaccctcccaggagcagtgggccattccagttgatgctacctctcctgtcggcgatttttataggcttatccctcagcccgcatttcaatgggctttcgagcctgatgttttccagaaacaggccattctgcacctggagaggcacgattcagtctttgttgctgcccacacatcagccggcaagaccgtggtcgctgagtacgcaatcgcccttgcgcagaagcacatgacccggacgatctatacatctcccatcaaagcgctgagcaaccagaagtttcgagattttaggaacacctttggtgacgtcgggctgctgacaggagatgtgcagctccatcctgaagccagctgtttgatcatgacaaccgaaattctgcggtccatgctgtactctggctcggatgtgatccgcgacttagaatgggtgattttcgatgaagtgcactatatcaatgatgtggaacgtggggtggtgtgggaggaggtactgattatgctgccagaccatgtatcgatcatcctgttgtctgcaacagtgcctaacgccctggaatttgccgattggattggacgcctgaagcgtagacaaatttacgtgatcagcactgtgactcggccagtcccgctagagcattatttgtttaccggaaattctagcaaaacccaaggagaactcttcctgctgctcgacagccgaggagcattccacaccaagggatactacgccgcagtcgaggccaagaaggagcgaatgagcaaacacgctcagacatttggtgctaagcagcccacgcaccagggtgggccagctcaggacaggggcgtttacctgtctctgttagcctctctgcgcactcgggcccaactgccggtggttgttttcacgtttagccggggtcggtgcgacgagcaggcctccggactgacatctctagatctgactacttccagcgagaagagcgagattcacctgtttctccagagatgcctcgcccgtttgcgggggtcagatcggcagcttccacaggtgctgcacatgagcgagttgttaaatcgcggactcggtgtgcatcactcagggatactgcccatcttgaaagagatcgtcgaaatgctattttctcgggggctagtcaaggtcctcttcgctacagagacattcgcaatgggcgttaatatgcctgcgagaacagtggtgtttgattccatgcggaaacacgacggctcaacgtttagggatctcctaccaggtgagtacgttcagatggccggacgcgcgggaagaaggggattggacccaaccgggactgttatcctgctttgtaaggggcgggtgccagagatggccgatctacaccggatgatgatgggcaagccgtcccagctgcagagccagttccgcttgacatataccatgatcctgaaccttttgagagttgacgctcttagagtggaagatatgatgaaacggagcttcagcgaatttccttcaagaaaggactcaaaggcccatgagcaggccctggctgagctgaccaagcgactgggagctctggaggaacccgatatgacagggcagttagtggacctgcccgaatactactcctggggtgaggaacttacggagactcaacacatgattcaacgacggatcatggagtccgtgaacggcctcaaatctctctccgcaggccgggtggtggttgtcaaaaaccaagaacatcacaacgcccttggggttatacttcaggtcagttctaatagcacgtctcgcgtgtttacgacactcgtcctgtgcgacaaacccctgtcccaggatccacaggacagaggaccggccactgctgaagtgccctacccggatgatttggtcggatttaagctgttcctgcctgagggaccttgtgaccacactgtcgtgaaactgcagccgggagatatggctgccatcaccacaaaggtgctgcgggttaatggcgagaagattctggaagatttctcgaagaggcagcaacctaagtttaagaaggatcctccacttgccgctgtgaccaccgctgtccaagaactgttgagattggcccaagcccacccagcagggcctcctacgttggaccctgtgaacgatctgcaactgaaagatatgtccgtggtggaaggaggccttagggcgcgcaagctcgaggagctgatccaaggggcacagtgtgttcactctccccgatttccagcacagtacctgaaattacgcgaacgaatgcagatacagaaggagatggagagacttcggttccttctgtcagatcagtctctgctgctgctgcccgagtaccatcagcgtgtggaggtgcttcgcacgttagggtatgtggacgaggctggcactgttaagttagcaggccgagtagcctgcgccatgagctcacatgaactgctgttaactgaactcatgttcgacaacgccttgtccactctgaggcccgaagagatagcagccttgttgagcgggctggtctgccagagtccaggggacgccggggaccagctgccaaacaccctcaaacaaggcatcgaaagggtgcgtgcggtcgccaagcggattggtgaagtccaggtggcatgcggactgaatcagaccgtggaggagttcgtgggagaactgaactttggacttgttgaggtcgtgtatgaatgggcccgtggcatgccgttcagtgagctggctgggctgagcggtacccctgagggcctggtcgtccggtgcattcagaggcttgcagaaatgtgcagaagtcttagaggcgccgcgcggttggtgggcgagccagttctgggcgctaaaatggagactgctgcaacattactgaggcgtgacatcgtttttgctgcatctctctatacgcaatag

SEQ ID NO: 169230 - DNA, 3162 bp, Artificial Sequence
  derived and/or modified sequence
atggacttcgcccccaaggactgccccacccccgcccccggcctgttgtctctgagttgtcttttagaaccgctggatctcggaggaggcgatgaagatgagaatgaggctgtgggccagcctggaggccctcggggagacacagtgagcgccagcccttgttccgcccccctagcccgagcctcaagtctcgaagacctcgttctcaaagaggcgtctactgccgtatcaacgccagaagcacccgaaccgcccagtcaagagcagtgggccattcctgtggacgcgactagtcccgtgggcgacttttatcggctgattccacagcccgcctttcagtgggccttcgaacccgatgtatttcagaagcaggccatcctccatttggagcgccacgattccgttttcgttgcagcccacactagcgcaggaaaaaccgtcgtggccgagtacgctatcgccttagcccaaaaacacatgacaagaacgatctacacttcaccgattaaggcactcagcaaccaaaagttccgagactttaggaatacctttggggatgtggggctcctcaccggcgatgtgcagctgcacccggaagcctcctgtctcattatgaccactgagatcctccgctccatgctttatagtggctctgatgtcatccgggatctggaatgggttatattcgacgaggttcactatatcaacgacgtcgagaggggcgtcgtctgggaggaggtgctgattatgctccccgaccacgtgtccattatcctgttaagcgcaactgtgcccaatgccttagagtttgccgactggatcggcagattaaaacggcgccagatctatgtaatctccaccgtgacaaggccagttcctttggaacactacttgtttaccgggaatagctcaaaaacccaaggggaactgttcctcctgctcgactcccgaggggcgttccataccaaaggatactatgccgcggtggaggccaagaaagaacggatgagcaagcatgcgcagaccttcggcgccaaacagccaacccaccagggcgggcccgcccaggatagaggggtctacctcagtctcctggctagcttgcgaacccgagcgcagcttcctgtcgtcgttttcaccttctctcggggcaggtgcgacgaacaggccagcggcctgaccagcctcgacctgacgacaagcagcgagaagtccgaaatacacctgttcctgcagcggtgcctcgccaggctgcgaggcagcgatagacagctgccacaggtgttgcacatgagtgagctactcaaccgaggtctgggcgtccaccatagtgggattttaccgatactcaaggagatcgtcgagatgctattctcacgtgggctggtgaaggtcctattcgccacagagaccttcgctatgggcgtaaatatgccggccaggacagtcgtgtttgattctatgagaaagcacgacggttcaacgttccgggacctcctccctggtgaatatgtccagatggcaggcagagccggacgacggggcttggaccccactgggactgtgattcttctctgtaagggacgagtgcccgagatggcggacttgcataggatgatgatgggtaaaccgagtcagctacaatcccagtttcggttgacttacactatgatcctgaatctcctcagagtagacgctctgagggtcgaagatatgatgaaacggtcttttagcgagttcccatccagaaaggattccaaagcacatgagcaggcactggccgaattaactaaaaggcttggcgcactggaagaacctgatatgacgggtcagctggtcgatctaccagagtactatagctggggggaagaactgaccgagactcaacatatgatccagcgtaggataatggaatctgtgaatggcctcaagagtctctcagcaggccgcgtggtggtcgtgaagaatcaagagcatcacaacgcgctgggagtgattctccaggtatcttctaattctacttcacgagtgttcaccacattggttctttgtgataaacctctctcacaggacccacaggatagaggccccgctacggccgaagtcccgtaccctgatgacctggtgggcttcaagttgttcctcccagagggcccttgtgatcacacggtggtgaagttacagccgggggacatggcggccattacgacaaaagttctgcgggtgaacggagagaaaattctcgaggacttctcgaaacgtcagcagccgaagtttaagaaagaccctcccttggcagccgtgacgacggccgtacaagaactgctaagactggcacaggcccatcccgctggaccgcctaccctggaccctgtgaatgatctgcaactgaaggatatgtccgtggtggagggcggcctccgagcaagaaagttagaggagttgattcagggagcccagtgtgtgcacagcccccggttcccagcccagtatctgaaactgagagagcgtatgcaaatacagaaggaaatggagcgtttacgctttctcctgtctgatcagagtcttttgctcctgcccgaataccaccagagagtggaagtgctgcgaacactcggatacgtggacgaggccggcactgtcaagttagccggacgagtggcttgtgccatgagttcccatgagctgctgctgacagagttgatgttcgacaacgccctctccacactcaggcctgaggaaatcgcagctcttttatcaggactggtgtgccaatctcccggagacgccggagatcagctgcctaacacgcttaaacaggggatcgaacgggtgcgggcagtggcgaagcgcataggcgaggtgcaagttgcatgcgggctgaatcaaaccgttgaagaattcgtgggcgaactgaacttcgggctagtggaagttgtctatgaatgggcccgaggaatgcccttttcagagttggctggtctgtcaggaacccctgaaggattggtggtccgatgcatccagaggctggctgagatgtgccggtccctacgaggcgccgcacgattggtgggcgaaccggtgctcggtgcaaaaatggaaactgctgccaccctcctgaggagggacatcgtgttcgctgcctccctatatacacagtag

SEQ ID NO: 169231 - DNA, 3162 bp, Artificial Sequence
  derived and/or modified sequence
atggacttcgcccccaaggactgccccacccccgcccccggcctgctgtctctatcttgcctactcgagcctctggatctggggggcggcgacgaggacgagaacgaggcggtgggtcagcctggaggaccacgtggcgatactgtgtccgcatcaccatgctctgctccgctggcgagggccagtagtttggaggaccttgtcttaaaagaagcaagcactgccgtgagtaccccagaggcgcccgaaccaccatcacaggaacagtgggcgatacccgtcgacgctacttcacctgttggcgatttttacagacttatcccccagccagctttccagtgggcttttgaacccgatgtgtttcagaagcaggccattctgcacctagaacgacacgatagcgtgtttgtagctgcccatacgagtgccgggaaaaccgtggtggccgagtacgccatcgccctggctcagaaacatatgacacggactatatacacatcaccaatcaaagcgctgagtaatcagaagttccgggactttaggaataccttcggtgacgttggactgttaactggtgacgtccagctgcaccccgaggccagctgtctgattatgaccactgagatattaagaagcatgctctactctggctccgatgtgatcagggatctcgaatgggtcatattcgatgaagtgcactatatcaatgatgtagaaagaggcgtggtgtgggaagaggtacttattatgctgcccgaccacgtgagcatcatcctactgagtgccaccgtccctaatgccctggagttcgcagattggattggccgtcttaagaggcggcagatttacgttatttccacggttacacgacctgtacccctggaacactatctcttcacaggcaattcatccaaaacacaaggggagctctttctgcttttggactctcgcggtgcttttcatacaaagggatactacgctgccgtcgaagccaagaaagaacgcatgtctaaacacgcacaaacttttggggccaagcagccgacccatcaaggcggaccggcccaggatcgcggggtttacctctccctcctggcatcattacggaccagagcccaacttcccgttgtggtattcacttttagccgggggagatgtgatgagcaggctagcggactaacaagcttagacctgacgacctcaagtgagaagagtgaaattcacctgtttctgcaaaggtgcctggcccgcctgcgaggtagcgaccgacaactgccgcaagtgctgcatatgagtgagctgctcaatcgcggcctaggcgtgcaccactcagggatcctgccgatactgaaagagattgttgagatgctgttttctcgtggactggtgaaagtgctctttgctaccgagacgtttgctatgggagttaacatgcctgcccggactgtcgtgttcgactccatgaggaaacacgacggctctacgtttcgagacctgcttcctggggagtacgtgcaaatggcgggtcgagccgggcggcggggcctcgatcctacgggcacggtgatcctcctctgcaaaggccgcgtgccagagatggctgatctgcacagaatgatgatgggcaagccgtcacagctgcagtcacagtttagattgacatataccatgatcctgaatctgcttagagtagacgcattgcgggtggaggacatgatgaagcgcagtttttccgagttcccgtcacgcaaggatagcaaggcccatgaacaagccctggccgaacttacaaagcgattgggtgcgctagaggagccggacatgactgggcagcttgtggatctgcccgagtattactcatggggggaagaactcaccgaaacgcagcacatgattcagagacgcattatggaatcagtcaacggtctgaaatccttaagcgctggaagggtggtggtggtgaaaaaccaagagcatcacaacgcactgggtgtaatactgcaggtaagcagcaactccacaagccgagtgttcaccactctggttctgtgtgacaagcccctgtcacaagaccctcaagatcgtggccctgctactgcggaagtgccctacccagacgatctggtgggattcaagctatttctgcctgagggcccatgcgaccacacagtagtcaaacttcagcccggtgatatggctgctataacgacaaaggtcttaagagtgaatggggaaaagatcctggaggatttttccaagcggcagcaacctaagtttaagaaagatcctcccctggcggctgtcacaactgccgttcaggaactgctccgactggcccaagctcacccagccgggccgcctacactggacccggtgaacgacctccagctgaaggatatgtccgtggtggagggcgggctacgcgctcgaaaactggaagaacttattcaaggcgcccagtgcgtccactccccgcggtttccagcacaatatctcaagttgcgagagcgaatgcagattcaaaaggagatggagcggctgagattcctgctttctgatcaatcattgctattattaccagagtaccaccagcgcgttgaagtgctgcgcactctcggttatgtggacgaagccggaacagtgaagcttgcaggacgtgtagcatgcgctatgtcaagtcatgagctgcttttaaccgaactaatgttcgacaatgccctatcgactcttaggcctgaggaaatagccgccctgctgagcggattggtctgccagtccccaggtgatgccggcgatcagcttccgaacaccctcaagcaaggaatcgaacgggtgagagcagtggccaagagaatcggtgaagtccaggttgcttgtggactgaatcagacagtcgaggaattcgtgggcgagctgaattttggattggtcgaagttgtgtatgagtgggctagaggtatgcctttttccgaacttgccggactgagtggaacccctgagggattggtcgttcgttgtatacagagactggcagaaatgtgcagaagcctgcggggtgccgcccggctggtcggggagcccgtcctgggagccaagatggagaccgccgctacactccttaggagggacattgttttcgctgcctcgctgtacacacagtag

SEQ ID NO: 169232 - DNA, 3741 bp, Artificial Sequence
  derived and/or modified sequence
atgatggaaaccgaaagattggtcctgcccccaccagacccactggacttacccctgagagccgtagagttaggatgtaccggacattgggagctgctaaacctaccaggcgctcccgaatcaagtctcccacacggcttacctccttgcgcaccggacctgcagcaagaggccgagcagttattcctcagttccccggcatggctgcctctgcacggcgtagaacacagcgctcgaaagtggcaaagaaaaacggacccctggtcgctgctagccgttctgggcgcacccgtccctagtgacctgcaagcacagcgccacccaacaaccggccagattctggggtataaggaagtgctactcgaaaataccaacctgtccgccacgacttcgttgtctctgagacggcctcctggtcccgctagtcaaagcttgtgggggaaccccacgcagtatcctttttggccaggcggtatggacgagcctacaattacagacctcaataccagagaggaagctgaggaagagatagattttgaaaaagatttgctgaccatccctccgggattcaaaaaaggtatggattttgcacccaaagattgccctacacccgcacccggacttttgagcctgtcatgtatgctcgagccactcgacctgggaggaggggatgaagacgagaacgaggcagtgggacagcccggtggacccagaggggacactgtgtcggcatccccatgttcagcccctctcgcacgagcttcctcactcgaagatctggttctgaaggaggccagcaccgcggtttcaacccctgaagccccagagcccccttcacaagagcagtgggccataccagtggacgccacaagtcctgtgggtgatttctatcgactcattccacagccagcgttccagtgggcgttcgagcccgatgtgttccaaaaacaggccatcctccatctcgaacgccatgactccgtatttgtggctgcccatacctctgcgggtaagaccgttgtcgcagagtatgccattgctctcgcccagaagcatatgacccggactatctatacttctcctatcaaggccttgtcaaatcagaaatttcgggacttcaggaatacattcggcgatgtgggtctgctgacaggcgatgtgcagctgcatcctgaagcctcctgccttatcatgacaacagaaatccttaggagtatgctttattccggtagcgacgtgattcgtgacctggagtgggtcattttcgatgaggtacactacataaacgacgtggagaggggcgtggtgtgggaagaggtgttaatcatgctgccagatcatgtcagtattatactcttgtctgccaccgtgccaaacgcattggaattcgccgactggatcggtcggttaaagagacgccagatttatgtgatttctactgtgaccagacccgtgcccctcgagcattatttgtttacggggaacagctctaaaacacaaggcgagctgttcctcctgctcgatagccgaggagcttttcataccaagggatactacgccgctgtggaggccaagaaggaacgaatgtcaaagcatgcgcagactttcggagccaaacaacctactcaccaggggggacctgcacaggatcgcggagtgtatttgagcctactggctagtctgcgaacacgcgctcaattacctgtggtggtgttcaccttctcccggggtcggtgcgatgagcaggcttctgggctaacatcactcgatctcaccacaagtagcgaaaaatccgagatacacttgttcctccagcgatgcctggcacggctaagggggtcagatcgccagttgccacaggtgttgcacatgagcgagctgctcaatcgtggcctcggggttcatcactctgggatcctgccgatactgaaggagatagtcgaaatgctgttttctaggggcctggtaaaagtgttgtttgcaacggagacatttgccatgggagtgaacatgcctgcaagaactgtggtctttgactcaatgcgcaaacacgatggtagcacttttcgagacctcctccctggtgagtacgtgcagatggcgggtagggccggtcggaggggcctggatccaactggaacagtgattctcctctgcaagggacgcgttcctgagatggcagacctacatcgcatgatgatgggaaagccatcccagctgcagagccagttccgcctgacatataccatgatcttaaatttacttagggtagacgcccttcgtgttgaggatatgatgaaacgatcatttagtgagtttccatctaggaaagacagtaaagctcatgagcaagctttggcagaactcaccaagcgcctcggggcactagaagagccggatatgacagggcagttggtggatcttcccgagtactattcctggggcgaagaactcactgaaactcagcacatgattcaaagaaggattatggagagcgttaacggactcaagagtttgtccgcgggacgggttgtggttgtgaaaaaccaggagcaccataatgcgctgggagtgatcttgcaggtcagttctaactctactagcagagttttcacgaccttagtactgtgcgataagcctctcagtcaggacccccaggataggggcccagcgactgcggaggttccatatccagatgatctggtgggcttcaagctcttcctgcccgagggcccatgtgatcacactgtggtcaaactacaacctggcgacatggcagccatcacgacaaaggtgctgcgagtgaacggggagaagatactggaagacttttcgaaacgacagcaaccaaagttcaagaaagatccccctctggccgcagtgaccaccgccgtccaggagctgctgcgacttgcccaggctcatcctgctggcccacctacgctggatccggtcaacgacttgcagctgaaagacatgtctgtagtggagggaggtttacgggcaagaaaactcgaggagctcattcagggagctcaatgcgtgcactctcctcggttcccagcacagtacctgaagttgagggagaggatgcagattcagaaggagatggaaagactgcgtttcctcctgagtgaccaaagtctgctactgctgcccgagtaccatcaaagagtggaggtgcttcgtacattgggatatgtggatgaggcgggtaccgtgaaactggcaggacgtgtcgcttgcgccatgtcttctcacgagctgctattgactgaactcatgttcgataacgcgctgagcaccttgcgcccagaggaaatagcggctttattatcggggcttgtgtgccagagcccaggcgacgcaggagatcagttgcccaatacccttaagcagggaatcgagagagtccgtgcagtggccaagagaattggcgaggtgcaggtggcttgtgggctgaaccagactgttgaagagttcgtaggagagctgaacttcgggctcgtggaggtcgtttacgagtgggccaggggcatgcctttctcagagctggcgggtctatctggaactcctgaggggctcgttgtgcgctgcattcagagactggccgaaatgtgtagatctctgaggggtgcggctaggctcgtgggcgagccagttctcggagcgaaaatggaaacagctgccacactgttaaggagagatatagtgtttgccgcttccctttacacccagtag

SEQ ID NO: 169233 - DNA, 3741 bp, Artificial Sequence
  derived and/or modified sequence
atgatggagaccgagagactcgtgctacccccaccagatccgttagatttgccacttagggccgtggaattgggatgtacgggacattgggagcttctaaatttgccaggggctcctgaatctagtcttccgcatgggctaccgccatgcgccccagatctccagcaagaggcagagcagctgtttctcagcagtcccgcatggcttccactccatggagtcgagcattccgctcgcaaatggcaacgtaaaactgacccctggagccttctggcagtgttgggcgctcctgtgccatcagatctccaggctcagcgccatccaacaacgggacagatcctgggttacaaagaggtactgcttgagaataccaacctgagtgccacaacctctctgagtctcagacgcccaccgggaccagctagccagagcctctgggggaatcctacacagtacccattctggcctgggggaatggatgagccgacaattacagatctaaacacgagggaggaggccgaggaggaaattgattttgagaaggatttgctgaccatccctccgggattcaaaaaaggcatggacttcgctccgaaagattgtcccactcctgccccagggcttctgagtctgagctgcctactggagccccttgaccttgggggaggagatgaagatgagaacgaagccgttggccagcctggcggaccccgaggagacaccgtctctgcatcaccctgttccgctccactcgcgagagcctcgtcacttgaggatcttgtgcttaaggaagctagcacggcggtgtcaacacccgaagcccctgaacctccctctcaggagcaatgggctatccctgtggacgcaacaagcccagtcggcgatttttaccgtttaatcccacaaccggctttccagtgggccttcgagccggatgttttccagaaacaggcaatcctgcacctagagcgacatgactccgtgtttgtggccgctcacaccagtgcaggtaagactgttgtcgctgaatacgcaattgcacttgcccagaaacacatgacccggactatttatacatctcccattaaggcactctccaaccagaagtttagggacttccgaaataccttcggggatgtgggcctgttgacgggggacgtgcagctgcaccctgaggcctcatgccttattatgactactgagattcttagatcaatgctttacagcgggtcagatgtcattcgcgacttggaatgggtgatatttgatgaagtgcactatatcaacgacgttgagaggggtgttgtatgggaggaagtcttaattatgctcccagatcacgttagtatcatcttgctttccgccacagttccgaatgccctggagttcgcagattggatagggagattgaagcgtcgccagatctatgtaatttcaaccgtaacgaggccagtgccattggaacactacctgttcacaggcaattcatcgaagacacagggcgaactgtttcttctcctcgactctcgcggagctttccacaccaagggctactatgcagcagttgaagcaaaaaaggagcgcatgtccaaacacgcacagacttttggcgcaaagcagccaacacatcagggcggaccagcgcaggatcggggagtgtacctgtccctgctagcatcattgcgtacaagggcgcagctgcctgttgtggtcttcacattcagccggggacgctgcgatgagcaggccagtggactcacgagcctggacctgacaacctcctccgagaagtccgagatacacctctttctgcagcgctgtttagccagactcaggggaagcgaccggcagctcccacaagttttacacatgagcgaacttttgaacagaggactgggggttcaccattcgggcattcttccaatcctgaaagagatcgtcgagatgctgttcagtcgcggactcgtcaaagtcctcttcgcaacggagacattcgccatgggggtcaacatgccagcaagaaccgttgtatttgactccatgaggaagcatgatggcagtaccttcagagatctgctgccaggtgaatacgttcagatggccggtcgtgctggtcgcagaggcctagacccgacgggcacggttatccttctgtgcaaagggagggtccccgagatggccgatctacaccgcatgatgatggggaaacccagccagcttcagtcacaattccggctcacatacactatgattctgaatctgctcagagtagatgctcttcgtgtggaggacatgatgaaacgcagctttagcgagttcccatctagaaaagactctaaagctcacgagcaggccctggccgagttgactaagaggctgggcgctttggaggagccggacatgacggggcagcttgttgacctcccagaatactactcttggggggaggaactcacggagacccagcatatgattcagaggcgcatcatggaaagtgtgaatggattaaagtcactcagcgcaggaagagttgtagtcgtcaaaaaccaggagcatcacaatgcgctgggggtgattttgcaagtgtcttctaacagcacgtcaagggttttcactacgctagtgctgtgcgacaagccacttagccaggacccccaggaccggggaccagccactgccgaggtaccctaccccgacgacctggtgggattcaagttgttcctgcctgaaggcccatgtgaccatactgtggtcaaactccagcccggtgatatggctgccattaccaccaaggtgctccgtgtgaacggcgagaagattttggaggactttagcaaaagacagcaaccaaaattcaagaaagaccctccgctggccgctgtcaccacggccgtgcaggagctgttgcgactcgcccaggcacacccggctggccctccgactctggatccggtaaatgatcttcagcttaaggatatgtcggtcgttgagggaggtctccgggctcggaagctcgaagagctcatacaaggcgctcagtgtgtccactctcccaggttcccagcccagtacctgaagttgcgggagcggatgcaaatacagaaagaaatggaaagactgaggttcctcctgagcgaccagtccctgttattactacctgagtatcaccaaagggtggaggtcttaaggaccctgggatatgtcgatgaagcaggaaccgtgaagttggcagggcgagttgcatgtgctatgtctagccatgagctgctattgaccgagctgatgtttgacaatgccctgagcacgctgcggccagaagagatcgcagcccttttgtctggacttgtgtgtcaatcaccaggcgacgccggagatcagcttcccaacactttgaaacagggcatcgagcgagtgcgcgctgtggccaaacggatcggtgaggtacaggtcgcgtgtggacttaatcagaccgtagaagagttcgtgggcgagctgaacttcggcctggttgaggtagtttacgaatgggccagagggatgccatttagcgaattggccggtctaagcggcactcccgaaggcctcgtcgttaggtgtatacagagacttgcagaaatgtgcagaagtctgagaggcgctgcaagattagtaggggaacctgttctaggtgcgaagatggagaccgcagcgacactgttgagacgggacatcgtatttgcggcttcactgtacacccagtag

SEQ ID NO: 169234 - DNA, 3741 bp, Artificial Sequence
  derived and/or modified sequence
atgatggaaaccgagcgcctcgtcctgccgcctccagatcctctggatttgcctcttagggcagtggagctgggttgtacaggacattgggagctgctgaatctgcccggtgccccagaatcctccctgccacacggactgccaccctgtgcccctgatctacagcaagaagccgaacaattgttcctatcaagtcccgcatggttaccacttcacggtgtcgaacattcagcacgaaaatggcagcgcaaaacagacccgtggtcactattagctgtgcttggagcacccgtgccgtctgacttgcaggcccagagacatccaactaccgggcagatcttaggatacaaggaagtgttgcttgaaaatacaaatctttcagcaacgaccagcctgtcactaagacgccctccgggtcccgcatcacaatctttatggggtaatcctacccaatatccattctggcccggaggcatggatgagcctaccattaccgacctgaatacccgcgaggaggctgaagaggaaattgatttcgaaaaggacctcctgacgataccaccaggtttcaagaagggaatggatttcgctccaaaggattgtcctactccagcgcctggcttgttatcactgtcttgtcttctcgagccattagacctcgggggaggtgacgaggatgagaatgaggccgtcggacaacccggagggcctaggggggatacagtgagcgcatccccttgtagtgcaccgcttgcaagagcatcaagcttggaagatttagtcctgaaggaagcttcgactgcagtctctacccccgaagcacccgagcccccttctcaggagcagtgggccatcccggtggacgcaacatcccccgtcggtgacttctatcgcctgatcccacagccggcattccagtgggcatttgagccggacgtttttcaaaagcaggctatcctgcatcttgagcgacacgactctgtgttcgtggccgcacacacttctgccggaaagactgtagtggcggagtatgccatcgcgcttgcccaaaagcatatgacgaggaccatttatacctcccctattaaagcactctccaatcagaagtttagagacttccgtaataccttcggagacgttggattactgacgggagacgtccagcttcaccctgaggcaagctgcctcattatgactacagaaattctcaggagtatgctttatagtgggagtgacgtgatccgtgatttggagtgggtcatctttgacgaggtgcactatattaacgacgtggagaggggcgtggtctgggaggaagtgctgatcatgctgcccgatcatgtctctatcatcctgctaagcgccacagtccctaacgccctcgagttcgccgattggattggacggctgaagcggagacagatctacgtgataagtactgtaacaagacccgtgcccttagagcactacctctttacaggaaattcatcaaagacacaaggagaactcttcctcctgctggacagtcggggagccttccataccaaggggtattacgcagctgttgaggctaagaaggaacgcatgtcaaagcatgctcagaccttcggggcaaagcagcccacgcaccagggaggtccagcacaggatagaggtgtgtatctgagcctattagcgagtctcaggacgcgggctcaactgccagtggtggtgtttaccttttctcggggtcgatgcgatgaacaagcaagcggcttaacatccctggacctgactacaagcagcgaaaagtctgaaattcatctgttcctgcagagatgtctcgccaggctgagggggtctgacaggcagctacctcaggttctccacatgagtgagcttctaaatcgtggcctgggagtgcatcatagcggcatcctgccaatccttaaggagatcgtggaaatgctgttctcaagggggcttgtgaaggttctgtttgccactgaaacgttcgccatgggtgtcaacatgcccgctcggaccgtggtgtttgattctatgcggaagcacgacgggtctaccttcagagacctgctgccaggtgagtatgtacagatggccggtagggctggaagaagaggtcttgaccctacagggactgtaatccttctctgcaagggcagagtgcccgagatggcggacctgcaccggatgatgatggggaaaccttcccagctccagagtcagttccgattaacttacactatgattctgaacctattgcgtgtcgacgctttgagggtcgaagacatgatgaaacgcagtttcagtgaatttcccagtcggaaggacagcaaggctcatgagcaggccctcgctgaactgactaagaggctgggcgcactcgaggagccagacatgacggggcagttagtggatcttcccgaatattattcatggggtgaagagttgaccgagacacagcacatgatccaaaggaggattatggagagtgtgaatggcctgaaatctctatctgcgggaagagtggtggtggttaagaaccaggaacatcataacgctttaggagtgattttacaggtctcctctaactctacttcgcgcgtttttacaaccctagttctgtgtgataaacccctgagtcaggacccacaagaccgcggaccagccacagcggaagtgccataccccgacgacctcgtgggatttaagttgttccttcctgagggcccatgcgatcacaccgtggtgaagttgcagcctggcgatatggccgctattacaactaaggtgctgcgtgttaacggcgagaagattctggaggactttagcaagaggcagcagcctaagtttaagaaggacccgcctctggctgccgtgacgacggccgtccaggaactgctgaggttagctcaggcccaccccgcaggccctcctacgttagatccggtgaacgatctgcagctgaaagatatgagcgtagttgaagggggtctccgcgcaaggaagctcgaggaacttatccagggcgctcaatgcgtacatagtccacgatttcccgctcagtacctgaagttgcgggagcggatgcaaattcaaaaggagatggaacggctccggtttctcctatcggatcaatctcttttgttgctccccgagtaccatcagcgtgtggaggtcctaagaacattagggtatgttgacgaggccggaaccgtgaagttggccggtcgggttgcctgcgccatgagttctcacgaactgctgttaaccgagctgatgtttgacaacgcccttagcaccctcaggccagaggagattgctgcgctgctctcagggctcgtgtgccagagccctggcgacgccggagaccagcttcccaacacactcaagcaagggatcgaacgagtacgcgctgtggccaagcggatcggggaggttcaggtggcttgtggactgaaccagactgtggaggaattcgttggggagcttaattttggcctggtggaagtggtgtacgaatgggcgagggggatgcctttcagtgagctggcaggcttatctgggactcccgagggactggttgtgaggtgtattcagagactcgccgagatgtgccgctccctaagaggcgctgcccgactcgtgggtgaacccgtcctcggcgcaaagatggaaaccgcagcaactctgcttagaagggacatcgtgtttgctgcctcattatatacccagtag

SEQ ID NO: 169235 - DNA, 3741 bp, Artificial Sequence
  derived and/or modified sequence
atgatggaaacggagcggttagttcttccacctccagaccccctggatctgccgctgcgagccgtggagttaggatgcacgggtcactgggaactgctgaatttacctggcgcacccgagtcatcgctgccacacgggttgcctccatgcgcccctgacctccagcaggaagctgagcaactgtttctgagctcaccggcttggctgccactacacggcgttgagcactctgctagaaaatggcagcgcaagacggatccttggagtctactggccgttctgggggcacccgtcccctcggacctgcaagctcaacgccatcctacaacaggtcagatcttaggctataaggaggtgttgttggaaaacactaacctttccgctacaacatcactgagcttgcggcgaccccctggcccagcttctcagtccctgtggggcaatcctacacaatatccgttttggccaggcggaatggacgagcctactatcaccgatctgaacaccagagaagaagccgaggaagaaatcgatttcgagaaggacctgctcactataccaccaggcttcaagaaaggcatggactttgcaccaaaagactgtccaacaccagctccaggactgttgtctctaagctgtttgctggagccactggatttgggcggtggtgatgaggacgaaaacgaggctgtgggccaacccggtggacctcggggagacaccgtctcagcgtccccctgctctgcacctctggcaagggccagttcacttgaagatctggtcttaaaggaagctagtaccgccgtgtcaaccccagaagctcccgagcccccttcacaggagcaatgggccatacccgttgatgccacctcgcccgtgggagacttctacaggcttatcccacagcccgctttccagtgggcgttcgaaccggatgtgttccagaaacaggccattctgcaccttgagaggcacgattctgtcttcgttgctgcccacaccagcgccggaaaaaccgtggtggccgaatacgctattgctctggcccagaagcacatgactcgcaccatttatactagcccgatcaaggctttgagcaatcaaaagttcagagatttcagaaatacttttggcgacgtgggactactgacaggagacgtccagttgcatccagaggcctcctgcctcataatgaccaccgagattctacgatcaatgttgtattccggctccgacgtgattcgtgaccttgagtgggtgatttttgacgaagtccactatattaacgacgtcgagcggggtgttgtatgggaggaggttctaatcatgcttcctgaccacgtgtccatcatactgcttagtgcaacagtgcccaatgcacttgaatttgcggattggattggtagactgaagcggcgacagatttatgtgatttccaccgtcacccggcctgtccctctagaacattacttattcacagggaatagctcaaagacccagggagagctatttttactgctggattccagaggggcttttcatactaagggatattacgctgcagtggaggccaagaaggagagaatgtcaaagcatgctcagacttttggagctaagcaaccgacccatcagggcggacccgctcaggaccgcggtgtgtacctgagtcttttagcctctctgaggaccagagctcagctacctgtggtggtctttaccttctcccggggtagatgtgatgaacaggcatcgggcctgacgtctctcgatctgacgacttcttccgaaaagagcgagatacacttgttcctgcagcgctgtctggccaggctacggggaagtgacagacaacttccacaggttcttcacatgagcgaattgctcaaccggggtctgggcgtacatcacagtggcattctgcccattctaaaggagatcgtcgagatgttgttcagccggggattggtcaaggtcctgttcgccactgaaacattcgcaatgggtgtaaacatgcctgcacgtaccgtggtatttgactccatgaggaaacacgacgggagtactttcagggatctgctgccgggagagtacgtgcaaatggctggcagagctgggcgaagaggcttggacccaaccggcactgttatcctcctgtgtaagggaagggtacccgagatggccgatttacacagaatgatgatgggcaagcccagccagttgcagagtcagttccgtctcacctatactatgatcctgaatctcttgagggtcgacgcacttcgggtggaggatatgatgaaacgtagtttcagcgagtttccatcaaggaaggatagtaaggcacatgaacaggcgttggctgagctgaccaagcggctcggtgccctcgaggagcctgacatgacgggccagctggtcgaccttccggaatactactcatggggggaagagctgaccgagacacagcacatgatacagaggaggataatggagtctgtgaacggtctgaagtcactttctgcgggtagggttgtcgtcgtgaaaaatcaggagcatcacaatgctttaggcgtcatcttacaggtttcttccaacagtactagccgcgtattcacgacactggtgctgtgcgataagccactgtcccaagatccccaggaccgcggacccgctactgcagaggtcccgtacccagatgatctggtggggttcaagttgttcctcccggagggcccttgcgatcacaccgtcgtcaagttgcagccaggcgacatggcggcaattaccacaaaagtcttgcgggtcaacggcgaaaaaatactggaagacttttcaaagcggcagcaacccaagtttaaaaaggatccgccactggccgcagtgacaaccgccgtccaggagttgctgcggctggcccaggcccacccggcaggaccccctactctggatcccgttaatgatcttcagctgaaggacatgagtgtcgtggaaggcggactgcgagccaggaaattggaagagctgattcagggggctcaatgcgtgcacagccccaggtttccagcccagtacctcaaactgagggagaggatgcagatccagaaagaaatggagcgcttgcgattcctgctgtctgaccagtcattactgctgcttcccgaataccaccagcgggtagaggtgctcaggactctgggatacgtagatgaggcaggaactgtaaagctggccggtagagttgcctgtgccatgtccagccacgagctgctcctgactgagttaatgtttgacaatgccctgtctaccctccgaccagaagagattgccgctcttctgagcggactcgtgtgtcagagcccgggagatgcgggagaccaactgcctaatacgctgaaacaaggcatcgagcgcgtacgggcagtcgctaaaagaatcggagaagtacaggtcgcctgtggtctcaaccagaccgtggaagaattcgtcggggagctcaacttcggcctggtggaggttgtgtatgagtgggccaggggcatgcccttttccgaacttgcagggctaagtggtacccctgagggcctagtggttcgctgcatacagcggctggctgagatgtgcaggagcctccgcggagctgctcggctggtaggggaacctgtgttgggcgcaaagatggagactgctgccactctgcttcgacgggacatcgtcttcgcggctagtttgtacactcaatag

SEQ ID NO: 169236 - DNA, 3741 bp, Artificial Sequence
  derived and/or modified sequence
atgatggaaactgaaagactggtgctgccaccacctgacccattggacctcccacttcgcgctgtggagctgggttgtacagggcactgggaactcctgaatctgcctggcgctccagaatcatcattgcctcacggcctacccccttgcgccccagatctccagcaggaagctgagcagctgtttcttagctcaccagcctggctgccccttcacggagtggaacacagtgctaggaagtggcagcggaagaccgacccatggagcctccttgccgtgttaggagccccagtgcctagcgacctgcaggctcagcgccacccgaccacagggcagatcttgggctataaggaagtcctgcttgaaaataccaacctatccgcaaccacctccctctccctccggagacctccgggacctgcctctcagtcactttgggggaatccaacccagtaccccttctggccaggtggcatggatgagccaactattacagatctgaacacaagagaagaagcagaggaggaaattgactttgaaaaagacctgcttacgattcccccagggttcaagaaaggtatggatttcgcgccaaaggattgccccacgcccgcaccaggattgctgtccttgtcttgccttcttgagccactggacctcggcggaggcgacgaggatgaaaacgaagccgtcgggcagccagggggtcctcgcggtgataccgtttcagctagtccatgctctgccccacttgccagggcctcttccctggaggacctggtactgaaggaagcatccacagccgtctctacaccagaagcgccagagcctccctcacaggaacagtgggcaatccccgtcgacgccaccagccccgtgggcgatttttatagattgatcccgcagccagcttttcaatgggccttcgagcccgatgtatttcagaagcaggccattctccatcttgagcgccacgactccgtttttgtagcagctcatacatccgcaggcaagactgttgtggcggagtatgcaatagccctcgcacaaaagcacatgacacggactatctacacttctcccatcaaggccctctccaatcaaaaatttcgcgacttcagaaatacctttggcgacgttggactgcttactggggatgtccagctccaccccgaggctagttgccttattatgaccacagagatccttagaagcatgctgtatagtggctcggacgtcatcagagatttagagtgggtgattttcgatgaagtgcattacatcaacgatgttgagaggggcgttgtctgggaggaggtgctgataatgctcccagaccacgtgtcaatcatccttctatcagcgacggtgccaaatgcgctggaattcgccgactggattgggagactgaaacgtcgccagatatacgtgattagcacagtgacccggcctgtccctctagagcattatctgttcacaggtaattcttcgaagacccaaggggaactgttcctgctgctggactcaagaggcgctttccacactaagggctattacgctgccgtggaggccaagaaggagcgcatgtccaaacatgcgcagacatttggtgccaagcagcccacgcaccaggggggaccagcgcaggatagaggcgtatacctctcactgctcgccagcctaaggacccgggctcaactgccggtagttgtgttcaccttctcacggggtagatgcgatgagcaggcctccggcctcacctccctcgatctcactacttcctccgagaaatctgagatccatttattcttgcagcggtgcctagcccgactccgcggttccgacaggcagttgccacaagtcttacatatgagcgaacttcttaataggggcctgggtgtacatcactccggcatccttcccatactgaaagaaatcgtggagatgctcttctcccgagggctcgtgaaggtcctctttgccactgagaccttcgctatgggggtaaacatgcccgctcggactgtggtgttcgactcaatgagaaaacacgatggcagtacattccgggatctgctgcctggcgaatatgtgcaaatggctggcagagccggacgcagaggccttgatcctactgggactgtgatcctgttatgcaaagggcgagtcccagagatggccgacctgcatcgaatgatgatgggcaagcccagtcaactacagtcccagtttcggcttacctataccatgattctcaatctgctcagagtcgatgctctgcgagtggaagatatgatgaagagaagcttttcagagtttccgagtaggaaagattcaaaagcgcacgagcaggcgctggccgagttaactaaaaggcttggcgcactggaggagcccgacatgacaggccagcttgtcgacttgcccgagtattactcctggggagaggagttgaccgagacccaacatatgatccagcggcgtatcatggagtctgttaacggactcaaaagcctgtcagctggccgtgttgtggtcgtaaaaaaccaggaacaccacaacgccctcggggttatcctgcaagtttctagcaacagcacaagtagagtgttcacaacattggtcctttgcgataaacccctgtcacaggatccacaggataggggcccagccacagcggaggttccctaccctgacgacctggtggggttcaagctgttccttccggaaggcccatgcgaccatacagtggtgaagctgcagcccggtgacatggccgctattacaaccaaggtgcttagagtcaatggggagaagatcctggaggacttctcgaaacgacagcagcctaagttcaagaaggaccctcccctggccgctgtgacgacagctgtgcaggaactgctgcgactggcccaggcccatcctgccggaccccctacactggaccctgtgaacgatctgcagctgaaagacatgtcggtcgtggagggaggcctgcgcgcacgtaagctggaggaactgatacagggagcccagtgcgtacacagccctcgcttccctgcccagtatctaaaacttagagaacgcatgcagattcagaaggagatggagagactgagatttttgctgtctgatcagagtctactcctattacctgaatatcaccagcgtgtcgaggtactgcgtactcttgggtacgtcgacgaagccggaacagttaaacttgccggacgagttgcctgtgcaatgtcctcccatgaattgcttcttaccgagctgatgttcgataacgctttgtctactctgagaccggaggagatcgccgcactgttgtccgggttggtgtgccaaagcccaggtgacgcaggggaccagttacccaatactttgaaacaggggattgagcgggtgcgagctgtggcgaaaagaatcggggaagtccaagtcgcttgcggattaaaccagacagtggaagagtttgttggcgagctaaacttcggattggtggaggtagtgtatgagtgggcacggggtatgccatttagcgaattggcaggcttgtcaggcacaccggagggactggtagtgcgatgtatccaaagattggcagaaatgtgcagaagtctgcgcggagcggctagactggtgggtgagcccgtgcttggagccaagatggaaacagctgctacactgctacgtcgggacattgtgtttgcagccagtttatatacccaatag

SEQ ID NO: 169237 - DNA, 3267 bp, Artificial Sequence
  derived and/or modified sequence
atggatgaacccacaattacggacctgaatacccgtgaagaggcagaggaagagatcgatttcgaaaaagatctcctgacgatacctcccggattcaaaaagggtatggacttcgcccctaaggattgccccacacccgctccaggcctcttgagcctcagttgcatgctggagccgctggacctcgggggaggggatgaggatgaaaatgaggccgtgggacagcccggaggcccacgtggcgacaccgtgagcgcctccccttgcagcgcgccactggcacgagcctcaagcctggaagatctcgtgctgaaagaggcttcaacagcagtgagtaccccggaagcgcctgaaccgccatcacaagagcaatgggctattcctgtggacgcaacctctcctgtaggggatttttacaggctgattcctcaacccgcattccagtgggccttcgagcccgacgtgttccaaaagcaggctatcttgcatctagagcgacacgactcagtctttgtagctgcccacacaagcgccggaaagaccgtggtcgccgagtacgctattgcactcgcccaaaaacacatgaccaggacaatctacactagcccgatcaaggcattaagcaaccaaaaattccgggatttccgcaacacgttcggtgatgtcgggctcttgactggggacgttcagttgcaccctgaagccagttgccttatcatgaccacagaaatactgcgctcaatgttatatagtgggagcgatgtgatccgtgatctagaatgggtcatcttcgacgaagtacattacataaatgatgttgaaaggggtgttgtttgggaggaagtgctgattatgctccccgaccacgtctccatcatcttactgagcgcgacagtgccaaacgccctagagttcgccgactggatcggcagattgaaaagacgccaaatatacgtgatctccactgtcacgcgtcccgttccgctcgagcactacctgttcaccggtaactcctctaagacccaaggagagctgtttctgctgctggactcaaggggggcattccatacgaagggctattatgctgcagtcgaagccaaaaaagagagaatgagcaaacacgcccaaacgttcggagcgaagcagcctacacatcagggaggccctgcgcaggaccgcggagtctatctctcacttcttgccagcctaaggactcgagcccaactccccgtggtcgttttcacgttctcaagaggcagatgcgacgagcaagcctctggcctcacatccctcgatttgaccacttcaagcgagaagtcggagatccatctgttcctgcagaggtgcttagccaggctccgcggttccgatcgccagctgccccaggtactacacatgtctgaactcctgaataggggcctcggcgtacaccatagtgggattctccccatcctcaaagaaattgtcgagatgctcttctctcgaggactcgtcaaggtgctgttcgctacggaaaccttcgcaatgggggtaaacatgccagctcgcactgtggtcttcgactcgatgaggaagcacgacggttccacctttcgtgacctgcttccgggagagtatgtccagatggctggaagagctggacggagaggccttgaccccacagggacagttatattattgtgtaaaggccgtgttcctgaaatggccgaccttcatcgcatgatgatgggaaaaccttcccagctgcagtcccaattccgtttaacctacaccatgatcctgaacttactgagggtagacgcgctgcgtgtggaagatatgatgaaacggagtttttcagagtttccttcaaggaaggactccaaagctcacgagcaggccctcgccgaactgactaagaggctgggcgcactcgaagaaccggacatgactggacagctggtggatctgccagaatactactcctggggcgaggaattgaccgaaacccagcacatgatccagcggaggattatggaatccgtgaatggacttaaaagtttgtccgccggtagagtggtggtggttaaaaaccaggagcatcacaatgcactgggggtgatcctgcaggtgtccagtaactccacttcgcgcgtgtttacgactttagtcctatgtgataaacccctctctcaggatccccaggataggggacccgcaacggcagaagtcccgtatcctgacgaccttgtagggtttaaattgttcctgcccgagggcccttgcgaccacacagtcgtgaagctgcaacctggcgatatggcggcaattaccacaaaagttttgcgggtgaacggggaaaaaatcctagaagatttcagcaaaagacagcaaccaaaattcaagaaggaccctcccctggcagctgtcaccaccgctgtgcaggagctgctcaggttggcccaggctcacccagccggtccaccaaccctggaccccgtgaacgatctccagttaaaagacatgagtgtggtggaagggggtttgagggcacgaaagctggaggaactgattcaaggcgctcagtgtgtgcattcaccaaggttcccagcccaatatttgaaattacgcgaacgtatgcaaatacaaaaagagatggagcgcctgcgattcttactaagcgatcagtctctgctgcttctgcctgagtaccatcagagagtagaggtccttcgaactctgggctacgttgacgaagccggtaccgtgaaactggcaggacgggttgcgtgcgcgatgtcctcccatgaactgttgttaaccgaacttatgttcgacaatgctcttagcaccctgcgtcccgaagaaatcgcagctctccttagcgggctagtctgccagtcgcccggtgatgccggagatcagctaccaaataccctcaaacagggtattgagcgagtccgcgctgttgccaagcggataggcgaagtgcaagttgcgtgcggcctgaaccaaacggtggaggaattcgtcggcgaattgaactttggactagtagaagttgtctatgaatgggctagaggaatgcctttcagcgagctggccggactatccgggacacccgagggtcttgtggttagatgcatacagagacttgccgagatgtgcagatctctgaggggcgctgccagactggtaggcgaacctgttctgggtgcgaagatggagacagccgcaactctgctccgccgagacatcgtttttgctgcaagtctctatacccaatag

SEQ ID NO: 169238 - DNA, 3741 bp, Artificial Sequence
  derived and/or modified sequence
atgatggagacagagcgtttggtccttccaccacctgaccccctcgacctgcccttgcgcgctgttgaactgggctgcacaggacattgggaattgctgaatctgcccggagcccctgaatcctccctgccacacggcctccccccttgcgccccagatctgcagcaggaggccgagcagctctttctctcttctcccgcttggctgccactgcacggggtcgaacattccgccaggaagtggcaacgcaaaaccgacccttggagtctgctcgcagtgctgggcgctcctgtgcccagcgacttacaggcgcagcggcaccccacaactggccagattctaggctacaaggaggtgctcctcgagaacaccaatctatccgcaaccaccagcctgtctctgaggcggccacctgggcctgcttcacaatccttatggggaaaccccacccagtatcccttctggcccggtgggatggacgagccaacaataactgacctgaacacgcgggaagaggcagaggaagagatcgacttcgagaaggaccttttgacaattccaccaggcttcaagaaaggcatggacttcgcgccaaaggattgtccaactcccgcacccggactgcttagtttgagctgcatgcttgagccactggacctcggaggtggggatgaggacgaaaatgaagcagtcggacagcctggcggacctcggggagatacagtgtctgcctcaccgtgctctgcgccacttgctcgcgcatcctccctggaggacttagtgctgaaagaggcttctacggcggtctctaccccggaggctccagagccaccttctcaagagcagtgggctatccctgtcgatgccacatcccctgtgggggacttctatcgtttgattccccagccggcttttcagtgggctttcgagcctgacgtcttccagaagcaagcgattctacacttggaacggcacgattccgtgtttgtcgcggcacatacctcggctgggaagacagttgtggcagagtacgccatagcacttgcccaaaagcacatgacccgcacaatttatacttccccaatcaaggccctgtccaatcagaaattccgtgactttagaaacacatttggcgatgtgggactcttgaccggcgatgtacagctgcacccggaggcgagctgcctgatcatgacaacggagatccttcggagtatgctctactccggcagcgacgtgattcgcgacctagaatgggtgatcttcgatgaggtgcactacatcaacgacgtggagcgcggagtagtgtgggaggaagtgctgatcatgctccctgatcacgttagcatcatcctgctgtcggctaccgtacccaatgcgctagaattcgctgattggatcggtcgtctcaagcgcagacaaatttacgtcatctcaaccgttactcgtccagtgccccttgagcactacctttttacgggcaactcatccaagacccagggcgaactcttcctcttgcttgacagccgaggcgcttttcacaccaaaggctattacgccgcagttgaggccaaaaaggagcggatgtctaagcatgcccaaacgtttggagcgaagcagccaacccaccagggtggccctgctcaggatcggggagtttatctctctcttttggccagcctgcgtaccagggcacagctgcccgtggtggtattcaccttctccagggggaggtgtgacgagcaagcctcagggttgacgagcttggatctcaccacttcatctgagaaatccgagatccatttgttcctccagcgatgccttgctcggttgagggggtctgacagacagttgcctcaggtcctgcacatgagcgagttactaaaccggggtctaggtgtccaccactccggcattcttcctatcctgaaggagatcgttgagatgctgttttctcgcggactcgtgaaagtcttgttcgcgacggaaacattcgccatgggcgttaatatgcctgcgagaactgtggtcttcgacagcatgaggaagcacgatggatccacattccgagaccttcttcctggtgagtatgtgcagatggccggtagagcaggccgtaggggcctcgatcccactgggacagtcattctgctctgcaaaggtcgagtgccagaaatggccgatctccaccgaatgatgatgggcaagccctcccagctgcagagccaatttcgcctgacatacacaatgatcctgaatctcctgcgggtggatgccctgcgtgtggaggatatgatgaaaaggagcttcagtgaattcccttcgcgtaaggattctaaggctcatgagcaggcgctggccgaactgacaaagcgacttggtgcactggaagaacccgacatgactggtcaattggtcgatttaccggaatactacagttggggggaggagctgactgagacacagcatatgattcagcgtcgcatcatggagtcagttaatggcctgaaaagcttgtccgccggaagggtcgttgttgtgaagaaccaggagcatcacaacgcattgggtgtgatcctgcaggtctccagcaatagcacctcgcgcgtcttcactacactggtactgtgtgacaaacccctgagccaggacccccaggacaggggacctgctaccgccgaggtcccctatcctgacgacctcgtggggtttaaactgttccttcccgagggtccgtgtgatcatacagtagtaaaactgcagccaggggatatggcggctatcacaacgaaagtcctgagagtgaacggagagaagatccttgaggacttctctaagcgccagcagcctaagtttaagaaagatccacctctcgccgcagtgacaacagctgtgcaggaactgctacgtctcgctcaggctcatccagcaggtcccccaactctcgacccagtaaatgatctccagctgaaggatatgagtgtcgtcgaaggcggactgcgggctcgcaagctagaagaactgatccagggagctcagtgcgtgcattctccacgcttcccggcacagtatctcaagctgagagagagaatgcagattcaaaaagaaatggagcgactgaggttcctgctctccgaccagagtttgctactactgcctgaataccaccagcgggtagaggtgttaaggactttggggtacgtggacgaggctggtaccgttaagttagcagggagggtagcctgcgccatgagctcccatgagctgctgctgacggaactcatgttcgataacgccttgagtacgctcaggccagaggaaatagctgctctcctgagcgggctcgtctgtcagtcgcccggagatgcaggcgatcagctccccaacacactcaaacagggtatcgagcgagtccgggcagtcgcaaagcgtattggcgaggtgcaggtggcctgcggattgaatcagactgtggaggagttcgttggggagctcaattttggcctggtagaggtagtttacgaatgggctcgagggatgcccttctcagaattggccggactgagtgggacaccagaggggctggtcgtgcggtgtatccagcggctagcagagatgtgccgttctctgagaggcgcagccagactcgtgggcgagcccgtgctgggagccaaaatggagacagccgctactctgctgcggagggacatcgtttttgctgcctcgctatatacgcagtag

SEQ ID NO: 169239 - DNA, 3162 bp, Artificial Sequence
  derived and/or modified sequence
atggacttcgctccaaaggattgtcctacccctgccccaggcctcctttccctgtcttgcatgctcgaaccccttgaccttggcggtggtgatgaggatgagaatgaagctgtgggacaacccggaggcccaagaggggacactgtctctgcttccccttgcagtgctccccttgcgagggcaagtagcctggaagacctggttctcaaagaggcctccactgctgtctctacaccggaggctcctgaaccaccatcgcaagaacagtgggccatcccggtagacgccacctctcctgtgggggatttctatcggttaatcccgcagccggcattccagtgggcctttgagcccgatgttttccagaagcaggccatcctccacctagagaggcacgattccgtgtttgtggccgcacacacctctgctggcaaaaccgtcgtcgctgaatatgcaatagccttagcacaaaaacatatgacgcgcacgatctacaccagccccattaaagcactcagcaaccagaagttccgggacttcagaaatacgttcggggatgtcggcctgctgactggggacgtgcagcttcacccagaagctagctgtctgatcatgactaccgagatactgagaagcatgctgtattcaggaagcgatgtgatccgtgatctggagtgggtgatatttgatgaagtgcactatatcaatgatgtagagaggggtgttgtgtgggaggaggtgcttatcatgttgccggatcacgtctcaatcatcttactgagcgcgacagtacctaatgcgttggagtttgctgactggatcggcaggctaaaaagaagacagatatacgtaattagcacagttactcggcctgtgcctctggagcactacctgtttaccggcaactcctccaaaacacagggggagctttttctcttgctggattctagaggggcttttcacacgaaggggtattacgctgcagttgaagcaaagaaagagagaatgtctaagcacgcccaaacattcggagctaaacaacccacacaccaggggggacctgctcaagaccggggagtatacctgagccttttagctagcctccgtacgagggcacagctgccagtagtcgtcttcacatttagccggggaaggtgcgacgagcaggcttcgggattaactagtctggatctcacaaccagcagcgaaaaaagtgaaatccatctgtttctgcagcgctgcttggccagactgaggggcagcgacagacaacttccacaggtattgcatatgagcgaattgctcaaccggggtctgggcgtgcatcactctggcattctcccaattttgaaggagatcgtggagatgctgttcagtcgtgggttggtgaaggtgctttttgcaactgaaaccttcgccatgggagtgaatatgcctgccagaactgtcgtgttcgattccatgaggaaacacgacgggagtacattcagggacttgttgcctggtgaatacgtccagatggcgggtagggccggtcgacgaggtctggatccaacgggtactgtgatcctgttatgcaaaggaagggttcctgaaatggcagacctgcaccggatgatgatggggaagccttcacaattacagtcacaattcagactgacgtataccatgatcctaaacctgctcagagtggatgccctgcgcgttgaagacatgatgaaacgctcctttagcgaattcccatcacggaaggacagcaaagcccacgagcaggcgctggcggagctgactaaacgtttgggtgccttggaggaaccagacatgacaggccagctggtagacctgcctgagtactacagctggggagaggaactcacagagacacagcatatgatccagcgaagaattatggagtcagtgaacggcttgaaatccctgagcgccggtcgcgtggtcgtagtcaagaatcaagaacaccacaacgcactgggggttattctgcaagtgtctagtaactccaccagcagagtgtttaccaccttggtgctgtgtgataagcctctgagccaggatcctcaagacagagggcctgccacagccgaggtgccatatccagacgatctcgtggggtttaagctatttctgcccgagggcccttgcgaccacactgtcgtcaagcttcagcccggtgatatggccgctattaccacgaaggtcctcagggtcaatggcgagaagattcttgaggacttctccaaacgccagcagcctaaattcaagaaggatccacctctggctgctgtgactacagcagtgcaggagctgctacgcctcgcccaggcccatcccgcagggccacctacactggatcccgtcaacgatctgcagctcaaggatatgtctgtcgtagagggtggacttagggcccgaaaactggaggagttaatccagggcgcacaatgcgtgcacagtccacggtttcccgctcagtaccttaaacttcgtgaaaggatgcagatccagaaagaaatggagcgcctgagattcttgctgtcagatcagtcattgctcttgttgccggagtatcatcaaagagtggaggtgctcaggactctgggatatgttgatgaagcaggcaccgtcaagctggcgggacgcgtggcatgtgccatgtcctctcacgaacttctgctcacagagctgatgtttgacaacgccctttccacattaaggcccgaggagatcgcagctctgctatctggccttgtgtgtcagtcccccggtgatgctggggaccagttacccaataccttaaagcaggggattgagagagtaagagccgtggcgaaaaggattggggaggtgcaggtcgcttgcgggctgaatcagaccgtggaggagtttgtaggcgagctgaactttggacttgtggaagtcgtctatgaatgggcccgagggatgcccttctcagagctcgcaggtctatcaggcaccccggaggggctcgtggtacggtgtatccaacgactcgcagaaatgtgccgctctctgcgaggtgcggctcgcctggttggtgagcctgttctgggtgcaaaaatggaaacagccgcaactttattacggagggacattgtgttcgccgcttccctttatactcagtag

SEQ ID NO: 169240 - DNA, 3162 bp, Artificial Sequence
  derived and/or modified sequence
atggattttgcacccaaagactgtcctaccccggctcctggcctcctatcactgtcttgtatgctcgaaccgctcgacctgggtgggggagacgaggacgaaaatgaggcggtaggccagccagggggaccaaggggagacactgtctccgcgagcccctgcagcgcacccttagccagagcctcatccctggaagacctcgtgttgaaggaagctagtaccgccgtatcaacccccgaggcaccagagcctccctctcaggaacagtgggccatccccgttgatgccacatcaccggtgggcgacttttaccgtctgatcccccagcctgcctttcagtgggctttcgagcctgacgttttccaaaagcaggcaattctgcacttagagagacatgactccgtgtttgtcgctgctcatacttccgctggcaagaccgtggtggctgaatacgcgatcgctctggctcaaaaacatatgacccggacgatctatacaagtccaatcaaagcacttagcaatcagaaattccgagattttcgcaacacatttggagatgtgggcctgcttactggcgacgtgcagctgcacccagaggcctcctgcctgataatgactactgaaattctacgctctatgctctacagcggatcagatgtgattagagacctggagtgggtcatcttcgacgaagtgcactatatcaacgacgtggaaaggggagtcgtgtgggaagaagtgctgattatgctgccggatcacgtaagcattatcctactgagcgccactgtcccaaatgccctcgagtttgccgattggattggcagattgaaacggagacagatctatgtgatctcaaccgtgactagacctgtccccctcgagcactatctgttcactgggaacagttctaaaacccagggagagctgttcctcttgcttgactcccggggtgcttttcatacaaaagggtactatgccgctgtagaagccaaaaaagagcgcatgtctaagcatgctcagacctttggggcaaagcagcccactcaccagggaggtcccgcacaggataggggagtgtacctgagcctgctcgcctcactaagaacacgcgctcaactgcccgtagtcgtatttactttctccagaggacggtgtgatgagcaggcttcaggtctcacctcattggatctgaccaccagctctgaaaagagtgaaattcacctcttcttacagaggtgtctggctcggctgcggggatcggacagacagctccctcaggttttgcatatgtccgagctgctgaatcgcggattgggggttcaccatagcggaatcctgccaattttaaaagagattgttgagatgcttttttcacggggactggttaaagttctttttgctactgaaaccttcgcgatgggggttaatatgcccgctaggactgttgtatttgactccatgcggaagcacgacggttcaacttttagggacctactacctggggagtacgtgcagatggcaggcagggcgggacgcagagggttagaccctacaggaactgtgattctgctctgcaaaggcagggtgcctgaaatggcggatttacatagaatgatgatgggcaagccatctcagttgcagagccagttcagactaacttatacaatgatcctgaatctgttaagagtcgatgccttacgtgtcgaggatatgatgaagcgttccttcagtgaatttccttctaggaaagatagtaaggcacatgaacaggccctggctgagctgaccaagcggctgggagcccttgaagagccagacatgactggtcagctcgtggacttgcctgagtactattcttggggcgaggaactcactgagacccaacacatgattcagcgtcgcattatggagtctgttaacggactgaaaagcttgagcgccggacgagtggtggtcgtgaaaaaccaagagcaccacaacgcgctcggcgtcatattacaggtgtctagtaactctacttccagggttttcaccaccctggtcttatgtgataagccacttagccaagatcctcaagacagggggcctgccacagcagaagtcccttaccctgatgaccttgtgggtttcaagctcttcctgcctgaagggccatgtgaccacaccgtggtgaaactgcagcctggagacatggccgctattacgacaaaagtgctacgggtcaacggcgaaaaaattctagaagactttagtaaaagacagcagcctaagttcaaaaaagacccccctctcgctgcagtgaccactgccgtgcaggaactgctccgcctcgcccaagcccatcccgctggccctccgaccctggatccagtcaacgatctgcagcttaaggacatgtctgtggtcgaggggggactccgggcacgtaaattagaagaactgatacagggcgctcaatgcgtacacagccctaggtttcctgcccagtacctaaaactgcgcgagcggatgcagatccaaaaggagatggagcgcctccgctttttactgtccgaccagtccctactgttgctgcccgaataccatcagagggtggaggtcctgcgcactttaggatacgtggatgaggccggaacagtcaagcttgctggtagagtggcatgtgcaatgtcctctcatgaactgcttctgaccgagctaatgttcgataacgccctctcaacgctccgacctgaggagatcgccgctctgctcagcggactcgtctgtcagtcccccggagatgccggagaccagctgcctaataccctcaaacagggcattgaaagagtgcgagctgtcgcaaagaggattggtgaagttcaagtggcctgtggactcaaccagacggtggaagagttcgtcggcgaattgaatttcggcctcgtggaggtggtgtacgagtgggccaggggcatgccatttagcgagctcgctggacttagcggaacaccggaggggttagtggtcaggtgtattcagaggctggcagagatgtgcaggagcttacgcggtgcggcacgcttggtcggtgaacccgttctgggcgctaagatggagactgccgcaacccttctgaggagggacattgtcttcgctgcaagtctttacacccagtag

SEQ ID NO: 169241 - DNA, 3267 bp, Artificial Sequence
  derived and/or modified sequence
atggatgaacccactattaccgatctgaacactagggaagaagctgaagaagaaatcgatttcgagaaggatctgctgaccatccctccaggcttcaagaaaggcatggattttgcccctaaagattgcccaacacccgctcccggactgctctcactgtcctgcctgctcgaacctctggatctcggtgggggtgatgaggatgagaacgaggccgtaggacagcctgggggaccaaggggggatactgtaagtgcatctccatgttcggcacctctcgctagagccagttcactggaagatttggtgctcaaagaagcctctacagccgtgagtactccagaggccccagaacctcctagccaggaacagtgggctattccagtggatgcaacaagcccagtgggtgacttctatcgtcttatcccccagccggctttccagtgggcattcgagcctgacgtcttccaaaagcaagcaatcctgcaccttgagcggcacgacagcgtgtttgtggccgcacacacatccgctgggaagacagtcgtcgccgaatacgctattgccctggcccagaagcacatgactagaacgatctacactagcccaatcaaggcattgtccaatcaaaaattccgggatttccggaacacttttggggacgtcggtcttcttacgggggatgttcagctgcaccccgaggcgagctgcctcataatgacgacagaaatcctaaggtccatgttgtacagtggctcggacgttatacgggatctggagtgggtaatcttcgacgaagtgcactacataaatgatgtggagaggggcgttgtgtgggaagaagtcttgatcatgctcccagatcacgtgagcatcatattactgtccgccacagtgcctaacgcactggaatttgcagattggattggcagactgaagaggcggcagatttacgtgatatccaccgtgacccggcctgtaccactggagcactatttatttacagggaatagtagcaaaacacagggtgagcttttcttgctgctggattctcgcggtgcgttccatactaagggatattacgccgcagttgaggcaaaaaaagagagaatgtcaaagcatgctcaaacattcggagcaaaacaacctacacatcaaggcggtcctgcacaggaccgtggggtgtacttatcactcctggcgagcctccgcacgcgggctcagttgcctgtagtggttttcacattttctcggggaagatgcgacgagcaggctagcggccttacttccctggatctgacaacctcctcagaaaaatccgagatacacctttttctacagcgctgcttagccaggctgaggggttcagacaggcagctaccgcaggtgctgcacatgtccgaattactcaatcgaggtctaggcgtgcaccactcaggcatactgcccattctgaaagaaatcgtcgagatgcttttcagcaggggcctggtcaaagtgctgtttgccactgagacctttgccatgggagtcaacatgccagcaaggactgtggtattcgactcgatgaggaagcacgatggatctacctttcgagatctactgcctggcgagtatgtgcagatggccggtcgcgctgggcgacgcggattggatcccacagggaccgtcatattgctctgtaaagggcgtgttccagaaatggcagacttgcaccggatgatgatgggtaagccatcccagcttcagtcacagttccggttgacctacacaatgattcttaatctgctaagagtggacgctctccgcgtcgaagatatgatgaagcgctccttctctgaatttccaagcaggaaggatagcaaagcccatgagcaggctctcgccgagcttaccaagcgactcggagctttggaagaaccagatatgactggccagctcgtcgacttgccagaatattacagttggggggaggagttgactgaaacccagcatatgatccagcggcgaatcatggagtccgttaacggccttaaatccctctccgccggtcgagtagttgtggttaaaaaccaggagcaccataatgcactgggagtcatactgcaagtgtccagcaacagtacttctcgtgttttcaccacccttgtactttgcgacaaacctttatcccaagacccgcaggacaggggtccagcaaccgctgaagtgccgtatcccgacgacctcgtgggatttaagctgttcttgcccgagggcccttgtgatcacactgttgtgaaactccagccaggagatatggcagctattactaccaaagttctccgtgtcaatggcgagaaaatcctggaggatttttcaaaacgccaacagccgaagttcaagaaagatcccccattggctgccgtgactactgcagtccaagagttgttgaggctggcacaagcccacccagctggtccgcctactttagacccagtgaacgacctgcagctcaaggacatgtctgtggttgagggcggtcttagggcaaggaagttagaggagctaatacagggggctcagtgcgttcactccccccgttttcctgcccaatatcttaagttacgcgagcgcatgcaaattcagaaagagatggagagactacggtttctgctatctgatcaatcactattactgttacccgaataccatcaacgcgtggaggttctcaggacactgggctacgtggacgaagcagggacagtcaagctggccggacgggtggcttgtgcgatgagctcacacgagttactgctcacagaattaatgtttgacaatgccttgtccacgcttagacccgaagagatagctgcgctgctgagcggcctggtgtgtcagtcccccggagatgcaggggatcaacttcccaatacactgaagcagggcatagagagggtcagagctgtggcaaagagaatcggagaagtgcaggtagcatgtggcctcaaccagacggtggaggaatttgttggggagctgaactttggcctggtcgaggttgtgtatgagtgggccaggggtatgccattcagcgagctggccggtctgtcgggaacccccgagggtttagtagttagatgtattcagcggttagccgagatgtgtaggtcattaagaggcgcagcgcgactggtcggagaacccgtattgggggcaaaaatggagacagccgcaacactcctgaggcgcgacattgtgttcgccgcatccctgtatacccagtag

SEQ ID NO: 169242 - DNA, 3162 bp, Artificial Sequence
  derived and/or modified sequence
atggattttgctcccaaggactgtcctacgccggctccaggcctgctctccctgagttgtctcctggaacccctggacttgggtgggggagatgaggacgagaacgaggctgttgggcagcccggaggcccacggggtgatactgtcagcgcgagtccctgctctgctccactcgccagggcgtcctccctcgaggacctggtactcaaggaagcgtccactgcagtctcgacccctgaggcacctgaaccaccttctcaggaacagtgggccattcccgtggacgccacatcccccgtaggggacttctaccgccttattccgcagccagccttccagtgggcctttgaacctgacgtgttccagaagcaggctatactccatctagaaagacatgacagcgtatttgtcgcagctcacacatctgccggtaaaactgtggtcgctgaatacgccatagctctcgctcagaagcatatgacacggacaatctatacgagtccaatcaaggctttgagtaaccaaaagttccgggactttaggaatacttttggagatgtgggcctcctgacaggcgatgtgcagctccaccccgaagcctcctgcctcataatgacaactgagattctgcggagcatgctctatagtggaagcgatgtcatccgagacctggaatgggtcattttcgatgaggtgcactacatcaacgacgtagaacgtggagtagtctgggaagaagtcctgataatgctgccagaccatgtctccatcatccttctgagtgccaccgttcctaatgcgctggagtttgcagactggatcggtcgtctgaagcggcgtcaaatctacgtcatcagcaccgtgaccaggcccgttcctctggaacactacctgttcaccgggaactctagcaagacgcagggggagcttttcctgctgttagacagcagaggagcatttcacacaaaaggttactacgccgctgtcgaggccaagaaagagagaatgtctaaacatgctcaaacgttcggagctaaacagcctactcaccagggtggcccagcacaggatcgaggcgtttacctgagccttctggcctcattaaggacccgtgctcagctgccagtggtggtattcaccttctcgagggggagatgcgatgaacaggcgtcaggactgaccagcctcgacctcacaacttcttcagagaaaagcgagatacacttatttttgcagaggtgcctcgctagactgagaggttcagaccgccagctgcctcaagtgcttcacatgagcgaactcctgaacagaggactgggagtccaccactccggcattctccctatcctgaaggaaatagtcgagatgctgttcagtcgcggactcgtgaaagtgttgttcgcaacggaaaccttcgccatgggcgttaacatgccagcccgtaccgtagtgtttgatagcatgagaaaacatgatgggtctacctttcgcgatctgctgcccggtgagtacgtgcagatggcaggcagggcgggaaggcggggacttgatcccaccggtactgtcattttgttatgtaaaggacgggtaccagaaatggccgatctccatcgtatgatgatgggaaaaccttcccagctgcagagccagtttagactgacatatactatgatccttaacctcctgagggttgatgccctgagagtagaagatatgatgaagcgaagtttctcggagttcccgtcccgaaaggatagtaaggcccatgagcaagcacttgcagagttaaccaagaggcttggtgcactggaagaacctgacatgacgggacagctcgtggacttgcctgagtattattcatggggagaagagctcaccgaaacccaacatatgatacagaggcgcatcatggagtccgttaacggcctcaagagtctgagtgccggaagagttgtcgtcgtgaagaatcaggaacaccataacgctcttggagtgatccttcaggtgagctccaattccacgagtagggtctttacaacactggtcctgtgcgataagccactctcccaagatcctcaggacaggggcccagctaccgctgaggtcccatacccggacgacctcgtgggcttcaaactttttctgcctgagggaccgtgcgaccacacagtagtcaagctccagccgggagacatggcggctatcactactaaggtgctcagagtgaacggcgaaaagatcttagaggatttctctaaacggcagcagcccaagttcaagaaagaccccccactggctgccgtcacaaccgcggtgcaggagctgctgagactggcacaggctcaccccgctggtcccccaaccctggaccctgtgaatgacctacagcttaaagatatgtccgtggttgaggggggattgcgagctaggaagttggaggaattaatccagggggcacagtgcgttcatagccccagattcccggcacagtacctgaaactcagggagcgcatgcagatccagaaagaaatggaacgattgaggtttctgctgagcgaccaatcacttctgttgctgccagaatatcaccaaagggtggaagtgctgcgcaccctggggtatgtggatgaagccggaaccgtcaaacttgcaggcagggtggcctgcgccatgagttcacacgagctgctgctcacagagctcatgttcgacaatgcccttagtacgctgcggccagaagaaatagctgcactgctctccggcttggtctgtcagtcgcctggagacgcgggtgaccagctgcccaacacactaaaacagggcatagagcgcgtacgcgcagtggcaaaaaggatcggcgaggttcaggtggcatgtggtctgaatcagactgtggaagagtttgtgggagagctgaactttggtctcgtggaagttgtgtatgagtgggccaggggtatgcctttcagcgagcttgcaggactctctggtacccccgagggcctggtggtgcgttgtatccagagactggccgaaatgtgccgctctctgcgcggagccgctcggctcgtcggagagccagtgttgggggctaagatggagacagcagcgaccctgctaagaagagatatcgtctttgcagcgagcctgtacacacaatag

SEQ ID NO: 169243 - DNA, 2643 bp, Artificial Sequence
  derived and/or modified sequence
atgatggagactgaacgcttagtcctgcctccccctgatcccttagacctgccccttcgggcagtggaattaggctgcacaggtcattgggaactgttgaatctgccaggtgccccagagtcctcacttccccatgggttgccgccatgcgcccctgacctccagcaggaggctgaacagctgtttctgtcttcaccagcttggctgcctctgcacggcgttgaacattcagctcgaaagtggcaaaggaaaactgacccctggtcactgctggccgtgctgggggctccagttccgtccgatttacaagctcagagacatcctaccacgggccaaattttggggtacaaagaggtgctacttgagcactatctgttcacagggaatagttcaaaaacacagggtgagctctttttactgctggactctcgcggagcttttcacacaaaaggctactatgctgcggtggaggctaagaaggagcgcatgtctaagcacgcccaaacctttggagcaaagcaacctacacaccaaggtggaccagcacaggaccgaggagtctacctaagcctgctggccagtctcagaaccagagctcaactcccagtggtcgtatttacattttcccgcggaaggtgtgatgaacaggcatccgggctaaccagcttggatctcacaaccagtagcgaaaagtctgagatccacctgttcttacagcgctgcctcgctaggctccgaggcagcgacagacagttgccacaggttctccatatgtctgaattgctgaataggggtttgggagttcaccattcgggaatcctcccaatcttgaaggagattgtcgagatgctgttttctaggggcctggtgaaagtgctattcgccacggagacgtttgctatgggagtcaacatgcctgctaggacagtcgtattcgattccatgcggaaacatgacgggtctacctttagagacttgctgcccggagagtacgtccagatggccggacgggctggacggcgaggattagatccaaccggcacggtaattctcctctgtaaaggacgagtgcccgagatggccgatctgcacagaatgatgatgggcaagccgagccaattgcagagtcagttcagattaacttatacaatgattcttaatttactccgcgtggacgcactacgggtagaggacatgatgaagcgttcctttagcgagtttccctcgaggaaggactctaaggctcacgagcaggccctggccgaactcacaaagcgcttgggcgcactggaagaaccagatatgacagggcaactggtggatctgcccgagtactattcatggggcgaagagttaacagagacacaacacatgatccagaggcgaattatggagagcgtgaacgggctaaaaagcctgtcggctggacgcgtagtcgtggtgaaaaatcaagagcatcataatgcgttgggcgtcattctgcaggtttcatctaactcaacaagcagggtcttcactaccctcgtgctgtgcgacaaacctctgagccaggatccccaagatcgcggacctgctacggccgaagtgccatatcccgatgatctggtggggtttaagctgtttcttcctgaaggcccttgtgaccacaccgtggttaagctacagccaggagacatggcagccattacaacaaaagtcttacgggtcaatggggagaagattttggaggatttctccaaacgacagcagccaaagttcaagaaggaccctccactagccgcagtgaccaccgcagtacaggagcttctaagacttgcacaggcacacccagctggcccacccactctagatcctgttaacgatcttcagctgaaggatatgtctgttgtggagggcggtcttagggccagaaagctggaggagctcattcagggggctcagtgcgtacactccccacgcttccccgctcaatacctgaagctgagggagagaatgcagatccaaaaggaaatggaacgcctacgctttctgttgagtgatcagtccctgctccttttgccagaatatcaccagcgcgtggaggtccttcgaaccctcggctacgtggatgaggcgggaactgtgaagctcgccggtagagtggcttgcgctatgtcttctcacgaattactgctgactgagcttatgttcgataatgctctgtccacactccggccagaagagatcgctgcactgctctctgggctagtttgtcagtcccccggagatgctggtgaccagctgccaaacactttgaagcaaggcattgagcgagtgagagcggtggcaaagcggattggggaggtgcaggtggcttgcgggctcaatcagacagtcgaagaattcgtgggcgaattaaatttcgggcttgttgaagtcgtttatgagtgggccagagggatgccattctctgaattggccggtttgtctgggaccccagagggattggtggtgcgttgtatccagcgcctggcagagatgtgtcggagtctcagaggggctgcaaggttggtgggtgagcctgtgctcggcgcaaaaatggaaacggccgctacgttgttacgccgtgatatcgtgtttgcagcaagcttatatacccagtag

SEQ ID NO: 169244 - DNA, 3267 bp, Artificial Sequence
  derived and/or modified sequence
atggatgagcctacaatcaccgatctcaacactagggaagaggccgaagaagagatcgattttgaaaaagatctcctgaccatcccccctgggttcaagaagggtatggatttcgcccctaaagactgcccaacccctgccccaggtctactctcactgtcttgtttgttggagcctttggacttggggggtggcgacgaggatgagaacgaggccgtcgggcagccgggtggacccagaggagacacagttagtgccagcccctgttccgccccattggcccgagcatcgtcactcgaggacctcgtgttgaaggaagcctcaacagctgttagcaccccagaagcccctgaacccccaagccaggagcagtgggctatccccgttgatgcaacctctccagtgggcgacttttatcgacttattcctcagcccgcattccagtgggcttttgagcccgacgtcttccagaaacaggctatcctccacctggaacgacatgactcggttttcgtggccgctcacacctctgcgggtaagaccgtggttgctgaatatgctatcgctcttgctcagaagcacatgacccgcaccatatacactagcccgatcaaggctctgagcaatcagaagttcagagattttcgaaacactttcggcgacgttggcctcctcacaggagatgtgcaactgcaccctgaggcgagctgcctgattatgaccaccgaaatactcaggagtatgctctactcagggtcagatgttatccgcgacttggaatgggtgattttcgacgaggttcattacattaacgatgtggagagaggagttgtgtgggaggaggttcttattatgctgcccgaccacgtctcaataatcctgctgagcgccacagttccaaatgctttggaattcgcggactggattggaaggcttaagcgcaggcagatctacgtcatttcaactgtgactagaccagtgcccctggaacattatctttttacgggtaatagctccaagacccaaggggagttattcctgctgctggacagcaggggcgcattccatactaaaggatactacgccgcagtggaggctaagaaagagcggatgagcaaacacgcccagactttcggagcgaagcagccgacacatcaaggcggtccagcccaggacagaggtgtgtatttgagcctgctcgcgtccctcaggacgagagcccagttacctgttgtcgtgttcaccttctcgcgaggtaggtgcgatgagcaagcttctgggctgacatctctcgacctgactacatccagtgaaaaatctgagattcacttatttctgcaacggtgcctggcaagactccgcggatctgaccgtcagcttccgcaagtgctccacatgagcgaactactgaaccggggactgggggttcatcacagtggcatcctgcctattttgaaggagattgtcgagatgcttttctcccgcggattggtgaaggtgcttttcgccactgagacattcgcaatgggcgtcaacatgcctgcacgcactgtggtcttcgatagtatgaggaagcatgacggaagtacatttcgcgatttactacccggtgagtacgtgcagatggccggtcgcgctggaaggcgaggcctggatcccacaggtactgtcatacttttgtgcaagggccgagtgcccgaaatggccgatctgcaccggatgatgatgggaaaacctagccagctgcagagccagtttaggctgacttacacgatgatactgaatttgctgcgggtggatgcgttgagagtcgaggatatgatgaaacgttcttttagcgagttcccctccaggaaagacagcaaagctcatgaacaggcactggccgagttgaccaagcgactgggggctttagaggaaccagacatgaccgggcagctggtggatttgccagagtactactcctggggagaggaactgaccgagacccagcatatgatacagcggcgaatcatggaatccgtaaatggcctaaagtccctgagtgcgggtcgggtcgtggttgtcaagaatcaggagcatcacaacgctctgggcgtcatcctgcaggtttctagcaactcgacctcaagggtgttcacaacactcgtactctgtgataagcccctctctcaggatccccaagataggggcccagccaccgccgaggtgccatatcccgacgacctcgtcggtttcaaactgttccttcctgaaggaccttgcgatcataccgtcgttaagctgcaaccgggagacatggccgctatcactacgaaggttttaagagtgaacggcgagaagatactggaggacttttccaagcgacaacaacctaaattcaaaaaagatccaccgttagccgcagtgactacagctgtgcaagagttactgagactggcccaggcccaccccgctggcccacctaccctggaccctgtgaatgaccttcaactgaaggacatgtctgtcgtggaaggcggtcttcgagcccgaaaacttgaggagttgatacaaggtgctcagtgcgttcactccccgagattcccagctcaatatctgaagttgagagaacggatgcagatccaaaaagagatggagagactcaggtttctcctcagcgaccagagtttattgctgctcccagaataccaccaacgtgtagaagtactcagaacactgggctacgtggacgaggccggaaccgttaagctggcgggtagagtagcctgtgcaatgtcttctcatgagcttttgctgactgagctgatgtttgataacgcactatccacgttgcggccagaagagatcgccgctttgttgtccggtctggtgtgtcagagcccgggagacgccggagatcagctgccaaacaccctgaaacaaggaatcgagcgggtgagggccgtagcgaaacggatcggagaggttcaagtggcttgtgggctgaaccagactgttgaggagtttgtgggcgagctcaattttgggttggtggaagttgtgtacgagtgggctagaggtatgcccttctccgaactggctggcctttcgggaaccccagaaggtttggtggtcaggtgtatacagaggctagctgagatgtgcaggtctttaaggggggcagcacgattggttggagagcccgtcttgggagcaaagatggaaacagcggctaccctgctgaggagagatatcgtcttcgctgcgagcttatatacacagtag

SEQ ID NO: 169245 - DNA, 2643 bp, Artificial Sequence
  derived and/or modified sequence
atgatggaaaccgaacgccttgtattaccaccccctgacccattagacctgcccctgagagccgttgagttaggctgcactgggcactgggagctcttgaacctgcctggagctcctgaatcttctttgccacatgggctgcctccatgtgcgcctgacctccagcaggaagccgagcagctctttctaagcagccctgcatggctccctctacacggtgttgagcactccgcaaggaagtggcaaagaaaaacagacccctggtctctgctagccgtactgggagcccctgtgcctagcgacctccaggctcagcgacatccgacaacgggccagatcctgggttataaggaagtgttgttggagcactacctctttaccggtaactccagtaagactcaaggtgaattgttcctcctgctggatagccgaggtgcctttcataccaagggttactatgctgcggtggaggcgaaaaaagaacgcatgagtaaacacgcgcagacatttggcgctaagcagcctacacatcagggtggtcccgctcaggatcgaggagtgtatctctccttattggccagcctgcggactagggcgcagttgccagtcgtggtctttacgttttcccgaggtcggtgtgacgaacaggcttcagggcttactagtctggacttaacaacaagcagcgagaagtcggaaattcatcttttcttgcagcggtgcttagcccgactccgcggatctgaccgccagctccctcaagttctgcacatgtcagaacttcttaatagaggcctcggggtgcatcacagcggcatccttcccattttgaaggagattgtcgagatgcttttttcaagagggttggtgaaggtcctcttcgctacggagaccttcgcaatgggcgtaaatatgcccgcacgaaccgtggtgtttgattccatgagaaagcacgacggttccacctttcgcgacctgcttcccggtgagtatgtccagatggccggtagggcagggaggagaggtcttgatcctactggcaccgtgatcttgttgtgtaagggcagggtgcctgaaatggccgatctgcaccgaatgatgatgggcaaacccagccagctgcagagccaattcagactcacttacacaatgattctgaatctactcagggtggatgccttgagagtggaggatatgatgaagaggtccttctctgaattcccatcaaggaaagacagcaaggcacatgagcaggcccttgcagagctcacaaagcggttgggagccctggaggagcctgacatgacaggtcagttggtggacctccccgaatattattcatggggcgaggaactgactgagactcagcatatgatacagcggaggattatggagagcgtaaatggtctcaagtctctttcagcgggacgcgttgttgtggtgaagaatcaggagcaccacaacgctttgggggtgatccttcaggtgtccagcaattccacatctcgcgtatttactactctggtgctctgcgacaagccacttagccaagatccccaggacagggggccagccactgcagaagtaccttacccagacgatctggtgggatttaagttgttcttgcccgagggtccctgcgaccacacagttgttaagttacagcccggagacatggcggctataaccacgaaggtgttacgagtaaacggggagaagatcctggaggacttcagtaaacgccagcagccgaaatttaagaaggacccacctcttgctgctgtcacaacggccgtccaggaactcctgcgcttagcacaagcccaccccgcaggtcctccaacgttagacccagtgaatgacctccagttgaaagatatgtcagtcgtggagggcggtctgagggctagaaagctagaggagctcatccagggagcccagtgtgtccactcccctaggttcccagcacagtatctgaagctccgagaacggatgcaaatccagaaggagatggagagattacgtttcttgctgtccgaccagagccttttactccttccagagtaccatcagcgtgtagaggtattacgtaccctgggctatgttgacgaagcaggaactgtcaagttagcaggacgtgtggcctgcgccatgagctcgcatgaactcctgctcactgaactgatgttcgataacgccctgtcgactctccgcccagaagaaatcgccgctctgttgtctgggctagtgtgtcaatcacctggagatgcgggagatcagctccccaataccctcaaacagggtatcgagcgggtccgtgccgtcgcaaagcgcatcggtgaggtgcaagtggcgtgtggcttgaatcagacagttgaagagttcgtaggggagttgaatttcggcttggtcgaggttgtttatgaatgggccaggggtatgccattcagcgagttagccggattgtccggcacccctgaaggactggtggtgaggtgtattcagcggctcgccgaaatgtgccgcagcctccgaggtgctgctcgtcttgtgggcgagcctgtgctcggagccaagatggagaccgcagcaaccctgctgcgcagagacatcgtgttcgctgcctcactctacactcagtag

SEQ ID NO: 169246 - DNA, 2643 bp, Artificial Sequence
  derived and/or modified sequence
atgatggagactgagaggctggtcctccctcccccagatccattggatctcccactgcgagcagtggagttgggatgtaccgggcattgggagctgctgaacctccctggggctcccgaaagttcactgcctcacggtttgcctccttgcgcgcctgacctgcagcaggaggcagagcagctatttctcagctcacctgcatggctacctcttcatggcgtggagcactccgctcggaagtggcagagaaagaccgatccgtggtcactcctggccgtccttggagcaccggttccttcggacctgcaagcacagcgtcacccaaccacagggcagatcctcggatataaagaagtcctcttggagcattacctctttaccgggaacagctccaagacccaaggagagctctttctgcttctggattcgagaggagcttttcacactaaaggatattacgctgccgtggaggctaagaaggagcgtatgagtaaacatgcccagaccttcggcgctaagcagcctacccaccaggggggacctgcacaggacagaggcgtgtacctctctcttctcgcaagcctcagaacacgggcacagctgcctgtggtcgttttcacctttagcagggggcgttgtgatgaacaggcctccggtctaacgtcccttgacttaactaccagtagcgagaagtcagaaatccacctgtttttacagaggtgcctcgcacgcctgcggggtagcgacaggcagctcccccaagttttgcacatgtccgagctgctgaacagaggacttggggttcaccactcaggtatcctgcccatcctgaaagagatcgtggaaatgctgttttccagagggctcgtgaaagtactgtttgccactgagacttttgccatgggcgttaacatgcccgctcggactgtcgtcttcgattcgatgaggaagcacgacggatctaccttccgcgatctgcttccgggagagtatgtgcagatggcaggaagagccggaaggagaggactcgaccctaccggaaccgtgatcctcctgtgcaaaggcagggtccccgaaatggctgaccttcaccgcatgatgatggggaagccctcgcaattgcagtcgcagttccgcctaacgtacactatgatactgaacctgctcagagtggacgcccttcgcgtcgaagatatgatgaaacgctccttctctgagtttcctagccgtaaagactcaaaagcccacgagcaagcacttgctgagctgaccaaacgccttggagcactggaggagccagacatgacagggcagctggtcgacctgcccgaatactattcatggggcgaggagctgactgagacccagcacatgatccaacgtcgaatcatggaatcagtgaatggcctgaaaagcctctccgccggtcgcgtcgtggtggtcaaaaatcaagagcaccataacgccctgggggtgatcttgcaggtgagtagtaacagcacctcgcgtgtttttacaacactggtgctgtgtgacaagcctttgtcccaggacccacaggatagaggacccgcaaccgccgaggtcccctacccagacgacctcgttggatttaaactgttcctccctgagggcccttgtgaccacacagtggtgaaactccagccaggggatatggccgctataacaaccaaagtgctcagagtcaacggcgaaaagattttggaggacttcagcaaacgacagcaacctaaattcaagaaggatcccccattggccgctgttacaacagccgtccaggagctattgcggctcgcccaggcacacccagccggacctcctacactggaccctgtcaacgacctccagctcaaagacatgagtgtggtggaagggggtctccgggctcgcaagcttgaagagttaattcagggcgcacaatgcgtgcattctccgagattccccgcacaatatctcaaactgagggaaagaatgcagatccagaaagaaatggagaggctccggttcctcttaagtgaccaaagtctcctgctcttgccggaatatcaccagcgggtggaagtactcagaaccctcgggtacgttgacgaagctggcacagtgaagcttgccggtagggtagcgtgcgccatgtccagccatgaacttctcctgaccgaattgatgttcgacaacgcactctctacactgagacctgaagaaatcgcggctcttctttctggtctcgtgtgtcagtcccccggtgacgcaggcgatcagctcccaaatacattgaagcaaggaattgagcgagttagggccgtcgctaagcggattggcgaggttcaggtggcgtgcgggctgaatcagaccgtggaagaattcgttggggaactcaacttcggtctcgtggaggtggtgtatgaatgggcccgaggcatgcccttttctgaattagccggactgagtggcacacctgaagggctggtggtgagatgcattcagagactcgccgaaatgtgccggtctctgcgaggggctgctcggctggtaggagaaccagttctcggagccaaaatggagactgcggctaccctactgcgacgggatatcgtgtttgctgcctctctgtatacacagtag

SEQ ID NO: 169247 - DNA, 2643 bp, Artificial Sequence
  derived and/or modified sequence
atgatggagactgaaaggctggtattgcccccacctgatcctcttgacctgcctttgagggcagtcgaactgggttgtaccggtcactgggagcttctaaacctgcctggcgctcccgagagcagcctcccacatggtttgccgccttgtgcccctgacctgcagcaggaggcagaacagttgtttctgagctcacctgcatggctccctctccacggagtggagcactccgctaggaaatggcaaagaaagacagacccctggtccttgctggcggtactcggggcacccgtcccctccgacttgcaggcccagaggcatcccaccaccggacaaattctcggttacaaagaagtcctgctggagcattacctgtttactggcaactctagtaaaacccagggagagctgtttctcttactggacagtcggggagccttccatacgaaggggtactacgctgcagtcgaggcaaagaaagagcggatgtcaaaacatgcccaaacttttggggcaaaacaacctacccaccagggcggtccagcccaggacaggggcgtctacctatcccttttggcaagtcttagaaccagggcccagctgcccgtggttgtgtttaccttctctcggggacgctgcgacgaacaggcctccggcctgacctctctggatcttacaacatcgtctgaaaagtcagaaattcatcttttcctccaacggtgtctcgcaagactcagaggaagcgaccgccagttgcctcaggtgctccacatgagtgagctgttgaatagagggctaggggtgcatcactctggtatcctaccgattctcaaggagatcgtggagatgttattctctcggggtctcgtaaaagtgctttttgcaaccgaaacgttcgccatgggcgtgaacatgcctgctaggacagtggtctttgatagtatgcgcaaacacgatggatccacattccgcgatctgcttcctggtgagtatgttcaaatggctgggagggctggacgacggggtctggacccgacgggaacagttattcttctctgcaaagggcgtgtgcctgaaatggccgacctccacaggatgatgatgggaaagccttcccagttacagtctcaattccggttgacatatactatgatacttaatctgctgcgcgtggatgccctgcgtgtggaggatatgatgaagagatcattttcagaattcccatctaggaaggacagtaaggcgcacgaacaggccctggccgagcttactaagcgattgggggcacttgaggagccggacatgacaggccagctggttgatttgccggaatactattcttggggagaggagttgaccgagacacaacacatgatacagaggagaatcatggaatcagtcaacggcttgaagagcctgagcgctgggagagtcgtggtagtcaagaatcaagagcatcacaacgcgctgggagtgatcctccaagtaagttcaaacagcacatctagggtcttcacgacattagtgctgtgtgataagcccctttcccaggacccacaggaccgcggacctgccactgctgaagtcccttaccctgacgatttggtggggtttaaactcttcctgccagaaggaccctgcgatcacaccgttgtgaaattgcagccaggagacatggctgccatcactactaaagtgctgcgagttaacggcgagaagatacttgaggacttttccaaacggcagcagccaaagtttaaaaaggaccctcccctggccgctgtcacaacagcagtccaggagcttctcagattggcacaagcgcacccggcagggccacccaccctagaccccgtgaacgacttgcagttgaaagacatgtccgttgtcgagggtgggttaagagcgcgtaaactggaggagctgattcagggggctcagtgcgtacacagtccaaggtttccagcgcagtacctcaagctgcgagaacgtatgcagatccaaaaggagatggagagactacggtttctgttgagcgatcaaagcctgcttttgctgcctgagtatcaccagcgagttgaggtcttgcgaactctcgggtacgtcgacgaggccggtacggtaaaactggcaggacgcgtagcttgcgcaatgagctctcatgaactgttgttgactgagttaatgttcgataatgcattgtccacgttacggcctgaagaaattgctgccttgctcagtggtttggtatgtcagtctcccggagatgcgggagaccagctacccaacacactgaagcagggcatagaaagggtgcgtgccgtggctaagcggattggagaagtgcaggtagcctgcggattgaatcagacagtagaggaattcgtcggagaattaaattttgggctcgtagaagtggtgtatgagtgggctcgtggtatgcctttttcagagctggctggcctgtctggcacgcccgagggattggtggttaggtgcatccagagactggctgagatgtgtaggtcgctcagaggggctgccagactggtgggagagcccgtgctaggagcgaagatggaaaccgccgcaacacttctgcgacgggatatcgtattcgcggcatccctgtatactcagtag

SEQ ID NO: 169248 - DNA, 3267 bp, Artificial Sequence
  derived and/or modified sequence
atggatgagcccacaattacagacttgaatactagggaagaggccgaggaggagatcgactttgaaaaagacctgttgacgatccctccagggtttaagaagggcatggattttgctccgaaggactgtccgacccccgcaccgggactgctgtcgctgtcatgcctgctcgagccactcgatctgggtggtggcgatgaggacgaaaacgaagctgtcggccagccagggggaccccgaggtgacacagtctccgcctctccttgtagtgctcctctggccagggcaagcagcctcgaagacctggttctcaaggaagctagcacagcggtctccaccccagaagctcctgagcctcctagccaggagcagtgggccatcccagtggatgctacatcccccgttggagacttctaccgactgatcccacagccagcattccagtgggctttcgaacctgacgtcttccaaaagcaagcaatcctccatctggagcggcacgactcagttttcgtggctgcccatacctccgccggtaagaccgtggtggccgaatatgcaatagccctcgcccagaagcatatgactaggaccatctatacctcccccattaaggctctgagtaaccagaagtttcgggatttccgaaatacttttggggacgtagggttgctaaccggcgatgtccagctacatcctgaagcctcttgtctgattatgacgaccgagatcctacgtagcatgttgtattccggctcagacgtaattcgggatcttgaatgggtcatattcgatgaggtgcactatattaacgatgtggagcgtggagtcgtgtgggaagaggttctcatcatgctgcccgaccatgtcagtattatcttactgtcagcgaccgtgccaaatgccttggagtttgcggactggattggcagactaaaaaggcggcaaatctacgtgatttcgaccgtaaccaggcctgtgcctttagaacactatctgtttaccggaaactcatcgaaaacccaaggagagttatttctgctgttggatagccgcggagcatttcacacgaagggctattatgcagctgtggaggcaaaaaaagagagaatgtctaaacacgcccagacctttggcgctaagcagcccacacaccagggcggacccgcacaggacagaggggtctacctgtcactgctcgcttcactacgtaccagggcccagctgccggtagtggtgttcacttttagtagaggtagatgcgacgaacaggcctctgggctcacctctctggacttgactacaagctccgagaaatccgagatccacctgttcctccagcgctgcctggcacgcctgcgcggttctgatagacagctgccacaggtactccacatgtctgaactcttgaaccgcggactgggagttcaccactcagggattcttcctatcctcaaagaaattgttgaaatgctctttagcagaggcctggtcaaagtcctgttcgctacagagacttttgcgatgggggtcaacatgccagcccgaacggtggtatttgatagcatgagaaaacatgacggatctaccttccgggatttgctccccggtgagtacgttcagatggccggacgggctggcagaaggggcttggatccaacaggtactgtgatacttctctgtaagggaagggtaccagagatggccgaccttcacagaatgatgatgggcaagccatcccagttgcaatctcagttccgcctcacctacactatgattctcaatctgttaagggtggacgcactcagagtggaggacatgatgaaacgctctttctccgaattccctagcagaaaggactcaaaggcacacgaacaggccctggcagagcttacgaagcgcctgggcgctctggaagaacctgacatgaccgggcagctggtcgatctgccagagtactactcgtggggggaagaactgactgagacccaacacatgatccagcgcaggattatggagagcgtcaacggactcaaatccctgtcggcagggagggtggtagtggttaaaaatcaagaacaccataacgctctcggcgtcattctgcaagtttcttcaaattccacaagccgtgtttttacaacacttgtgctatgcgacaagcctctgtcacaggacccacaagaccgcggacctgcgacagccgaggtgccttaccctgacgatctggtgggattcaaactcttcttgcccgagggaccatgtgaccacactgtcgtgaaactgcagcccggagatatggccgcaattacaacaaaggttttgcgggtcaacggagaaaagatactggaggatttctccaagcgacagcaaccaaagttcaaaaaggacccgccactggccgctgtgaccacagctgtccaggagctactcagactggcacaggctcatcctgctggacctcccacattagacccagtgaacgatcttcagcttaaggacatgtccgttgtcgaggggggactgagggcaaggaagctcgaagagctgattcaaggcgctcagtgcgttcattcacccaggttccccgcacagtatctaaaactgcgcgagcggatgcaaatacagaaagagatggagcgccttcggtttcttctgtctgatcagagtctactgttactgcctgaataccaccagagagtcgaagttcttagaaccctgggttacgtggacgaggcagggacagtaaaacttgctggacgcgtggcctgcgccatgagttcccatgagttgcttctgacagaactgatgttcgacaatgccttgagtacactgagaccagaggaaatcgcggctttactgtcaggactagtgtgccagtctccaggcgacgccggagatcaactgcctaatacactgaagcaagggattgaacgtgttagggcggtcgcaaaaagaatcggggaggtccaagtcgcttgtggcttgaatcagacagtggaggaattcgtgggcgagctgaacttcggcctggtcgaggtggtttacgagtgggctcgtggcatgccgttctcagaactggcaggcctgagcggcactccggaagggctggtagtcagatgtatccagcgtctggccgaaatgtgtcggtccctgaggggcgcagccaggctagttggagagcccgtgttaggagcaaagatggagacggccgctacactcctaaggagggacattgtgtttgccgcttccctctacacccagtag

SEQ ID NO: 169249 - DNA, 3267 bp, Artificial Sequence
  derived and/or modified sequence
atggacgaaccaaccatcactgacctcaatacccgggaggaggctgaggaagagattgactttgaaaaagatctgctgacaatcccccctggattcaagaaggggatggattttgcaccaaaagactgccccacccccgctccagggctactgtccctcagttgtttacttgaacctttggatcttggaggtggcgatgaagatgaaaatgaagccgtcggccagcccggagggccaaggggcgataccgtgtcagcttctccttgctccgcacccctggccagggccagttccctcgaggacctcgtgctgaaagaggccagtactgcagtgagcacgcccgaggcgcctgaacccccttcccaggaacaatgggcaataccagtggacgcaacctcgcctgtcggagacttttaccgattaataccccagcccgcattccagtgggccttcgaacctgacgtctttcagaaacaagctatcctgcacctggaaagacacgattcagtgtttgtggctgctcacacctctgctggcaagacagtcgtcgctgaatacgccatcgccctggcccagaagcatatgacccgcaccatctacacatcaccaattaaagctctgagtaatcaaaagtttcgggactttagaaacacctttggagacgtaggtttgctgacaggggacgtgcaactgcaccccgaagcctcctgtctgattatgaccaccgaaatactacgctctatgctgtatagtggttctgacgtgatacgggacctcgagtgggttatcttcgacgaagtgcattacatcaacgatgtggagcgcggtgtcgtgtgggaggaggtactgattatgctccctgatcacgtgagcattatacttctcagcgccaccgtacccaatgcgctggaattcgcagattggatcgggcgtctgaaacggaggcagatctacgtgatctcgaccgtcacccgccctgtcccactcgaacattacctgtttacggggaattcatccaaaacccaaggggagctctttttgcttttggactctagaggcgctttccataccaagggctactatgctgccgtagaggccaagaaggagcgcatgagcaagcacgcgcagacattcggcgcaaaacaaccaacgcaccaagggggtcccgcacaggacagaggagtgtatctttcactattagcttctctccgtacccgcgcacagctgcctgtcgtggtgttcacattctcaagaggacggtgtgacgaacaagcatccggcctgacttctctggatctgacaacctcctcagaaaagtcagagatccatctgttcctgcagagatgtctggcgaggcttcgaggaagcgaccgccagctgccacaggtactacatatgtccgagctgctcaatcgcggactgggcgttcatcattctggcattctgccaatcctaaaagagatcgtcgaaatgctcttctcccggggactcgtgaaggttctctttgcgaccgaaacatttgcaatgggggtgaatatgcccgctcgaacagtggttttcgactctatgcgaaagcatgatggcagtaccttcagagacctgctccctggtgaatacgtgcagatggccggaagagctggacgccgtggcctggatcccaccggcacagttattttactgtgtaagggtcgggttccagaaatggccgacctccacagaatgatgatggggaagccaagccagttacagtcccaattcagactgacatacacgatgattctcaacctcctccgagtggacgccctcagagtggaggacatgatgaagcggtcattcagtgaattcccgtcaaggaaggacagcaaggcgcacgaacaggcgcttgctgagctcaccaaaaggcttggtgcacttgaggaacccgacatgactgggcagctggttgacttgcccgaatactatagttggggagaggagctcacagagacccaacacatgatccaacgcaggattatggagtcagtcaacggcctgaaatccctgtccgccggacgggttgtcgtcgtcaaaaatcaagagcaccacaacgcattgggcgtgatactgcaggtcagcagcaattcgacatcccgagtgtttacaaccctcgtgctgtgtgataaaccactttctcaggacccacaggatcgaggccctgccactgccgaagttccataccctgacgacttggttggctttaagctttttttgcctgagggcccatgcgatcatacagtggtcaagctgcagcctggcgacatggccgcaattaccaccaaggtcctcagggtgaatggcgagaagatactcgaagatttttcaaagcggcagcagccaaagttcaaaaaggacccccctctagctgccgtgacgactgctgtgcaggagctgcttcggctagcccaggctcaccccgcagggccacccaccctcgaccctgtgaacgatctgcagctgaaagacatgagtgttgtggagggtggactgagagcgcgaaagctggaggaattaatccaaggagcccagtgcgtgcactctccacgctttccagcccagtatctcaagctgcgcgagcggatgcagatacaaaaagagatggaaaggttgcgatttttgctttcagatcagagtctgttactgctgcctgagtaccatcagcgcgtcgaggttctccgtacgctgggatatgtcgatgaggccggaacagtcaaactggctggtagggtagcatgcgccatgtctagccatgaattgctactgaccgaacttatgttcgacaacgccttatcgactctccggccagaggagatcgccgctttgttaagtggtttagtctgtcagtcccctggcgatgctggcgatcaactgccaaatacactgaagcaggggattgagcgggtccgggctgtcgccaaacggatcggagaagtgcaggttgcctgtggactcaaccagacagtcgaggaattcgttggcgagctcaactttggactggtagaggttgtttacgaatgggccagagggatgccattcagcgagctggccggactgtccgggactccggaaggcctggtagtgcgttgtatccagcgattagccgagatgtgccggtccctaagaggcgctgccaggctggtaggcgagcctgtgctgggcgctaagatggagacagcggctaccctactgaggagggatatagtgttcgccgcatctctctacacccaatag

SEQ ID NO: 169250 - DNA, 3267 bp, Artificial Sequence
  derived and/or modified sequence
atggacgaacctacaatcacagacttgaacacacgggaggaagctgaggaagagatcgatttcgagaaagacctcctgaccattccacctggattcaaaaagggaatggactttgcacctaaagactgtcctactcccgctcccggactgctatctctttcgtgcatgctcgagcccttggatctcggtggaggggatgaagacgagaacgaggctgtgggccagccgggaggcccaaggggagataccgtgtctgcatccccatgcagcgcccctctggccagggcctcatccctggaagacctcgttctgaaagaggcatccaccgctgtgtcaacacctgaagcaccagagcccccatctcaggaacaatgggccatcccggtagacgcaacgtcaccagtgggtgatttctacaggctcattccacagcccgctttccaatgggcttttgagccagacgtcttccagaaacaggccatcctgcacttggaacggcacgactccgtcttcgtggctgctcatacttccgccggaaagactgttgtagccgagtatgctattgccctcgcccaaaagcatatgacccggaccatctacaccagtcctattaaggcactgtccaaccagaaatttcgcgactttcggaacaccttcggggacgtgggccttcttactggggacgtgcagcttcaccccgaggcatcttgcctgattatgactaccgagattttgaggtctatgttgtattccggatcagacgtaatccgcgacctggagtgggtgatcttcgacgaggtgcattatataaatgatgtggaacggggagtagtgtgggaagaagtactgattatgctccctgatcacgtgtccataatcctgctatcagccacagtgccaaatgccttggaattcgccgattggattggcagactcaagcgcagacaaatatatgtgatttccacggtgacccgaccggtgccgctcgaacactacctctttacaggcaactcttctaagactcagggggaactctttctgctgctcgactctagaggggctttccatacaaaagggtactacgccgcagtggaagcaaaaaaagaacgtatgtcaaagcatgctcagactttcggagcaaagcagcctacgcaccagggtggaccggcacaggacagaggagtctatttgagcctgttagctagcctgcgcacacgggctcagctccccgtcgtcgtgttcacctttagccggggacggtgcgatgaacaggccagcgggctcacgtccctagatttgaccacctcatcagagaagagtgagattcatctgtttctacaaagatgtctggcaaggctgcggggatccgatcgtcaactcccacaggtactgcacatgagtgagctcctcaaccggggtctgggtgttcaccacagcggcatcctacccatcctgaaagagatagtggagatgctgttcagtaggggattagtgaaagttctctttgctactgaaacgtttgcgatgggtgtcaatatgcccgctcgaacggttgtgttcgatagtatgcgcaagcacgacggatctacattccgagacctactgcctggtgaatacgtgcagatggccggaagagccggacgtcggggtcttgaccctaccgggaccgtaatcttgttgtgtaaaggccgtgttcccgagatggccgacctacatcgcatgatgatgggcaaaccgtcccagctacagagccagttccgcctgacttacaccatgatcttaaacctgctccgggttgacgcactgcgggtggaagatatgatgaagcgatctttctcagaatttccctctcggaaagattctaaagcccatgaacaggccctggccgaactgaccaaacgattgggggcactcgaagagccagatatgacaggacagcttgttgatctgccagagtactactcttggggggaagaactaacggaaacacagcacatgatccaaagacggattatggagtctgtaaatggccttaagtccttgtccgcaggtagagtcgtcgtagtgaagaatcaagaacatcataacgcgctgggagttatactccaagtctccagtaattccacctctcgagtgttcacaaccttagtattgtgcgacaaaccgctgagtcaggatccgcaggatcgcggacccgctacggctgaggttccatatcccgatgatttggtcgggttcaaactgtttctcccagagggtccatgtgaccacacagtcgtcaaactgcagcccggtgacatggccgcaattactacaaaagttcttcgcgttaacggagaaaaaatccttgaggacttcagtaaaagacaacagccaaaattcaaaaaggaccccccactggccgctgtgaccacagccgtgcaggagctactgagattagcccaggcccaccccgcaggaccccctactctggatcctgtcaacgatttgcagctaaaggatatgtcggtggtcgagggcggtctacgcgctagaaagctggaggagttgatccagggtgctcaatgcgtccatagccccagatttccggcacaatatctgaaactgcgcgaacggatgcagatccagaaagaaatggagagacttcggtttctcctttcagaccagtcattactccttctcccagaataccatcagagagtggaggtgctgcggacgttaggatacgtggacgaagccggaaccgtcaagctcgcagggagggtggcttgtgccatgtcctcacatgagcttttgctgactgagctcatgtttgacaatgccctgagcacattacgtccagaagagattgctgcccttctgtccggcctcgtgtgtcagtctcccggtgacgccggagaccagctgcccaatactttaaaacaaggtatagagcgtgtccgggctgttgcaaaacgaataggagaggttcaagttgcatgcgggttgaaccaaacggtcgaggagttcgttggcgaactgaatttcggattagtggaagtggtatatgagtgggcccgagggatgcctttctcggaattggccggtctctcagggacaccagagggcctggttgttcgctgcattcaacgactagccgagatgtgtcgatcactccggggagccgcacgcctggtgggggagcccgtgctgggagctaagatggaaactgccgcaaccctcttaaggagggatatcgtatttgcagcctctctctatacccagtag

SEQ ID NO: 169251 - DNA, 2643 bp, Artificial Sequence
  derived and/or modified sequence
atgatggaaaccgaaaggcttgtactccctccaccggatcctctggatcttcctttgcgggcagtcgagctcggttgtacaggccattgggagctcctgaatttacccggtgctccagaatcatcactcccccacggattacccccttgtgcacccgacctgcagcaggaggctgagcagctgtttctgagttcccccgcatggctgccactgcacggcgtcgagcactctgcacggaagtggcagcgaaagaccgatccatggagcctgttggctgtcttaggagcccctgtaccttcggatctgcaagcccagcgtcatccaaccacgggccagatactcgggtacaaagaggtgctgttagagcactacctgttcaccggcaattccagcaagacgcagggcgaactctttctccttttggattctaggggagctttccatacaaaaggttactatgcggctgtcgaagcaaagaaagagcgcatgtccaagcacgcccaaacattcggcgcaaaacagcccacgcatcaggggggtcctgctcaggaccgaggcgtgtatttgagtctgctggcgagcctgagaaccagggcacagttgcctgtggtggtgttcactttttcaagggggaggtgcgacgagcaggcttccggattaacctcccttgacctgaccacatccagtgaaaagagcgaaattcatctttttttgcagcgatgcctcgcgaggctcaggggcagcgaccggcagctgccacaagtcctccacatgtcggagctgctaaacagaggccttggagtgcaccatagcggaatattgcccattctcaaagaaatcgtcgaaatgttgttttctcgaggtctggtgaaagtcctgtttgccaccgaaactttcgccatgggggtgaacatgccagcacgcactgtcgtgttcgacagcatgcggaagcatgatggctctactttcagggatctacttcctggagagtatgtgcagatggctggtcgcgcaggacggagaggactggacccaaccggtacagtgattctcctttgcaagggtcgtgtgccagaaatggcagatttgcatcgaatgatgatgggcaagccctcccagctgcagagccaattccggttaacgtataccatgatactgaacctgctgagggtggacgctctgagagttgaggacatgatgaaacggagcttctcggagttccctagccggaaggactctaaggctcacgagcaagcactggctgagttgaccaagcgccttggtgcactggaggagcccgacatgacggggcaactggtggacctgcccgaatactacagctggggcgaggaactgactgaaacccagcacatgatccagcgcaggatcatggaaagcgtcaatggtctgaagtccctgtccgccggaagagtggtcgtggttaagaaccaggagcaccataatgcactgggtgtgatcctgcaagtgtcctctaactcaacatcacgtgtgttcaccacccttgtcctgtgcgacaaacccctatcccaggatccacaggatcgcggaccggctactgcagaggttccataccctgacgatctggttggattcaaactgttcctccccgagggcccatgtgatcacactgtagtcaaactccagcccggagacatggctgccatcaccactaaggtcttaagagtcaacggggaaaaaattctcgaagatttcagcaaaaggcagcagccaaagttcaaaaaagaccctccactcgctgctgtgactaccgcagtgcaggagctgctacgtttagcgcaggcacacccagccggaccgcctacgttagatcccgtcaatgatctacaactcaaggatatgagtgtggtcgaagggggacttagggctcgaaagcttgaggaactgatccagggcgcacagtgcgtccactcgcctcggtttcctgcgcaatatttgaaactgcgggaaaggatgcagatacagaaggagatggagaggttgcggtttctgttgtccgaccaaagcctgttgctgcttcccgagtatcaccaacgggtcgaagtgctgagaacacttggatatgttgatgaggctggcaccgtgaaactcgccggacgggttgcctgtgctatgagcagccacgaactgctgctcactgaattaatgtttgacaatgctctgtctacgctgaggcccgaggagattgccgcactcctgagcggcttagtgtgccaaagccccggagatgccggtgaccagctccctaatacccttaagcagggcattgagagagtgcgggctgttgcaaagcgaattggggaagttcaggtggcctgtggattgaaccaaacagttgaagagtttgtaggcgagctgaattttggattggtcgaagtcgtctacgagtgggccagaggcatgccattctccgagctggcgggtctttcagggacgccagagggcctggtcgtgcggtgcatacaaaggttggcggaaatgtgccgttcacttaggggcgcagcaaggctggtgggagagcccgtactgggagcaaagatggagacagccgctaccctgctacgcagggatattgtcttcgcggcatctctctatacccaatag

SEQ ID NO: 169252 - DNA, 3162 bp, Artificial Sequence
  derived and/or modified sequence
atggactttgcacctaaagactgtcccacgccagctcctggcttgctgtctttgtcatgtctgttagagccactggatctcggaggaggtgacgaagacgaaaacgaagctgtaggccagccgggaggtcctaggggtgacaccgtatccgcgagtccttgtagcgccccattggcaagggcctcaagcctggaggacctggtgctgaaggaggcatccactgcagtttctacgccggaggcacccgagcctcctagccaagagcagtgggcaattcccgttgacgctacctccccagtgggcgacttctatcgcctcatcccacagcccgcttttcagtgggcattcgagcccgatgtgtttcagaagcaggccatcctgcatctggaacggcacgattctgtcttcgtcgcagctcacacttccgcgggaaaaactgtggtggccgaatacgccatcgctctggcccagaagcacatgactcggactatctacaccagtcccatcaaggctctctcaaaccagaaatttcgtgattttcggaacaccttcggcgatgttggactactgacaggggacgttcagctccaccccgaggcttcatgtcttattatgactaccgaaatcctacgcagcatgctctacagcgggagcgatgtgattcgtgacttagagtgggtgatttttgacgaggtgcactatatcaacgatgtcgagcggggagtcgtctgggaagaagttcttattatgctgcctgaccacgtgtcaattatcctgttgagtgccaccgtgcccaatgccctggagttcgcagactggatcgggcgactcaagcggagacagatctatgtcatttccacagtcaccaggcctgttccacttgagcattacctgtttaccgggaattctagcaaaacccagggagaactgtttctgctgcttgatagccggggagcctttcacactaaaggctattatgctgccgtggaagccaaaaaagagaggatgtcaaaacacgctcagacgttcggagctaaacagcccacgcaccaaggcggaccagcacaggaccggggagtgtacctcagtcttctcgcttcccttagaaccagagctcagcttcctgtcgtagtattcacgttctcaaggggcagatgtgacgaacaggcctctggactgacatctcttgaccttacaacctcatcggagaaatccgagatccacctcttcctgcaaagatgcctagcacggcttcggggttccgaccgccagctaccccaggtacttcatatgtctgagttgctaaataggggtctgggcgtgcaccactccggaatacttcccatcctcaaggagattgtcgaaatgttattctcgagaggccttgtcaaggttctcttcgccaccgaaacttttgcaatgggagtcaacatgcccgcacggactgtggtgttcgattccatgcggaaacacgatggctcaacatttcgggatctcctccccggagaatacgtgcaaatggccggaagggcaggtcgcagggggttggaccctaccggtacagtgattttgctgtgtaagggacgggtgcctgaaatggcagacctgcacaggatgatgatgggcaaaccgtcacagctgcagtcccagtttagattgacatacacaatgattttgaaccttctcagggttgatgcccttagggtggaagacatgatgaaaagatccttttctgagttcccatccaggaaagatagcaaggcccacgaacaagctttagccgagctgactaaacgtctgggagccctggaagagcctgatatgaccggacagcttgtggatcttccagagtactattcctggggggaggagctcacagaaacacagcacatgatccagaggagaattatggagagtgtgaatggcttgaaaagcctgagcgctggtcgggtggtcgtcgtcaagaaccaggaacatcacaacgctttgggagtgatcctgcaagtgagttccaatagcacctcacgggtttttactactctggttctgtgcgataaacccttgagccaggacccacaagaccggggacctgccaccgcagaggtgccctacccagacgacctggtaggatttaaattgtttctacccgagggcccttgtgatcacacagtggtgaaactccagcccggagacatggcagctataacaactaaagtattaagagttaatggcgaaaaaatcctggaggatttctccaaacgccagcagccaaaatttaagaaggatccccctctcgctgctgtgactacagcagtgcaggagttgctgagactggcacaggcccaccccgctggcccacccaccctcgatcccgtcaacgacctgcaactcaaagacatgagcgtggtggagggaggcctgagggccagaaagttggaggaactgatccaaggagcccagtgtgtacatagtcctaggtttcctgcccagtacctcaaacttcgggagcgaatgcaaatccagaaggagatggaacggttgaggttcctgctctcggaccaatctctcctgctgctacctgagtatcaccaacgcgtcgaggtactgcgcacacttggctatgtggatgaagccggtacggtcaagctcgcgggtagagtcgcctgtgctatgagcagccacgagttactgctgaccgagttgatgtttgacaacgcactaagcacattgcgcccagaggaaatcgccgctctactatcgggtttggtctgtcagtctcctggtgatgcaggcgaccaattacccaatacactgaaacagggaatagaacgtgtgagagccgttgccaagcgcatcggggaggtacaagtggcatgcggtctcaaccagactgtggaagagttcgtcggggagttgaacttcgggctggtggaggttgtatacgagtgggcccgaggcatgccattttcggagctcgctggactgagcggcacccctgagggattggtcgttaggtgcatccaacgactcgccgagatgtgccggtctcttcgcggagccgcacgcctggtaggcgagcctgtgctgggcgctaagatggagaccgctgctaccctcctgagaagagatattgtttttgctgcctctctgtatacccagtag

SEQ ID NO: 169253 - DNA, 3162 bp, Artificial Sequence
  derived and/or modified sequence
atggattttgcaccaaaggactgcccaacccctgctcctggtctgttaagcctgtcctgcttgttagaaccacttgacctggggggaggggatgaggacgagaacgaagcagttggccagcccggaggcccaagaggggacaccgtctccgccagcccgtgctcagctcctcttgctcgcgcaagcagcctcgaggaccttgtattgaaggaggcctccacagccgtttcgacccctgaggcaccagagccgccaagccaagaacagtgggccatcccggtggatgcaacatcccccgtcggcgatttttaccgactgattccgcaaccagcatttcagtgggccttcgaaccggatgtgttccagaagcaagccatcttacacttggagcggcacgactccgtttttgtggcagcccacaccagtgctggaaagacggtggtggcagaatatgcaatcgccctcgcccagaaacacatgactagaaccatctacacctcgcccatcaaggccctgtccaaccagaaatttcgcgacttcagaaatacattcggggatgtgggcctcctgaccggagatgttcagttgcatcccgaagccagctgtctgattatgaccacagagatcctgcgtagcatgctctatagcggatcagatgtcattcgcgatctcgaatgggtcatctttgacgaagtgcactacataaatgatgttgagcgcggtgtcgtctgggaggaggttcttatcatgctgcccgatcatgtgagtataatattgctcagtgctacagtgccaaacgcccttgagttcgccgactggattggcaggctgaagcgtcggcaaatatacgtgatttcaaccgtgaccaggcctgtaccactggagcactacctcttcaccggcaatagcagtaagacacagggtgagctgttcttgcttctggatagtaggggagcattccataccaaaggctactatgccgcagtcgaggcaaagaaggaacggatgtctaaacacgctcagaccttcggggcaaaacagcccacccatcagggcggtcctgctcaagacaggggagtctatttatccctcttagcatccctcagaactcgcgctcagctgcctgtcgttgtttttaccttttcgcgcggtagatgtgatgaacaggcttccgggctaacttcacttgaccttacgactagcagcgagaagtccgaaatacatctattcctgcaaagatgtctggccagacttaggggctctgaccgccaactgccccaagtgcttcatatgtcggaactccttaataggggattaggcgtgcatcatagtggaattttacccatcctcaaagaaatcgtcgagatgctgttttccaggggcttggtcaaggtgctgttcgctactgagacattcgccatgggcgtcaacatgcctgccagaacggtggtgtttgactcgatgcgaaagcacgacggcagtacatttagggacctcctgccaggggagtatgtgcaaatggctggcagggcgggaaggagagggctcgaccccaccgggacagtgatactgttatgcaagggaagagtgccggagatggcagacttacatagaatgatgatgggaaagccaagccagttgcagagccagttccgcctgacgtacacaatgatactcaacttgctgcgcgtagacgctttgagagtcgaggacatgatgaagaggtctttcagcgagtttcccagcaggaaagactccaaggcacacgaacaggcattagccgaacttactaagaggcttggcgcattagaggagccagatatgactggacaactagtagacttgcccgaatactacagttggggagaggagttgacggaaacccagcacatgattcagagaagaattatggaaagtgtgaatggtctgaagagtctctctgcgggaagagttgtggtcgtgaaaaatcaggaacaccataatgccctcggtgttattctgcaggtgagctccaacagtacatcccgggtttttaccaccttggtcctttgcgataagccactttctcaggatccacaggacaggggaccagccaccgctgaggtcccctaccccgacgacctggtggggtttaagttgtttctccctgaaggcccatgcgatcatacggtggtgaagcttcagcctggcgacatggctgctattaccactaaggtccttagagtcaacggcgagaagatactcgaggatttctctaagaggcagcagcctaaattcaagaaagatcccccactggcggcagtcacaacagccgtccaggaactgctgaggttagcacaggctcaccccgctgggcctcccaccctggaccctgtgaacgacttacaacttaaagatatgagcgtggtggaggggggattaagggctaggaaactagaagaactgattcagggagcccaatgcgttcatagccccagattccccgctcagtacctgaagctgagggagcgcatgcagatccagaaagagatggagaggctgcggttcctgctgtccgaccagagtctcctcttacttcccgagtaccaccagagggttgaggtgttaagaaccctcggctacgttgacgaggctgggacagtcaaattagctgggagggttgcttgcgctatgagttcgcacgagttgttgctcaccgaactgatgtttgataacgctttgtctactttgcgccctgaagaaatcgccgcattactgtccggactggtctgtcagagcccaggggatgccggagaccagctgcccaatactcttaaacaggggatcgagagagtgagggccgtagccaaacgtattggtgaagtccaggtcgcctgcggcctgaaccagactgtcgaggaattcgtcggtgaattgaacttcgggttagttgaagtcgtctatgaatgggcacggggaatgccctttagcgagctcgccggtctgagcggcactccagagggtctcgtggtgagatgcattcagagactcgccgaaatgtgccgctctctgcggggtgctgctaggctagtgggtgagcctgttctaggcgcaaagatggaaactgcagcaacacttctgcgcagggatatcgtctttgcagccagcctgtatacacagtag

SEQ ID NO: 169254 - DNA, 3162 bp, Artificial Sequence
  derived and/or modified sequence
atggacttcgcacccaaggactgcccaaccccagcccctggactccttagtctgtcatgtctcctggagccactggatctcggcggaggcgatgaagacgaaaacgaggctgttggccaacccggaggcccacgaggcgatactgtttcagccagcccttgctccgctccactggcaagggccagttcactggaggacttagtcctcaaggaggctagcactgcggtcagtacccctgaagctccagagccgccttctcaggagcaatgggctattcccgtggatgccacatccccggtcggcgatttttaccggctgatccctcagccggctttccagtgggcctttgaacccgatgtgtttcaaaagcaggccattctgcaccttgagcgccatgactcagtattcgtagctgcccacacctccgctggcaagaccgttgtggccgaatatgcgatcgcattagctcagaagcatatgacaagaactatttacacatcacccattaaagctctgagtaaccaaaaattcagggactttcgcaacacctttggggacgtggggctgctcaccggggatgttcagctgcatcccgaggctagttgccttatcatgacaaccgagattttgagatccatgctatattccgggtccgacgttattagggatctagagtgggtgatatttgatgaagttcattatataaacgacgtagaaaggggagtcgtgtgggaagaggtcctgatcatgctgcccgatcatgtgagtatcatactgctgtctgctactgtgcctaacgcactggaattcgctgattggatcggtcgccttaagcgaaggcagatatacgtcatttcgacggtcaccagaccagtgcctctggagcactacctgttcaccggcaacagttctaagacccagggcgagttgtttttgctgctggacagcagaggagccttccatactaaggggtactacgcagcggtggaggctaaaaaggagcggatgtcgaagcatgcccagacattcggggcaaagcagcctactcaccaggggggacccgctcaggatcgcggagtgtacttgtcactcttggctagtctgcggactcgtgctcagcttcctgtggtcgtcttcacatttagtcgaggtcgctgtgatgagcaagcaagtggactcacatctttagacctcactactagttctgagaagagtgaaatacatctgttcttgcagcggtgccttgccagattacgcggaagtgatcgtcagctccctcaagtgctccatatgtcagagcttttgaacagaggtcttggagtccaccattccgggattcttcccatcctcaaggagattgtggaaatgctttttagcagaggactggtgaaagttctgttcgccacagaaacatttgctatgggtgtaaatatgccggcaaggaccgtggtgttcgatagtatgagaaagcacgacggatcaacatttcgggacctcctgccaggggaatatgtccagatggcaggtcgggcaggcagacgaggcttagatccaactggcaccgtgatcctgctttgcaaaggcagagtgcccgagatggcagatctgcaccggatgatgatgggcaaaccttcccaactgcagtctcaatttaggctgacatacacgatgatattgaacttattgagagtcgatgccctccgcgtggaggatatgatgaaacgctcatttagcgagtttcctagtcgcaaagactcaaaggcccatgaacaggccctcgcagagctgacaaaacgcctaggcgcactggaagagccagacatgactgggcagctggtcgacttgccggagtattatagttggggagaggagctcactgaaacacagcacatgatccagagacgaatcatggaatctgtgaatggactaaagtccctttctgctggacgggtcgtggtcgtgaagaatcaagaacatcacaacgcactgggtgtgattttacaagtatcatctaattccacctctagggtgtttactacactggtactctgcgacaagccactgagccaggatccccaggaccggggtccagcgactgcggaggtgccttaccccgacgacctggtggggttcaagctctttttgcctgagggaccctgcgatcacaccgtggtaaaactccagcccggagatatggcagccattaccactaaggttctacgggttaatggcgagaagatcttggaggattttagtaaacgccagcagccgaagtttaagaaggatccccctctggcggctgtaaccacggctgtgcaggagttgctgagactggcacaggcacacccagcgggtccacctaccctggaccccgtgaatgacctgcagttaaaggacatgagtgtcgtggagggagggctgcgcgctaggaaactcgaagagctgatacagggggcacagtgtgtacattcaccaaggtttcccgctcagtatctcaaattgcgagagagaatgcagatccagaaagagatggagagattgaggttcctcctgtccgaccagtcactgctgctgctgcccgagtatcatcagcgcgtagaggtcttgcgaacactgggttatgttgatgaggcgggtaccgtgaaactggcaggcagggtggcgtgcgccatgagctctcacgagctgttactcaccgagcttatgtttgacaacgctctcagtaccctaagacctgaagagattgcggcattgcttagtgggctcgtctgtcagtctcccggtgatgcgggagaccaactcccgaatactctcaagcagggtatcgaacgagtgcgggctgtcgctaagcgcatcggagaagtccaagtagcatgtggactcaaccagaccgtggaagagtttgtgggcgaactaaactttggcttggtggaggtggtttacgaatgggcaaggggaatgcctttcagtgagttagcagggctcagcgggacccctgaaggcttagtagtacgctgcatacagagactcgccgagatgtgtaggagccttcggggagccgctcggttggtaggggagccagttctcggcgctaagatggaaaccgccgcaacactgctccgaagagatatcgtttttgctgctagtctctatacccagtag

SEQ ID NO: 169255 - DNA, 3894 bp, Artificial Sequence
  derived and/or modified sequence
ggcggggctgtaccggaagttgcctctacttccgcccgttccggggcggggcttacttcgcagcgactacttgccgcacttccgggctgccaggcagctgctgtggctccaggatgatggagacagagcgacttgtgctaccccctccagatcccctggacctaccccttcgggccgtggagctcggatgcacggggcactgggagctgctgaacttgcctggagctccagagagtagccttccccatggcctccctccttgtgccccagatctgcagcaagaagcagaacagttgtttctgtcatccccagcctggctgcctctgcatggtgtggagcactcagcccgaaaatggcagaggaagacggatccctggtctcttttggctgtcctgggagccccagtcccatccgacctacaggcccaaagacacccaaccacaggccagatactgggttacaaagaggtcttgctggagaacacaaatctctcggctacaacctccttgtctcttcgccggcctccagggccagcctcccagtccttatggggaaatccaactcagtatcccttctggccaggggggatggatgaacccaccataacagatctgaacacacgggaggaggctgaggaggagatagactttgagaaagatcttcttactattccacctggtttcaagaaaggcatggactttgcaccaaaagattgtccaactccagctcctggactactaagccttagctgtatgttggagcctctggatttgggtgggggtgacgaggatgagaatgaggcagtgggacagccaggaggtcccagaggggacactgtttcagcctctccctgcagtgctcccctggcccgagcaagcagcttggaagacctagtgttgaaggaagcgtccacagctgtatccaccccagaggccccagagcctccatctcaggagcagtgggccatccctgtggacgccacctcccctgttggtgatttctatcgcctcattccccagccagccttccagtgggcatttgagccagatgtgtttcagaaacaggccatcctgcacttggaacggcatgactctgtctttgtcgcagctcacacatctgcaggaaaaacagttgtggctgaatatgccattgccctggcccagaaacacatgacacgcaccatctacacttcgcccatcaaggccctgagcaaccagaagttccgggacttccgaaacacattcggggatgtggggctgctcaccggggatgtacagctgcatccggaggcctcctgcctcatcatgaccacagagatccttcgctccatgctgtacagtggctcagatgttattcgggacctggagtgggtcatctttgatgaggttcactatatcaacgatgtcgagcgtggggtcgtgtgggaggaggtgcttatcatgctacctgaccacgtttctatcatccttctgagtgccaccgtccccaacgcccttgagtttgctgactggattgggcggctgaagcgtcgtcagatctatgtgattagcactgtaacccgccccgtgcccctggagcactatcttttcacagggaacagctccaagacccagggggagctctttttgttgctggactcccgaggagccttccatacaaaagggtactatgcagctgtggaggccaagaaggagagaatgagcaaacacgcccagacctttggggccaagcagcccacacatcaggggggccctgcacaggaccgcggagtgtacctgtccctcctggcctccctccgcacacgtgcccagttgcccgtggtggtgttcaccttctcccggggccgctgtgatgagcaggcctcaggcctcacctcccttgacctcaccaccagttcggagaagagcgagatccacctcttcctgcagcgctgccttgctcgcctccgtggctctgaccgccagctgccccaggtcctgcacatgtcagagctcctgaatcgcggcctgggtgtgcaccatagcggcatcctgcccatcctcaaggagatcgtggagatgctcttcagccgtggcctggtcaaggtcttgtttgccacagagacctttgccatgggagtaaacatgcctgctcgtacagtagtgtttgactccatgcgcaaacacgatggctccaccttccgggacctgctccctggggagtatgtgcagatggcaggccgggcagggcggaggggcctggaccccacaggcaccgttatcctgctctgcaagggccgagtgcccgagatggcagacctgcaccgcatgatgatggggaagccgtcccagctgcagtcccagttccgcctcacgtacactatgatcctcaacttgctgcgagtggatgccctcagggtggaggacatgatgaagaggagcttctctgagtttccctcccgcaaagacagcaaggcccatgaacaggccctggctgaactgaccaagaggctgggagctttggaggagcctgacatgactggccaactggtcgacctgcctgaatattacagctggggggaggaactgacagagacccagcacatgatccagcgacgcatcatggagtctgtgaacgggctgaagtctctctcagcaggaagggtggtggttgtgaagaatcaggagcatcacaacgcattgggagtgatcctacaggtctcctcgaactccaccagcagagtattcacaaccctggtcttgtgtgataagcccttgtcccaggacccacaggacagggggccagccactgcagaggtgccctatccagatgacctcgtgggattcaagctgttcctgcctgaagggccttgtgaccacaccgtggtcaagctccagccaggagatatggctgccatcaccaccaaggtgctccgggtgaatggggagaagatcttggaggacttcagcaagaggcagcagccaaaattcaagaaggatcctccccttgcagccgtgaccactgctgtccaggaactgctgcgtctggctcaggcccacccagccggacctcccaccctcgaccctgtcaatgacctgcagctcaaagatatgtcagttgtagagggtgggctccgggcccggaagctggaggagctgatccagggggctcagtgtgtacacagcccccgttttcctgcccagtacctgaagctgcgggagcgaatgcagatacagaaggagatggagcggctgcgcttcctactgtcggatcagtcattgctgctgcttcctgagtaccatcagcgagtagaggtgctccgaaccctgggttatgtggacgaggcgggcactgtgaagctggcagggcgggtggcttgtgccatgagcagccatgagttgctcctcactgagctcatgtttgacaatgcactgagcaccctgcggcctgaggagattgctgccttgctctctggcctggtctgccagagccctggggacgctggggatcagctcccaaacaccctcaagcagggaatagaacgtgtccgggctgtggccaagcggattggtgaggtccaggtggcttgtggcctgaaccagacggtggaggaatttgtgggggagctgaattttgggctggttgaggttgtatatgagtgggcccggggcatgcccttctccgagttggcagggctctcagggacccctgagggcctggtggtccgctgcattcagcgcctggctgagatgtgtcgctcactgcggggggcagcccgcctggtaggagagcctgtgctgggtgccaagatggagacagcggctaccttgctacggcgggacatcgtatttgcggccagcctctacacccagtgaatgccccatgtaaaaacatgatgataaaacagcaaagcac

SEQ ID NO: 169256 - DNA, 3890 bp, Artificial Sequence
  derived and/or modified sequence
ggcggggctgtaccggaagttgcctctacttccgcccgttccggggcggggcttacttcgcagcgactacttgccgcacttccgggctgccaggcagctgctgtggctccaggatgatggagacagagcgacttgtgctaccccctccagatcccctggacctaccccttcgggccgtggagctcggatgcacggggcactgggagctgctgaacttgcctggagctccagagagtagccttccccatggcctccctccttgtgccccagatctgcagcaagaagcagaacagttgtttctgtcatccccagcctggctgcctctgcatggtgtggagcactcagcccgaaaatggcagaggaagacggatccctggtctcttttggctgtcctgggagccccagtcccatccgacctacaggcccaaagacacccaaccacaggccagatactgggttacaaagaggtcttgctggagaacacaaatctctcggctacaacctccttgtctcttcgccggcctccagggccagcctcccagtccttatggggaaatccaactcagtatcccttctggccaggggggatggatgaacccaccataacagatctgaacacacgggaggaggctgaggaggagatagactttgagaaagatcttcttactattccacctggtttcaagaaaggcatggactttgcaccaaaagattgtccaactccagctcctggactactaagccttagctgtctgttggagcctctggatttgggtgggggtgacgaggatgagaatgaggcagtgggacagccaggaggtcccagaggggacactgtttcagcctctccctgcagtgctcccctggcccgagcaagcagcttggaagacctagtgttgaaggaagcgtccacagctgtatccaccccagaggccccagagcctccatctcaggagcagtgggccatccctgtggacgccacctcccctgttggtgatttctatcgcctcattccccagccagccttccagtgggcatttgagccagatgtgtttcagaaacaggccatcctgcacttggaacggcatgactctgtctttgtcgcagctcacacatctgcaggaaaaacagttgtggctgaatatgccattgccctggcccagaaacacatgacacgcaccatctacacttcgcccatcaaggccctgagcaaccagaagttccgggacttccgaaacacattcggggatgtggggctgctcaccggggatgtacagctgcatccggaggcctcctgcctcatcatgaccacagagatccttcgctccatgctgtacagtggctcagatgttattcgggacctggagtgggtcatctttgatgaggttcactatatcaacgatgtcgagcgtggggtcgtgtgggaggaggtgcttatcatgctacctgaccacgtttctatcatccttctgagtgccaccgtccccaacgcccttgagtttgctgactggattgggcggctgaagcgtcgtcagatctatgtgattagcactgtaacccgccccgtgcccctggagcactatcttttcacagggaacagctccaagacccagggggagctctttttgttgctggactcccgaggagccttccatacaaaagggtactatgcagctgtggaggccaagaaggagagaatgagcaaacacgcccagacctttggggccaagcagcccacacatcaggggggccctgcacaggaccgcggagtgtacctgtccctcctggcctccctccgcacacgtgcccagttgcccgtggtggtgttcaccttctcccggggccgctgtgatgagcaggcctcaggcctcacctcccttgacctcaccaccagttcggagaagagcgagatccacctcttcctgcagcgctgccttgctcgcctccgtggctctgaccgccagctgccccaggtcctgcacatgtcagagctcctgaatcgcggcctgggtgtgcaccatagcggcatcctgcccatcctcaaggagatcgtggagatgctcttcagccgtggcctggtcaaggtcttgtttgccacagagacctttgccatgggagtaaacatgcctgctcgtacagtagtgtttgactccatgcgcaaacacgatggctccaccttccgggacctgctccctggggagtatgtgcagatggcaggccgggcagggcggaggggcctggaccccacaggcaccgttatcctgctctgcaagggccgagtgcccgagatggcagacctgcaccgcatgatgatggggaagccgtcccagctgcagtcccagttccgcctcacgtacactatgatcctcaacttgctgcgagtggatgccctcagggtggaggacatgatgaagaggagcttctctgagtttccctcccgcaaagacagcaaggcccatgaacaggccctggctgaactgaccaagaggctgggagctttggaggagcctgacatgactggccaactggtcgacctgcctgaatattacagctggggggaggaactgacagagacccagcacatgatccagcgacgcatcatggagtctgtgaacgggctgaagtctctctcagcaggaagggtggtggttgtgaagaatcaggagcatcacaacgcattgggagtgatcctacaggtctcctcgaactccaccagcagagtattcacaaccctggtcttgtgtgataagcccttgtcccaggacccacaggacagggggccagccactgcagaggtgccctatccagatgacctcgtgggattcaagctgttcctgcctgaagggccttgtgaccacaccgtggtcaagctccagccaggagatatggctgccatcaccaccaaggtgctccgggtgaatggggagaagatcttggaggacttcagcaagaggcagcagccaaaattcaagaaggatcctccccttgcagccgtgaccactgctgtccaggaactgctgcgtctggctcaggcccacccagccggacctcccaccctcgaccctgtcaatgacctgcagctcaaagatatgtcagttgtagagggtgggctccgggcccggaagctggaggagctgatccagggggctcagtgtgtacacagcccccgttttcctgcccagtacctgaagctgcgggagcgaatgcagatacagaaggagatggagcggctgcgcttcctactgtcggatcagtcattgctgctgcttcctgagtaccatcagcgagtagaggtgctccgaaccctgggttacgtggacgaggcgggcactgtgaagctggcagggcgggtggcttgtgccatgagcagccatgagttgctcctcactgagctcatgtttgacaatgcactgagcaccctgcggcctgaggagattgctgccttgctctctggcctggtctgccagagccctggggacgctggggatcagctcccaaacaccctcaagcagggaatagaacgtgtccgggctgtggccaagcggattggtgaggtccaggtggcttgtggcctgaaccagacggtggaggaatttgtgggggagctgaattttgggctggttgaggttgtatatgagtgggcccggggcatgcccttctccgagttggcagggctctcagggacccctgagggcctggtggtccgctgcattcagcgcctggctgagatgtgtcgctcactgcggggggcagcccgcctggtaggagagcctgtgctgggtgccaagatggagacagcggctaccttgctacggcgggacatcgtatttgcggccagcctctacacccagtgaatgccccatgtaaaaacatgatgataaaacagcaaa

SEQ ID NO: 169257 - DNA, 3890 bp, Artificial Sequence
  derived and/or modified sequence
ggcggggctgtaccggaagttgcctctacttccgcccgttccggggcggggcttacttcgcagcgactacttgccgcacttccgggctgccaggcagctgctgtggctccaggatgatggagacagagcgacttgtgctaccccctccagatcccctggacctaccccttcgggccgtggagctcggatgcacggggcactgggagctgctgaacttgcctggagctccagagagtagccttccccatggcctccctccttgtgccccagatctgcagcaagaagcagaacagttgtttctgtcatccccagcctggctgcctctgcatggtgtggagcactcagcccgaaaatggcagaggaagacggatccctggtctcttttggctgtcctgggagccccagtcccatccgacctacaggcccaaagacacccaaccacaggccagatactgggttacaaagaggtcttgctggagaacacaaatctctcggctacaacctccttgtctcttcgccggcctccagggccagcctcccagtccttatggggaaatccaactcagtatcccttctggccaggggggatggatgaacccaccataacagatctgaacacacgggaggaggctgaggaggagatagactttgagaaagatcttcttactattccacctggtttcaagaaaggcatggactttgcaccaaaagattgtccaactccagctcctggactactaagccttagctgtctgttggagcctctggatttgggtgggggtgacgaggatgagaatgaggcagtgggacagccaggaggtcccagaggggacactgtttcagcctctccctgcagtgctcccctggcccgagcaagcagcttggaagacctagtgttgaaggaagcgtccacagctgtatccaccccagaggccccagagcctccatctcaggagcagtgggccatccctgtggacgccacctcccctgttggtgatttctatcgcctcattccccagccagccttccagtgggcatttgagccagatgtgtttcagaaacaggccatcctgcacttggaacggcatgactctgtctttgtcgcagctcacacatctgcaggaaaaacagttgtggctgaatatgccattgctctggcccagaaacacatgacacgcaccatctacacttcgcccatcaaggccctgagcaaccagaagttccgggacttccgaaacacattcggggatgtggggctgctcaccggggatgtacagctgcatccggaggcctcctgcctcatcatgaccacagagatccttcgctccatgctgtacagtggctcagatgttattcgggacctggagtgggtcatctttgatgaggttcactatatcaacgatgtcgagcgtggggtcgtgtgggaggaggtgcttatcatgctacctgaccacgtttctatcatccttctgagtgccaccgtccccaacgcccttgagtttgctgactggattgggcggctgaagcgtcgtcagatctatgtgattagcactgtaacccgccccgtgcccctggagcactatcttttcacagggaacagctccaagacccagggggagctctttttgttgctggactcccgaggagccttccatacaaaagggtactatgcagctgtggaggccaagaaggagagaatgagcaaacacgcccagacctttggggccaagcagcccacacatcaggggggccctgcacaggaccgcggagtgtacctgtccctcctggcctccctccgcacacgtgcccagttgcccgtggtggtgttcaccttctcccggggccgctgtgatgagcaggcctcaggcctcacctcccttgacctcaccaccagttcggagaagagcgagatccacctcttcctgcagcgctgccttgctcgcctccgtggctctgaccgccagctgccccaggtcctgcacatgtcagagctcctgaatcgcggcctgggtgtgcaccatagcggcatcctgcccatcctcaaggagatcgtggagatgctcttcagccgtggcctggtcaaggtcttgtttgccacagagacctttgccatgggagtaaacatgcctgctcgtacagtagtgtttgactccatgcgcaaacacgatggctccaccttccgggacctgctccctggggagtatgtgcagatggcaggccgggcagggcggaggggcctggaccccacaggcaccgttatcctgctctgcaagggccgagtgcccgagatggcagacctgcaccgcatgatgatggggaagccgtcccagctgcagtcccagttccgcctcacgtacactatgatcctcaacttgctgcgagtggatgccctcagggtggaggacatgatgaagaggagcttctctgagtttccctcccgcaaagacagcaaggcccatgaacaggccctggctgaactgaccaagaggctgggagctttggaggagcctgacatgactggccaactggtcgacctgcctgaatattacagctggggggaggaactgacagagacccagcacatgatccagcgacgcatcatggagtctgtgaacgggctgaagtctctctcagcaggaagggtggtggttgtgaagaatcaggagcatcacaacgcattgggagtgatcctacaggtctcctcgaactccaccagcagagtattcacaaccctggtcttgtgtgataagcccttgtcccaggacccacaggacagggggccagccactgcagaggtgccctatccagatgacctcgtgggattcaagctgttcctgcctgaagggccttgtgaccacaccgtggtcaagctccagccaggagatatggctgccatcaccaccaaggtgctccgggtgaatggggagaagatcttggaggacttcagcaagaggcagcagccaaaattcaagaaggatcctccccttgcagccgtgaccactgctgtccaggaactgctgcgtctggctcaggcccacccagccggacctcccaccctcgaccctgtcaatgacctgcagctcaaagatatgtcagttgtagagggtgggctccgggcccggaagctggaggagctgatccagggggctcagtgtgtacacagcccccgttttcctgcccagtacctgaagctgcgggagcgaatgcagatacagaaggagatggagcggctgcgcttcctactgtcggatcagtcattgctgctgcttcctgagtaccatcagcgagtagaggtgctccgaaccctgggttacgtggacgaggcgggcactgtgaagctggcagggcgggtggcttgtgccatgagcagccatgagttgctcctcactgagctcatgtttgacaatgcactgagcaccctgcggcctgaggagattgctgccttgctctctggcctggtctgccagagccctggggacgctggggatcagctcccaaacaccctcaagcagggaatagaacgtgtccgggctgtggccaagcggattggtgaggtccaggtggcttgtggcctgaaccagacggtggaggaatttgtgggggagctgaattttgggctggttgaggttgtatatgagtgggcccggggcatgcccttctccgagttggcagggctctcagggacccctgagggcctggtggtccgctgcattcagcgcctggctgagatgtgtcgctcactgcggggggcagcccgcctggtaggagagcctgtgctgggtgccaagatggagacagcggctaccttgctacggcgggacatcgtatttgcggccagcctctacacccagtgaatgccccatgtaaaaacatgatgataaaacagcaaa

SEQ ID NO: 169258 - DNA, 3535 bp, Artificial Sequence
  derived and/or modified sequence
ttcgcagcgactacttgccgcacttccgggctgccaggcagctgctgtggctccaggatgatggagacagagcgacttgtgctaccccctccagatcccctggacctaccccttcgggccgtggagctcggatgcacggggcactgggagctgctgaacttgcctggagctccagagagtagcctcccagtccttatggggaaatccaactcagtatcccttctggccaggggggatggatgaacccaccataacagatctgaacacacgggaggaggctgaggaggagatagactttgagaaagatcttcttactattccacctggtttcaagaaaggcatggactttgcaccaaaagattgtccaactccagctcctggactactaagccttagctgtatgttggagcctctggatttgggtgggggtgacgaggatgagaatgaggcagtgggacagccaggaggtcccagaggggacactgtttcagcctctccctgcagtgctcccctggcccgagcaagcagcttggaagacctagtgttgaaggaagcgtccacagctgtatccaccccagaggccccagagcctccatctcaggagcagtgggccatccctgtggacgccacctcccctgttggtgatttctatcgcctcattccccagccagccttccagtgggcatttgagccagatgtgtttcagaaacaggccatcctgcacttggaacggcatgactctgtctttgtcgcagctcacacatctgcaggaaaaacagttgtggctgaatatgccattgccctggcccagaaacacatgacacgcaccatctacacttcgcccatcaaggccctgagcaaccagaagttccgggacttccgaaacacattcggggatgtggggctgctcaccggggatgtacagctgcatccggaggcctcctgcctcatcatgaccacagagatccttcgctccatgctgtacagtggctcagatgttattcgggacctggagtgggtcatctttgatgaggttcactatatcaacgatgtcgagcgtggggtcgtgtgggaggaggtgcttatcatgctacctgaccacgtttctatcatccttctgagtgccaccgtccccaacgcccttgagtttgctgactggattgggcggctgaagcgtcgtcagatctatgtgattagcactgtaacccgccccgtgcccctggagcactatcttttcacagggaacagctccaagacccagggggagctctttttgttgctggactcccgaggagccttccatacaaaagggtactatgcagctgtggaggccaagaaggagagaatgagcaaacacgcccagacctttggggccaagcagcccacacatcaggggggccctgcacaggaccgcggagtgtacctgtccctcctggcctccctccgcacacgtgcccagttgcccgtggtggtgttcaccttctcccggggccgctgtgatgagcaggcctcaggcctcacctcccttgacctcaccaccagttcggagaagagcgagatccacctcttcctgcagcgctgccttgctcgcctccgtggctctgaccgccagctgccccaggtcctgcacatgtcagagctcctgaatcgcggcctgggtgtgcaccatagcggcatcctgcccatcctcaaggagatcgtggagatgctcttcagccgtggcctggtcaaggtcttgtttgccacagagacctttgccatgggagtaaacatgcctgctcgtacagtagtgtttgactccatgcgcaaacacgatggctccaccttccgggacctgctccctggggagtatgtgcagatggcaggccgggcagggcggaggggcctggaccccacaggcaccgttatcctgctctgcaagggccgagtgcccgagatggcagacctgcaccgcatgatgatggggaagccgtcccagctgcagtcccagttccgcctcacgtacactatgatcctcaacttgctgcgagtggatgccctcagggtggaggacatgatgaagaggagcttctctgagtttccctcccgcaaagacagcaaggcccatgaacaggccctggctgaactgaccaagaggctgggagctttggaggagcctgacatgactggccaactggtcgacctgcctgaatattacagctggggggaggaactgacagagacccagcacatgatccagcgacgcatcatggagtctgtgaacgggctgaagtctctctcagcaggaagggtggtggttgtgaagaatcaggagcatcacaacgcattgggagtgatcctacaggtctcctcgaactccaccagcagagtattcacaaccctggtcttgtgtgataagcccttgtcccaggacccacaggacagggggccagccactgcagaggtgccctatccagatgacctcgtgggattcaagctgttcctgcctgaagggccttgtgaccacaccgtggtcaagctccagccaggagatatggctgccatcaccaccaaggtgctccgggtgaatggggagaagatcttggaggacttcagcaagaggcagcagccaaaattcaagaaggatcctccccttgcagccgtgaccactgctgtccaggaactgctgcgtctggctcaggcccacccagccggacctcccaccctcgaccctgtcaatgacctgcagctcaaagatatgtcagttgtagagggtgggctccgggcccggaagctggaggagctgatccagggggctcagtgtgtacacagcccccgttttcctgcccagtacctgaagctgcgggagcgaatgcagatacagaaggagatggagcggctgcgcttcctactgtcggatcagtcattgctgctgcttcctgagtaccatcagcgagtagaggtgctccgaaccctgggttatgtggacgaggcgggcactgtgaagctggcagggcgggtggcttgtgccatgagcagccatgagttgctcctcactgagctcatgtttgacaatgcactgagcaccctgcggcctgaggagattgctgccttgctctctggcctggtctgccagagccctggggacgctggggatcagctcccaaacaccctcaagcagggaatagaacgtgtccgggctgtggccaagcggattggtgaggtccaggtggcttgtggcctgaaccagacggtggaggaatttgtgggggagctgaattttgggctggttgaggttgtatatgagtgggcccggggcatgcccttctccgagttggcagggctctcagggacccctgagggcctggtggtccgctgcattcagcgcctggctgagatgtgtcgctcactgcggggggcagcccgcctggtaggagagcctgtgctgggtgccaagatggagacagcggctaccttgctacggcgggacatcgtatttgcggccagcctctacacccagtgaatgccccatgtaaaaacatgatgataaaacagc

SEQ ID NO: 169259 - DNA, 3890 bp, Artificial Sequence
  derived and/or modified sequence
ggcggggctgtaccggaagttgcctctacttccgcccgttccggggcggggcttacttcgcagcgactacttgccgcacttccgggctgccaggcagctgctgtggctccaggatgatggagacagagcgacttgtgctaccccctccagatcccctggacctaccccttcgggccgtggagctcggatgcacggggcactgggagctgctgaacttgcctggagctccagagagtagccttccccatggcctccctccttgtgccccagatctgcagcaagaagcagaacagttgtttctgtcatccccagcctggctgcctctgcatggtgtggagcactcagcccgaaaatggcagaggaagacggatccctggtctcttttggctgtcctgggagccccagtcccatccgacctacaggcccaaagacacccaaccacaggccagatactgggttacaaagaggtcttgctggagaacacaaatctctcggctacaacctccttgtctcttcgccggcctccagggccagcctcccagtccttatggggaaatccaactcagtatcccttctggccaggggggatggatgaacccaccataacagatctgaacacacgggaggaggctgaggaggagatagactttgagaaagatcttcttactattccacctggtttcaagaaaggcatggactttgcaccaaaagattgtccaactccagctcctggactactaagccttagctgtatgttggagcctctggatttgggtgggggtgacgaggatgagaatgaggcagtgggacagccaggaggtcccagaggggacactgtttcagcctctccctgcagtgctcccctggcccgagcaagcagcttggaagacctagtgttgaaggaagcgtccacagctgtatccaccccagaggccccagagcctccatctcaggagcagtgggccatccctgtggacgccacctcccctgttggtgatttctatcgcctcattccccagccagccttccagtgggcatttgagccagatgtgtttcagaaacaggccatcctgcacttggaacggcatgactctgtctttgtcgcagctcacacatctgcaggaaaaacagttgtggctgaatatgccattgccctggcccagaaacacatgacacgcaccatctacacttcgcccatcaaggccctgagcaaccagaagttccgggacttccgaaacacattcggggatgtggggctgctcaccggggatgtacagctgcatccggaggcctcctgcctcatcatgaccacagagatccttcgctccatgctgtacagtggctcagatgttattcgggacctggagtgggtcatctttgatgaggttcactatatcaacgatgtcgagcgtggggtcgtgtgggaggaggtgcttatcatgctacctgaccacgtttctatcatccttctgagtgccaccgtccccaacgcccttgagtttgctgactggattgggcggctgaagcgtcgtcagatctatgtgattagcactgtaacccgccccgtgcccctggagcactatcttttcacagggaacagctccaagacccagggggagctctttttgttgctggactcccgaggagccttccatacaaaagggtactatgcagctgtggaggccaagaaggagagaatgagcaaacacgcccagacctttggggccaagcagcccacacatcaggggggccctgcacaggaccgcggagtgtacctgtccctcctggcctccctccgcacacgtgcccagttgcccgtggtggtgttcaccttctcccggggccgctgtgatgagcaggcctcaggcctcacctcccttgacctcaccaccagttcggagaagagcgagatccacctcttcctgcagcgctgccttgctcgcctccgtggctctgaccgccagctgccccaggtcctgcacatgtcagagctcctgaatcgcggcctgggtgtgcaccatagcggcatcctgcccatcctcaaggagatcgtggagatgctcttcagccgtggcctggtcaaggtcttgtttgccacagagacctttgccatgggagtaaacatgcctgctcgtacagtagtgtttgactccatgcgcaaacacgatggctccaccttccgggacctgctccctggggagtatgtgcagatggcaggccgggcagggcggaggggcctggaccccacaggcaccgttatcctgctctgcaagggccgagtgcccgagatggcagacctgcaccgcatgatgatggggaagccgtcccagctgcagtcccagttccgcctcacgtacactatgatcctcaacttgctgcgagtggatgccctcagggtggaggacatgatgaagaggagcttctctgagtttccctcccgcaaagacagcaaggcccatgaacaggccctggctgaactgaccaagaggctgggagctttggaggagcctgacatgactggccaactggtcgacctgcctgaatattacagctggggggaggaactgacagagacccagcacatgatccagcgacgcatcatggagtctgtgaacgggctgaagtctctctcagcaggaagggtggtggttgtgaagaatcaggagcatcacaacgcattgggagtgatcctacaggtctcctcgaactccaccagcagagtattcacaaccctggtcttgtgtgataagcccttgtcccaggacccacaggacagggggccagccactgcagaggtgccctatccagatgacctcgtgggattcaagctgttcctgcctgaagggccttgtgaccacaccgtggtcaagctccagccaggagatatggctgccatcaccaccaaggtgctccgggtgaatggggagaagatcttggaggacttcagcaagaggcagcagccaaaattcaagaaggatcctccccttgcagccgtgaccactgctgtccaggaactgctgcgtctggctcaggcccacccagccggacctcccaccctcgaccctgtcaatgacctgcagctcaaagatatgtcagttgtagagggtgggctccgggcccggaagctggaggagctgatccagggggctcagtgtgtacacagcccccgttttcctgcccagtacctgaagctgcgggagcgaatgcagatacagaaggagatggagcggctgcgcttcctactgtcggatcagtcattgctgctgcttcctgagtaccatcagcgagtagaggtgctccgaaccctgggttatgtggacgaggcgggcactgtgaagctggcagggcgggtggcttgtgccatgagcagccatgagttgctcctcactgagctcatgtttgacaatgcactgagcaccctgcggcctgaggagattgctgccttgctctctggcctggtctgccagagccctggggacgctggggatcagctcccaaacaccctcaagcagggaatagaacgtgtccgggctgtggccaagcggattggtgaggtccaggtggcttgtggcctgaaccagacggtggaggaatttgtgggggagctgaattttgggctggttgaggttgtatatgagtgggcccggggcatgcccttctccgagttggcagggctctcagggacccctgagggcctggtggtccgctgcattcagcgcctggctgagatgtgtcgctcactgcggggggcagcccgcctggtaggagagcctgtgctgggtgccaagatggagacagcggctaccttgctacggcgggacatcgtatttgcggccagcctctacacccagtgaatgccccatgtaaaaacatgatgataaaacagcaaa

SEQ ID NO: 169260 - DNA, 3378 bp, Artificial Sequence
  derived and/or modified sequence
aggcagctgctgtggctccaggatgatggagacagagcgacttgtgctaccccctccagatcccctggacctaccccttcgggccgtggagctcggatgcacggggcactgggagctgctgaacttgcctggagctccagagagtagcatcttcttactattccacctggtttcaagaaaggcatggactttgcaccaaaagattgtccaactccagctcctggactactaagccttagctgtatgttggagcctctggatttgggtgggggtgacgaggatgagaatgaggcagtgggacagccaggaggtcccagaggggacactgtttcagcctctccctgcagtgctcccctggcccgagcaagcagcttggaagacctagtgttgaaggaagcgtccacagctgtatccaccccagaggccccagagcctccatctcaggagcagtgggccatccctgtggacgccacctcccctgttggtgatttctatcgcctcattccccagccagccttccagtgggcatttgagccagatgtgtttcagaaacaggccatcctgcacttggaacggcatgactctgtctttgtcgcagctcacacatctgcaggaaaaacagttgtggctgaatatgccattgccctggcccagaaacacatgacacgcaccatctacacttcgcccatcaaggccctgagcaaccagaagttccgggacttccgaaacacattcggggatgtggggctgctcaccggggatgtacagctgcatccggaggcctcctgcctcatcatgaccacagagatccttcgctccatgctgtacagtggctcagatgttattcgggacctggagtgggtcatctttgatgaggttcactatatcaacgatgtcgagcgtggggtcgtgtgggaggaggtgcttatcatgctacctgaccacgtttctatcatccttctgagtgccaccgtccccaacgcccttgagtttgctgactggattgggcggctgaagcgtcgtcagatctatgtgattagcactgtaacccgccccgtgcccctggagcactatcttttcacagggaacagctccaagacccagggggagctctttttgttgctggactcccgaggagccttccatacaaaagggtactatgcagctgtggaggccaagaaggagagaatgagcaaacacgcccagacctttggggccaagcagcccacacatcaggggggccctgcacaggaccgcggagtgtacctgtccctcctggcctccctccgcacacgtgcccagttgcccgtggtggtgttcaccttctcccggggccgctgtgatgagcaggcctcaggcctcacctcccttgacctcaccaccagttcggagaagagcgagatccacctcttcctgcagcgctgccttgctcgcctccgtggctctgaccgccagctgccccaggtcctgcacatgtcagagctcctgaatcgcggcctgggtgtgcaccatagcggcatcctgcccatcctcaaggagatcgtggagatgctcttcagccgtggcctggtcaaggtcttgtttgccacagagacctttgccatgggagtaaacatgcctgctcgtacagtagtgtttgactccatgcgcaaacacgatggctccaccttccgggacctgctccctggggagtatgtgcagatggcaggccgggcagggcggaggggcctggaccccacaggcaccgttatcctgctctgcaagggccgagtgcccgagatggcagacctgcaccgcatgatgatggggaagccgtcccagctgcagtcccagttccgcctcacgtacactatgatcctcaacttgctgcgagtggatgccctcagggtggaggacatgatgaagaggagcttctctgagtttccctcccgcaaagacagcaaggcccatgaacaggccctggctgaactgaccaagaggctgggagctttggaggagcctgacatgactggccaactggtcgacctgcctgaatattacagctggggggaggaactgacagagacccagcacatgatccagcgacgcatcatggagtctgtgaacgggctgaagtctctctcagcaggaagggtggtggttgtgaagaatcaggagcatcacaacgcattgggagtgatcctacaggtctcctcgaactccaccagcagagtattcacaaccctggtcttgtgtgataagcccttgtcccaggacccacaggacagggggccagccactgcagaggtgccctatccagatgacctcgtgggattcaagctgttcctgcctgaagggccttgtgaccacaccgtggtcaagctccagccaggagatatggctgccatcaccaccaaggtgctccgggtgaatggggagaagatcttggaggacttcagcaagaggcagcagccaaaattcaagaaggatcctccccttgcagccgtgaccactgctgtccaggaactgctgcgtctggctcaggcccacccagccggacctcccaccctcgaccctgtcaatgacctgcagctcaaagatatgtcagttgtagagggtgggctccgggcccggaagctggaggagctgatccagggggctcagtgtgtacacagcccccgttttcctgcccagtacctgaagctgcgggagcgaatgcagatacagaaggagatggagcggctgcgcttcctactgtcggatcagtcattgctgctgcttcctgagtaccatcagcgagtagaggtgctccgaaccctgggttatgtggacgaggcgggcactgtgaagctggcagggcgggtggcttgtgccatgagcagccatgagttgctcctcactgagctcatgtttgacaatgcactgagcaccctgcggcctgaggagattgctgccttgctctctggcctggtctgccagagccctggggacgctggggatcagctcccaaacaccctcaagcagggaatagaacgtgtccgggctgtggccaagcggattggtgaggtccaggtggcttgtggcctgaaccagacggtggaggaatttgtgggggagctgaattttgggctggttgaggttgtatatgagtgggcccggggcatgcccttctccgagttggcagggctctcagggacccctgagggcctggtggtccgctgcattcagcgcctggctgagatgtgtcgctcactgcggggggcagcccgcctggtaggagagcctgtgctgggtgccaagatggagacagcggctaccttgctacggcgggacatcgtatttgcggccagcctctacacccagtgaatgccccatgtaaaaacatgatgataaaacagc

SEQ ID NO: 169261 - DNA, 3535 bp, Artificial Sequence
  derived and/or modified sequence
ttcgcagcgactacttgccgcacttccgggctgccaggcagctgctgtggctccaggatgatggagacagagcgacttgtgctaccccctccagatcccctggacctaccccttcgggccgtggagctcggatgcacggggcactgggagctgctgaacttgcctggagctccagagagtagcctcccagtccttatggggaaatccaactcagtatcccttctggccaggggggatggatgaacccaccataacagatctgaacacacgggaggaggctgaggaggagatagactttgagaaagatcttcttactattccacctggtttcaagaaaggcatggactttgcaccaaaagattgtccaactccagctcctggactactaagccttagctgtctgttggagcctctggatttgggtgggggtgacgaggatgagaatgaggcagtgggacagccaggaggtcccagaggggacactgtttcagcctctccctgcagtgctcccctggcccgagcaagcagcttggaagacctagtgttgaaggaagcgtccacagctgtatccaccccagaggccccagagcctccatctcaggagcagtgggccatccctgtggacgccacctcccctgttggtgatttctatcgcctcattccccagccagccttccagtgggcatttgagccagatgtgtttcagaaacaggccatcctgcacttggaacggcatgactctgtctttgtcgcagctcacacatctgcaggaaaaacagttgtggctgaatatgccattgctctggcccagaaacacatgacacgcaccatctacacttcgcccatcaaggccctgagcaaccagaagttccgggacttccgaaacacattcggggatgtggggctgctcaccggggatgtacagctgcatccggaggcctcctgcctcatcatgaccacagagatccttcgctccatgctgtacagtggctcagatgttattcgggacctggagtgggtcatctttgatgaggttcactatatcaacgatgtcgagcgtggggtcgtgtgggaggaggtgcttatcatgctacctgaccacgtttctatcatccttctgagtgccaccgtccccaacgcccttgagtttgctgactggattgggcggctgaagcgtcgtcagatctatgtgattagcactgtaacccgccccgtgcccctggagcactatcttttcacagggaacagctccaagacccagggggagctctttttgttgctggactcccgaggagccttccatacaaaagggtactatgcagctgtggaggccaagaaggagagaatgagcaaacacgcccagacctttggggccaagcagcccacacatcaggggggccctgcacaggaccgcggagtgtacctgtccctcctggcctccctccgcacacgtgcccagttgcccgtggtggtgttcaccttctcccggggccgctgtgatgagcaggcctcaggcctcacctcccttgacctcaccaccagttcggagaagagcgagatccacctcttcctgcagcgctgccttgctcgcctccgtggctctgaccgccagctgccccaggtcctgcacatgtcagagctcctgaatcgcggcctgggtgtgcaccatagcggcatcctgcccatcctcaaggagatcgtggagatgctcttcagccgtggcctggtcaaggtcttgtttgccacagagacctttgccatgggagtaaacatgcctgctcgtacagtagtgtttgactccatgcgcaaacacgatggctccaccttccgggacctgctccctggggagtatgtgcagatggcaggccgggcagggcggaggggcctggaccccacaggcaccgttatcctgctctgcaagggccgagtgcccgagatggcagacctgcaccgcatgatgatggggaagccgtcccagctgcagtcccagttccgcctcacgtacactatgatcctcaacttgctgcgagtggatgccctcagggtggaggacatgatgaagaggagcttctctgagtttccctcccgcaaagacagcaaggcccatgaacaggccctggctgaactgaccaagaggctgggagctttggaggagcctgacatgactggccaactggtcgacctgcctgaatattacagctggggggaggaactgacagagacccagcacatgatccagcgacgcatcatggagtctgtgaacgggctgaagtctctctcagcaggaagggtggtggttgtgaagaatcaggagcatcacaacgcattgggagtgatcctacaggtctcctcgaactccaccagcagagtattcacaaccctggtcttgtgtgataagcccttgtcccaggacccacaggacagggggccagccactgcagaggtgccctatccagatgacctcgtgggattcaagctgttcctgcctgaagggccttgtgaccacaccgtggtcaagctccagccaggagatatggctgccatcaccaccaaggtgctccgggtgaatggggagaagatcttggaggacttcagcaagaggcagcagccaaaattcaagaaggatcctccccttgcagccgtgaccactgctgtccaggaactgctgcgtctggctcaggcccacccagccggacctcccaccctcgaccctgtcaatgacctgcagctcaaagatatgtcagttgtagagggtgggctccgggcccggaagctggaggagctgatccagggggctcagtgtgtacacagcccccgttttcctgcccagtacctgaagctgcgggagcgaatgcagatacagaaggagatggagcggctgcgcttcctactgtcggatcagtcattgctgctgcttcctgagtaccatcagcgagtagaggtgctccgaaccctgggttacgtggacgaggcgggcactgtgaagctggcagggcgggtggcttgtgccatgagcagccatgagttgctcctcactgagctcatgtttgacaatgcactgagcaccctgcggcctgaggagattgctgccttgctctctggcctggtctgccagagccctggggacgctggggatcagctcccaaacaccctcaagcagggaatagaacgtgtccgggctgtggccaagcggattggtgaggtccaggtggcttgtggcctgaaccagacggtggaggaatttgtgggggagctgaattttgggctggttgaggttgtatatgagtgggcccggggcatgcccttctccgagttggcagggctctcagggacccctgagggcctggtggtccgctgcattcagcgcctggctgagatgtgtcgctcactgcggggggcagcccgcctggtaggagagcctgtgctgggtgccaagatggagacagcggctaccttgctacggcgggacatcgtatttgcggccagcctctacacccagtgaatgccccatgtaaaaacatgatgataaaacagc

SEQ ID NO: 169262 - DNA, 3378 bp, Artificial Sequence
  derived and/or modified sequence
aggcagctgctgtggctccaggatgatggagacagagcgacttgtgctaccccctccagatcccctggacctaccccttcgggccgtggagctcggatgcacggggcactgggagctgctgaacttgcctggagctccagagagtagcatcttcttactattccacctggtttcaagaaaggcatggactttgcaccaaaagattgtccaactccagctcctggactactaagccttagctgtctgttggagcctctggatttgggtgggggtgacgaggatgagaatgaggcagtgggacagccaggaggtcccagaggggacactgtttcagcctctccctgcagtgctcccctggcccgagcaagcagcttggaagacctagtgttgaaggaagcgtccacagctgtatccaccccagaggccccagagcctccatctcaggagcagtgggccatccctgtggacgccacctcccctgttggtgatttctatcgcctcattccccagccagccttccagtgggcatttgagccagatgtgtttcagaaacaggccatcctgcacttggaacggcatgactctgtctttgtcgcagctcacacatctgcaggaaaaacagttgtggctgaatatgccattgccctggcccagaaacacatgacacgcaccatctacacttcgcccatcaaggccctgagcaaccagaagttccgggacttccgaaacacattcggggatgtggggctgctcaccggggatgtacagctgcatccggaggcctcctgcctcatcatgaccacagagatccttcgctccatgctgtacagtggctcagatgttattcgggacctggagtgggtcatctttgatgaggttcactatatcaacgatgtcgagcgtggggtcgtgtgggaggaggtgcttatcatgctacctgaccacgtttctatcatccttctgagtgccaccgtccccaacgcccttgagtttgctgactggattgggcggctgaagcgtcgtcagatctatgtgattagcactgtaacccgccccgtgcccctggagcactatcttttcacagggaacagctccaagacccagggggagctctttttgttgctggactcccgaggagccttccatacaaaagggtactatgcagctgtggaggccaagaaggagagaatgagcaaacacgcccagacctttggggccaagcagcccacacatcaggggggccctgcacaggaccgcggagtgtacctgtccctcctggcctccctccgcacacgtgcccagttgcccgtggtggtgttcaccttctcccggggccgctgtgatgagcaggcctcaggcctcacctcccttgacctcaccaccagttcggagaagagcgagatccacctcttcctgcagcgctgccttgctcgcctccgtggctctgaccgccagctgccccaggtcctgcacatgtcagagctcctgaatcgcggcctgggtgtgcaccatagcggcatcctgcccatcctcaaggagatcgtggagatgctcttcagccgtggcctggtcaaggtcttgtttgccacagagacctttgccatgggagtaaacatgcctgctcgtacagtagtgtttgactccatgcgcaaacacgatggctccaccttccgggacctgctccctggggagtatgtgcagatggcaggccgggcagggcggaggggcctggaccccacaggcaccgttatcctgctctgcaagggccgagtgcccgagatggcagacctgcaccgcatgatgatggggaagccgtcccagctgcagtcccagttccgcctcacgtacactatgatcctcaacttgctgcgagtggatgccctcagggtggaggacatgatgaagaggagcttctctgagtttccctcccgcaaagacagcaaggcccatgaacaggccctggctgaactgaccaagaggctgggagctttggaggagcctgacatgactggccaactggtcgacctgcctgaatattacagctggggggaggaactgacagagacccagcacatgatccagcgacgcatcatggagtctgtgaacgggctgaagtctctctcagcaggaagggtggtggttgtgaagaatcaggagcatcacaacgcattgggagtgatcctacaggtctcctcgaactccaccagcagagtattcacaaccctggtcttgtgtgataagcccttgtcccaggacccacaggacagggggccagccactgcagaggtgccctatccagatgacctcgtgggattcaagctgttcctgcctgaagggccttgtgaccacaccgtggtcaagctccagccaggagatatggctgccatcaccaccaaggtgctccgggtgaatggggagaagatcttggaggacttcagcaagaggcagcagccaaaattcaagaaggatcctccccttgcagccgtgaccactgctgtccaggaactgctgcgtctggctcaggcccacccagccggacctcccaccctcgaccctgtcaatgacctgcagctcaaagatatgtcagttgtagagggtgggctccgggcccggaagctggaggagctgatccagggggctcagtgtgtacacagcccccgttttcctgcccagtacctgaagctgcgggagcgaatgcagatacagaaggagatggagcggctgcgcttcctactgtcggatcagtcattgctgctgcttcctgagtaccatcagcgagtagaggtgctccgaaccctgggttacgtggacgaggcgggcactgtgaagctggcagggcgggtggcttgtgccatgagcagccatgagttgctcctcactgagctcatgtttgacaatgcactgagcaccctgcggcctgaggagattgctgccttgctctctggcctggtctgccagagccctggggacgctggggatcagctcccaaacaccctcaagcagggaatagaacgtgtccgggctgtggccaagcggattggtgaggtccaggtggcttgtggcctgaaccagacggtggaggaatttgtgggggagctgaattttgggctggttgaggttgtatatgagtgggcccggggcatgcccttctccgagttggcagggctctcagggacccctgagggcctggtggtccgctgcattcagcgcctggctgagatgtgtcgctcactgcggggggcagcccgcctggtaggagagcctgtgctgggtgccaagatggagacagcggctaccttgctacggcgggacatcgtatttgcggccagcctctacacccagtgaatgccccatgtaaaaacatgatgataaaacagc

SEQ ID NO: 169263 - DNA, 2694 bp, Artificial Sequence
  derived and/or modified sequence
agctgctgtggctccaggatgatggagacagagcgacttgtgctaccccctccagatcccctggacctaccccttcgggccgtggagctcggatgcacggggcactgggagctgctgaacttgcctggagctccagagagtagccttccccatggcctccctccttgtgccccagatctgcagcaagaagcagaacagttgtttctgtcatccccagcctggctgcctctgcatggtgtggagcactcagcccgaaaatggcagaggaagacggatccctggtctcttttggctgtcctgggagccccagtcccatccgacctacaggcccaaagacacccaaccacaggccagatactgggttacaaagaggtcttgctggagcactatcttttcacagggaacagctccaagacccagggggagctctttttgttgctggactcccgaggagccttccatacaaaagggtactatgcagctgtggaggccaagaaggagagaatgagcaaacacgcccagacctttggggccaagcagcccacacatcaggggggccctgcacaggaccgcggagtgtacctgtccctcctggcctccctccgcacacgtgcccagttgcccgtggtggtgttcaccttctcccggggccgctgtgatgagcaggcctcaggcctcacctcccttgacctcaccaccagttcggagaagagcgagatccacctcttcctgcagcgctgccttgctcgcctccgtggctctgaccgccagctgccccaggtcctgcacatgtcagagctcctgaatcgcggcctgggtgtgcaccatagcggcatcctgcccatcctcaaggagatcgtggagatgctcttcagccgtggcctggtcaaggtcttgtttgccacagagacctttgccatgggagtaaacatgcctgctcgtacagtagtgtttgactccatgcgcaaacacgatggctccaccttccgggacctgctccctggggagtatgtgcagatggcaggccgggcagggcggaggggcctggaccccacaggcaccgttatcctgctctgcaagggccgagtgcccgagatggcagacctgcaccgcatgatgatggggaagccgtcccagctgcagtcccagttccgcctcacgtacactatgatcctcaacttgctgcgagtggatgccctcagggtggaggacatgatgaagaggagcttctctgagtttccctcccgcaaagacagcaaggcccatgaacaggccctggctgaactgaccaagaggctgggagctttggaggagcctgacatgactggccaactggtcgacctgcctgaatattacagctggggggaggaactgacagagacccagcacatgatccagcgacgcatcatggagtctgtgaacgggctgaagtctctctcagcaggaagggtggtggttgtgaagaatcaggagcatcacaacgcattgggagtgatcctacaggtctcctcgaactccaccagcagagtattcacaaccctggtcttgtgtgataagcccttgtcccaggacccacaggacagggggccagccactgcagaggtgccctatccagatgacctcgtgggattcaagctgttcctgcctgaagggccttgtgaccacaccgtggtcaagctccagccaggagatatggctgccatcaccaccaaggtgctccgggtgaatggggagaagatcttggaggacttcagcaagaggcagcagccaaaattcaagaaggatcctccccttgcagccgtgaccactgctgtccaggaactgctgcgtctggctcaggcccacccagccggacctcccaccctcgaccctgtcaatgacctgcagctcaaagatatgtcagttgtagagggtgggctccgggcccggaagctggaggagctgatccagggggctcagtgtgtacacagcccccgttttcctgcccagtacctgaagctgcgggagcgaatgcagatacagaaggagatggagcggctgcgcttcctactgtcggatcagtcattgctgctgcttcctgagtaccatcagcgagtagaggtgctccgaaccctgggttacgtggacgaggcgggcactgtgaagctggcagggcgggtggcttgtgccatgagcagccatgagttgctcctcactgagctcatgtttgacaatgcactgagcaccctgcggcctgaggagattgctgccttgctctctggcctggtctgccagagccctggggacgctggggatcagctcccaaacaccctcaagcagggaatagaacgtgtccgggctgtggccaagcggattggtgaggtccaggtggcttgtggcctgaaccagacggtggaggaatttgtgggggagctgaattttgggctggttgaggttgtatatgagtgggcccggggcatgcccttctccgagttggcagggctctcagggacccctgagggcctggtggtccgctgcattcagcgcctggctgagatgtgtcgctcactgcggggggcagcccgcctggtaggagagcctgtgctgggtgccaagatggagacagcggctaccttgctacggcgggacatcgtatttgcggccagcctctacacccagtgaatgccccatgtaaaaacatgatgataaaacagc

SEQ ID NO: 169264 - DNA, 3535 bp, Artificial Sequence
  derived and/or modified sequence
ttcgcagcgactacttgccgcacttccgggctgccaggcagctgctgtggctccaggatgatggagacagagcgacttgtgctaccccctccagatcccctggacctaccccttcgggccgtggagctcggatgcacggggcactgggagctgctgaacttgcctggagctccagagagtagcctcccagtccttatggggaaatccaactcagtatcccttctggccaggggggatggatgaacccaccataacagatctgaacacacgggaggaggctgaggaggagatagactttgagaaagatcttcttactattccacctggtttcaagaaaggcatggactttgcaccaaaagattgtccaactccagctcctggactactaagccttagctgtctgttggagcctctggatttgggtgggggtgacgaggatgagaatgaggcagtgggacagccaggaggtcccagaggggacactgtttcagcctctccctgcagtgctcccctggcccgagcaagcagcttggaagacctagtgttgaaggaagcgtccacagctgtatccaccccagaggccccagagcctccatctcaggagcagtgggccatccctgtggacgccacctcccctgttggtgatttctatcgcctcattccccagccagccttccagtgggcatttgagccagatgtgtttcagaaacaggccatcctgcacttggaacggcatgactctgtctttgtcgcagctcacacatctgcaggaaaaacagttgtggctgaatatgccattgccctggcccagaaacacatgacacgcaccatctacacttcgcccatcaaggccctgagcaaccagaagttccgggacttccgaaacacattcggggatgtggggctgctcaccggggatgtacagctgcatccggaggcctcctgcctcatcatgaccacagagatccttcgctccatgctgtacagtggctcagatgttattcgggacctggagtgggtcatctttgatgaggttcactatatcaacgatgtcgagcgtggggtcgtgtgggaggaggtgcttatcatgctacctgaccacgtttctatcatccttctgagtgccaccgtccccaacgcccttgagtttgctgactggattgggcggctgaagcgtcgtcagatctatgtgattagcactgtaacccgccccgtgcccctggagcactatcttttcacagggaacagctccaagacccagggggagctctttttgttgctggactcccgaggagccttccatacaaaagggtactatgcagctgtggaggccaagaaggagagaatgagcaaacacgcccagacctttggggccaagcagcccacacatcaggggggccctgcacaggaccgcggagtgtacctgtccctcctggcctccctccgcacacgtgcccagttgcccgtggtggtgttcaccttctcccggggccgctgtgatgagcaggcctcaggcctcacctcccttgacctcaccaccagttcggagaagagcgagatccacctcttcctgcagcgctgccttgctcgcctccgtggctctgaccgccagctgccccaggtcctgcacatgtcagagctcctgaatcgcggcctgggtgtgcaccatagcggcatcctgcccatcctcaaggagatcgtggagatgctcttcagccgtggcctggtcaaggtcttgtttgccacagagacctttgccatgggagtaaacatgcctgctcgtacagtagtgtttgactccatgcgcaaacacgatggctccaccttccgggacctgctccctggggagtatgtgcagatggcaggccgggcagggcggaggggcctggaccccacaggcaccgttatcctgctctgcaagggccgagtgcccgagatggcagacctgcaccgcatgatgatggggaagccgtcccagctgcagtcccagttccgcctcacgtacactatgatcctcaacttgctgcgagtggatgccctcagggtggaggacatgatgaagaggagcttctctgagtttccctcccgcaaagacagcaaggcccatgaacaggccctggctgaactgaccaagaggctgggagctttggaggagcctgacatgactggccaactggtcgacctgcctgaatattacagctggggggaggaactgacagagacccagcacatgatccagcgacgcatcatggagtctgtgaacgggctgaagtctctctcagcaggaagggtggtggttgtgaagaatcaggagcatcacaacgcattgggagtgatcctacaggtctcctcgaactccaccagcagagtattcacaaccctggtcttgtgtgataagcccttgtcccaggacccacaggacagggggccagccactgcagaggtgccctatccagatgacctcgtgggattcaagctgttcctgcctgaagggccttgtgaccacaccgtggtcaagctccagccaggagatatggctgccatcaccaccaaggtgctccgggtgaatggggagaagatcttggaggacttcagcaagaggcagcagccaaaattcaagaaggatcctccccttgcagccgtgaccactgctgtccaggaactgctgcgtctggctcaggcccacccagccggacctcccaccctcgaccctgtcaatgacctgcagctcaaagatatgtcagttgtagagggtgggctccgggcccggaagctggaggagctgatccagggggctcagtgtgtacacagcccccgttttcctgcccagtacctgaagctgcgggagcgaatgcagatacagaaggagatggagcggctgcgcttcctactgtcggatcagtcattgctgctgcttcctgagtaccatcagcgagtagaggtgctccgaaccctgggttacgtggacgaggcgggcactgtgaagctggcagggcgggtggcttgtgccatgagcagccatgagttgctcctcactgagctcatgtttgacaatgcactgagcaccctgcggcctgaggagattgctgccttgctctctggcctggtctgccagagccctggggacgctggggatcagctcccaaacaccctcaagcagggaatagaacgtgtccgggctgtggccaagcggattggtgaggtccaggtggcttgtggcctgaaccagacggtggaggaatttgtgggggagctgaattttgggctggttgaggttgtatatgagtgggcccggggcatgcccttctccgagttggcagggctctcagggacccctgagggcctggtggtccgctgcattcagcgcctggctgagatgtgtcgctcactgcggggggcagcccgcctggtaggagagcctgtgctgggtgccaagatggagacagcggctaccttgctacggcgggacatcgtatttgcggccagcctctacacccagtgaatgccccatgtaaaaacatgatgataaaacagc

SEQ ID NO: 169265 - DNA, 2694 bp, Artificial Sequence
  derived and/or modified sequence
agctgctgtggctccaggatgatggagacagagcgacttgtgctaccccctccagatcccctggacctaccccttcgggccgtggagctcggatgcacggggcactgggagctgctgaacttgcctggagctccagagagtagccttccccatggcctccctccttgtgccccagatctgcagcaagaagcagaacagttgtttctgtcatccccagcctggctgcctctgcatggtgtggagcactcagcccgaaaatggcagaggaagacggatccctggtctcttttggctgtcctgggagccccagtcccatccgacctacaggcccaaagacacccaaccacaggccagatactgggttacaaagaggtcttgctggagcactatcttttcacagggaacagctccaagacccagggggagctctttttgttgctggactcccgaggagccttccatacaaaagggtactatgcagctgtggaggccaagaaggagagaatgagcaaacacgcccagacctttggggccaagcagcccacacatcaggggggccctgcacaggaccgcggagtgtacctgtccctcctggcctccctccgcacacgtgcccagttgcccgtggtggtgttcaccttctcccggggccgctgtgatgagcaggcctcaggcctcacctcccttgacctcaccaccagttcggagaagagcgagatccacctcttcctgcagcgctgccttgctcgcctccgtggctctgaccgccagctgccccaggtcctgcacatgtcagagctcctgaatcgcggcctgggtgtgcaccatagcggcatcctgcccatcctcaaggagatcgtggagatgctcttcagccgtggcctggtcaaggtcttgtttgccacagagacctttgccatgggagtaaacatgcctgctcgtacagtagtgtttgactccatgcgcaaacacgatggctccaccttccgggacctgctccctggggagtatgtgcagatggcaggccgggcagggcggaggggcctggaccccacaggcaccgttatcctgctctgcaagggccgagtgcccgagatggcagacctgcaccgcatgatgatggggaagccgtcccagctgcagtcccagttccgcctcacgtacactatgatcctcaacttgctgcgagtggatgccctcagggtggaggacatgatgaagaggagcttctctgagtttccctcccgcaaagacagcaaggcccatgaacaggccctggctgaactgaccaagaggctgggagctttggaggagcctgacatgactggccaactggtcgacctgcctgaatattacagctggggggaggaactgacagagacccagcacatgatccagcgacgcatcatggagtctgtgaacgggctgaagtctctctcagcaggaagggtggtggttgtgaagaatcaggagcatcacaacgcattgggagtgatcctacaggtctcctcgaactccaccagcagagtattcacaaccctggtcttgtgtgataagcccttgtcccaggacccacaggacagggggccagccactgcagaggtgccctatccagatgacctcgtgggattcaagctgttcctgcctgaagggccttgtgaccacaccgtggtcaagctccagccaggagatatggctgccatcaccaccaaggtgctccgggtgaatggggagaagatcttggaggacttcagcaagaggcagcagccaaaattcaagaaggatcctccccttgcagccgtgaccactgctgtccaggaactgctgcgtctggctcaggcccacccagccggacctcccaccctcgaccctgtcaatgacctgcagctcaaagatatgtcagttgtagagggtgggctccgggcccggaagctggaggagctgatccagggggctcagtgtgtacacagcccccgttttcctgcccagtacctgaagctgcgggagcgaatgcagatacagaaggagatggagcggctgcgcttcctactgtcggatcagtcattgctgctgcttcctgagtaccatcagcgagtagaggtgctccgaaccctgggttatgtggacgaggcgggcactgtgaagctggcagggcgggtggcttgtgccatgagcagccatgagttgctcctcactgagctcatgtttgacaatgcactgagcaccctgcggcctgaggagattgctgccttgctctctggcctggtctgccagagccctggggacgctggggatcagctcccaaacaccctcaagcagggaatagaacgtgtccgggctgtggccaagcggattggtgaggtccaggtggcttgtggcctgaaccagacggtggaggaatttgtgggggagctgaattttgggctggttgaggttgtatatgagtgggcccggggcatgcccttctccgagttggcagggctctcagggacccctgagggcctggtggtccgctgcattcagcgcctggctgagatgtgtcgctcactgcggggggcagcccgcctggtaggagagcctgtgctgggtgccaagatggagacagcggctaccttgctacggcgggacatcgtatttgcggccagcctctacacccagtgaatgccccatgtaaaaacatgatgataaaacagc

SEQ ID NO: 169266 - DNA, 3378 bp, Artificial Sequence
  derived and/or modified sequence
aggcagctgctgtggctccaggatgatggagacagagcgacttgtgctaccccctccagatcccctggacctaccccttcgggccgtggagctcggatgcacggggcactgggagctgctgaacttgcctggagctccagagagtagcatcttcttactattccacctggtttcaagaaaggcatggactttgcaccaaaagattgtccaactccagctcctggactactaagccttagctgtctgttggagcctctggatttgggtgggggtgacgaggatgagaatgaggcagtgggacagccaggaggtcccagaggggacactgtttcagcctctccctgcagtgctcccctggcccgagcaagcagcttggaagacctagtgttgaaggaagcgtccacagctgtatccaccccagaggccccagagcctccatctcaggagcagtgggccatccctgtggacgccacctcccctgttggtgatttctatcgcctcattccccagccagccttccagtgggcatttgagccagatgtgtttcagaaacaggccatcctgcacttggaacggcatgactctgtctttgtcgcagctcacacatctgcaggaaaaacagttgtggctgaatatgccattgctctggcccagaaacacatgacacgcaccatctacacttcgcccatcaaggccctgagcaaccagaagttccgggacttccgaaacacattcggggatgtggggctgctcaccggggatgtacagctgcatccggaggcctcctgcctcatcatgaccacagagatccttcgctccatgctgtacagtggctcagatgttattcgggacctggagtgggtcatctttgatgaggttcactatatcaacgatgtcgagcgtggggtcgtgtgggaggaggtgcttatcatgctacctgaccacgtttctatcatccttctgagtgccaccgtccccaacgcccttgagtttgctgactggattgggcggctgaagcgtcgtcagatctatgtgattagcactgtaacccgccccgtgcccctggagcactatcttttcacagggaacagctccaagacccagggggagctctttttgttgctggactcccgaggagccttccatacaaaagggtactatgcagctgtggaggccaagaaggagagaatgagcaaacacgcccagacctttggggccaagcagcccacacatcaggggggccctgcacaggaccgcggagtgtacctgtccctcctggcctccctccgcacacgtgcccagttgcccgtggtggtgttcaccttctcccggggccgctgtgatgagcaggcctcaggcctcacctcccttgacctcaccaccagttcggagaagagcgagatccacctcttcctgcagcgctgccttgctcgcctccgtggctctgaccgccagctgccccaggtcctgcacatgtcagagctcctgaatcgcggcctgggtgtgcaccatagcggcatcctgcccatcctcaaggagatcgtggagatgctcttcagccgtggcctggtcaaggtcttgtttgccacagagacctttgccatgggagtaaacatgcctgctcgtacagtagtgtttgactccatgcgcaaacacgatggctccaccttccgggacctgctccctggggagtatgtgcagatggcaggccgggcagggcggaggggcctggaccccacaggcaccgttatcctgctctgcaagggccgagtgcccgagatggcagacctgcaccgcatgatgatggggaagccgtcccagctgcagtcccagttccgcctcacgtacactatgatcctcaacttgctgcgagtggatgccctcagggtggaggacatgatgaagaggagcttctctgagtttccctcccgcaaagacagcaaggcccatgaacaggccctggctgaactgaccaagaggctgggagctttggaggagcctgacatgactggccaactggtcgacctgcctgaatattacagctggggggaggaactgacagagacccagcacatgatccagcgacgcatcatggagtctgtgaacgggctgaagtctctctcagcaggaagggtggtggttgtgaagaatcaggagcatcacaacgcattgggagtgatcctacaggtctcctcgaactccaccagcagagtattcacaaccctggtcttgtgtgataagcccttgtcccaggacccacaggacagggggccagccactgcagaggtgccctatccagatgacctcgtgggattcaagctgttcctgcctgaagggccttgtgaccacaccgtggtcaagctccagccaggagatatggctgccatcaccaccaaggtgctccgggtgaatggggagaagatcttggaggacttcagcaagaggcagcagccaaaattcaagaaggatcctccccttgcagccgtgaccactgctgtccaggaactgctgcgtctggctcaggcccacccagccggacctcccaccctcgaccctgtcaatgacctgcagctcaaagatatgtcagttgtagagggtgggctccgggcccggaagctggaggagctgatccagggggctcagtgtgtacacagcccccgttttcctgcccagtacctgaagctgcgggagcgaatgcagatacagaaggagatggagcggctgcgcttcctactgtcggatcagtcattgctgctgcttcctgagtaccatcagcgagtagaggtgctccgaaccctgggttacgtggacgaggcgggcactgtgaagctggcagggcgggtggcttgtgccatgagcagccatgagttgctcctcactgagctcatgtttgacaatgcactgagcaccctgcggcctgaggagattgctgccttgctctctggcctggtctgccagagccctggggacgctggggatcagctcccaaacaccctcaagcagggaatagaacgtgtccgggctgtggccaagcggattggtgaggtccaggtggcttgtggcctgaaccagacggtggaggaatttgtgggggagctgaattttgggctggttgaggttgtatatgagtgggcccggggcatgcccttctccgagttggcagggctctcagggacccctgagggcctggtggtccgctgcattcagcgcctggctgagatgtgtcgctcactgcggggggcagcccgcctggtaggagagcctgtgctgggtgccaagatggagacagcggctaccttgctacggcgggacatcgtatttgcggccagcctctacacccagtgaatgccccatgtaaaaacatgatgataaaacagc

SEQ ID NO: 169267 - protein, 142 aa, Artificial Sequence
  derived and/or modified sequence
MPSIKLQSSDGEIFEVDVEIAKQSVTIKTMLEDLGMDDEGDDDPVPLPNVNAAILKKVIQWCTHHKDDPPPPEDDENKEKRTDDIPVWDQEFLKVDQGTLFELILAANYLDIKGLLDVTCKTVANMIKGKTPEEIRKTFNIK

SEQ ID NO: 169268 - protein, 102 aa, Artificial Sequence
  derived and/or modified sequence
MPSIKLQSSDGEIFEVDVEIAKQSVTIKTMLEDLGMDDEGDDDPVPLPNVNAAILKKVIQWCTHHKDDPPPPEDDENKEKRTDDIPVWDQEFLKVDQGTLFE

SEQ ID NO: 169269 - protein, 160 aa, Artificial Sequence
  derived and/or modified sequence
MPSIKLQSSDGEIFEVDVEIAKQSVTIKTMLEDLGMDDEGDDDPVPLPNVNAAILKKVIQWCTHHKDDPPPPEDDENKEKRTDDIPVWDQEFLKVDQGTLFELILAANYLDIKGLLDVTCKTVANMIKGKTPEEIRKTFNIKNDFTEEEEAQVGSTQFCL

SEQ ID NO: 169270 - DNA, 429 bp, Artificial Sequence
  derived and/or modified sequence
atgcccagcatcaagctgcagagcagcgacggcgagatcttcgaggtggacgtggagatcgccaagcagagcgtgaccatcaagaccatgctggaggacctgggcatggacgacgagggcgacgacgaccccgtgcccctgcccaacgtgaacgccgccatcctgaagaaggtgatccagtggtgcacccaccacaaggacgacccccccccccccgaggacgacgagaacaaggagaagagaaccgacgacatccccgtgtgggaccaggagttcctgaaggtggaccagggcaccctgttcgagctgatcctggccgccaactacctggacatcaagggcctgctggacgtgacctgcaagaccgtggccaacatgatcaagggcaagacccccgaggagatcagaaagaccttcaacatcaagtag

SEQ ID NO: 169271 - DNA, 309 bp, Artificial Sequence
  derived and/or modified sequence
atgcccagcatcaagctgcagagcagcgacggcgagatcttcgaggtggacgtggagatcgccaagcagagcgtgaccatcaagaccatgctggaggacctgggcatggacgacgagggcgacgacgaccccgtgcccctgcccaacgtgaacgccgccatcctgaagaaggtgatccagtggtgcacccaccacaaggacgacccccccccccccgaggacgacgagaacaaggagaagagaaccgacgacatccccgtgtgggaccaggagttcctgaaggtggaccagggcaccctgttcgagtag

SEQ ID NO: 169272 - DNA, 483 bp, Artificial Sequence
  derived and/or modified sequence
atgcccagcatcaagctgcagagcagcgacggcgagatcttcgaggtggacgtggagatcgccaagcagagcgtgaccatcaagaccatgctggaggacctgggcatggacgacgagggcgacgacgaccccgtgcccctgcccaacgtgaacgccgccatcctgaagaaggtgatccagtggtgcacccaccacaaggacgacccccccccccccgaggacgacgagaacaaggagaagagaaccgacgacatccccgtgtgggaccaggagttcctgaaggtggaccagggcaccctgttcgagctgatcctggccgccaactacctggacatcaagggcctgctggacgtgacctgcaagaccgtggccaacatgatcaagggcaagacccccgaggagatcagaaagaccttcaacatcaagaacgacttcaccgaggaggaggaggcccaggtgggcagcacccagttctgcctgtag

SEQ ID NO: 169273 - DNA, 57 bp, Artificial Sequence
  derived and/or modified sequence
atgcccagcatcaagctgcagagcagcgacggcgagatcttcgaggtggacgtgtag

SEQ ID NO: 169274 - DNA, 429 bp, Artificial Sequence
  derived and/or modified sequence
atgccctctattaagctgcagagctctgacggagagatcttcgaggtagatgttgagattgcaaaacaatctgtgactatcaaaacaatgctcgaagatctcggtatggacgatgagggtgacgacgaccccgtccctttgcctaacgtgaacgccgccattcttaaaaaagtgattcagtggtgtactcaccataaagatgacccacccccgcccgaggatgacgaaaataaagaaaagcggaccgatgacatacccgtgtgggaccaggaattcctgaaggtggaccagggaaccctttttgagctcatcctggccgccaattacctggacatcaaagggcttctggatgtgacctgtaagactgtggctaacatgatcaaaggaaaaactcccgaagagatccggaagacctttaatattaagtag

SEQ ID NO: 169275 - DNA, 309 bp, Artificial Sequence
  derived and/or modified sequence
atgccaagcattaaactccagtcctctgatggagaaatctttgaagtggatgtcgagatcgccaaacaatccgtgacaataaagaccatgctggaggatctcggaatggacgatgagggcgatgatgaccccgtcccgttacctaatgtcaatgcagcaatcctgaagaaggtgattcagtggtgcacccaccataaagacgatccaccacctccagaggatgacgagaacaaagaaaaacggaccgacgatattcccgtctgggatcaagagttcttaaaggtggatcaaggcacacttttcgaatag

SEQ ID NO: 169276 - DNA, 483 bp, Artificial Sequence
  derived and/or modified sequence
atgcccagcatcaagctgcaatctagcgacggagagatctttgaagtcgacgtggagattgccaagcagtccgttacaatcaagaccatgctagaagacctgggcatggacgatgagggggatgatgaccctgtcccgctgccgaatgtgaacgcagcaattctgaagaaagttattcagtggtgtacacaccataaggacgatcccccgcctcctgaggatgatgagaacaaggagaaacggacagacgacatccctgtgtgggatcaagaattcctaaaagtcgaccaaggaaccctcttcgaattgattttggctgcaaattacctcgatatcaaggggctgcttgacgttacttgcaaaaccgtagccaacatgatcaaagggaagacgccggaggaaattcggaagacattcaacattaaaaacgacttcacagaagaagaggaagcacaggtaggcagcacccaattctgtctttag

SEQ ID NO: 169277 - DNA, 57 bp, Artificial Sequence
  derived and/or modified sequence
atgccctccataaaactccaaagtagtgacggggaaatattcgaagttgacgtatag

SEQ ID NO: 169278 - DNA, 429 bp, Artificial Sequence
  derived and/or modified sequence
atgcccagcatcaagctgcagagcagtgatggagagatctttgaggtggatgtggagatcgccaagcagagcgtgaccatcaagaccatgctggaggacctgggcatggatgatgaaggagatgatgatcctgtgcccctgcccaacgtgaatgctgccatcctgaagaaggtgatccagtggtgcacccaccacaaggatgatcctcctcctccagaagatgatgagaacaaggagaagaggacagatgacatccctgtgtgggaccaggagttcctgaaggtggaccagggcaccctgtttgagctgatcctggccgccaactacctggacatcaagggcctgctggatgtgacctgcaagacagtggccaacatgatcaagggcaagaccccagaggagatcaggaagaccttcaacatcaagtag

SEQ ID NO: 169279 - DNA, 309 bp, Artificial Sequence
  derived and/or modified sequence
atgcccagcatcaagctgcagagcagtgatggagagatctttgaggtggatgtggagatcgccaagcagagcgtgaccatcaagaccatgctggaggacctgggcatggatgatgaaggagatgatgatcctgtgcccctgcccaacgtgaatgctgccatcctgaagaaggtgatccagtggtgcacccaccacaaggatgatcctcctcctccagaagatgatgagaacaaggagaagaggacagatgacatccctgtgtgggaccaggagttcctgaaggtggaccagggcaccctgtttgaatag

SEQ ID NO: 169280 - DNA, 483 bp, Artificial Sequence
  derived and/or modified sequence
atgcccagcatcaagctgcagagcagtgatggagagatctttgaggtggatgtggagatcgccaagcagagcgtgaccatcaagaccatgctggaggacctgggcatggatgatgaaggagatgatgatcctgtgcccctgcccaacgtgaatgctgccatcctgaagaaggtgatccagtggtgcacccaccacaaggatgatcctcctcctccagaagatgatgagaacaaggagaagaggacagatgacatccctgtgtgggaccaggagttcctgaaggtggaccagggcaccctgtttgagctgatcctggccgccaactacctggacatcaagggcctgctggatgtgacctgcaagacagtggccaacatgatcaagggcaagaccccagaggagatcaggaagaccttcaacatcaagaatgacttcacagaggaggaggaggcccaggtgggcagcacccagttctgcctgtag

SEQ ID NO: 169281 - DNA, 57 bp, Artificial Sequence
  derived and/or modified sequence
atgcccagcatcaagctgcagagcagtgatggagagatctttgaggtggatgtgtag

SEQ ID NO: 169282 - DNA, 429 bp, Artificial Sequence
  derived and/or modified sequence
atgcccagcatcaagctgcagagcagcgacggcgagatcttcgaggtagatgtcgagatcgcgaaacaatcagtgacaatcaaaactatgctggaagatctgggaatggacgatgagggagacgatgatcctgtgcccctgcctaacgtcaatgcagccattctgaagaaggtgattcagtggtgtactcaccacaaagatgacccgcctccacccgaagacgatgagaataaggaaaagcggacagacgacattcctgtctgggaccaggagtttctgaaggtcgatcaagggacactgttcgagctgatcctggctgcaaattacctggatattaaagggttactggatgtaacttgtaaaacagtggccaatatgatcaagggaaagactcccgaagaaattcgcaaaacatttaacatcaagtag

SEQ ID NO: 169283 - DNA, 309 bp, Artificial Sequence
  derived and/or modified sequence
atgcccagcatcaagctgcagagcagcgacggcgagatcttcgaggtggatgtggagatcgctaagcaatctgtgacaattaaaacgatgctggaagatctgggcatggacgacgagggcgatgacgatccagttcctctgccaaacgtcaacgcagccatcctaaaaaaagtgatccagtggtgtactcaccacaaggatgaccccccccccccagaagatgacgagaacaaggaaaagagaaccgacgacatccccgtttgggatcaggaattcttaaaggtcgatcaagggaccttgttcgagtag

SEQ ID NO: 169284 - DNA, 483 bp, Artificial Sequence
  derived and/or modified sequence
atgcccagcatcaagctgcagagcagcgacggcgagatcttcgaggtagacgtggagattgctaaacaatctgttaccatcaaaactatgttggaggacctcggcatggacgatgagggtgatgatgatccagttcccctccccaacgtcaacgcagccattttgaaaaaagtgatccagtggtgcacccaccacaaggacgacccaccacccccggaagacgacgagaacaaagaaaagagaaccgatgatattcctgtctgggaccaggaatttctgaaggtggatcagggcacgctgtttgagctgattctagctgctaattacctggacatcaaaggactgctggatgtcacctgcaagacagttgctaacatgatcaaaggaaaaaccccggaagagatcaggaagacgttcaacatcaaaaacgatttcacagaggaagaagaggcccaggtggggtcaacgcagttttgcttatag

SEQ ID NO: 169285 - DNA, 57 bp, Artificial Sequence
  derived and/or modified sequence
atgcccagcatcaagctgcagagcagcgacggcgagatcttcgaggtcgatgtctag

SEQ ID NO: 169286 - DNA, 429 bp, Artificial Sequence
  derived and/or modified sequence
atgcccagtatcaaactgcaatcttcagacggcgagatcttcgaagtcgatgtagagatcgcaaagcagtctgtcactattaaaacgatgctcgaagacctggggatggatgacgaaggcgacgacgaccccgtgccactgccaaatgtcaacgcagccattttgaagaaggtcattcagtggtgtacccaccacaaggacgatcctccacctcccgaagatgacgaaaacaaagagaagcggacagatgacataccagtgtgggaccaggaattcttgaaggtggaccaggggactttgtttgagctgattcttgcggcaaactacctcgatattaaggggctactcgacgtgacatgtaaaactgtggctaatatgatcaaagggaagactccagaagagatccgaaagacttttaacatcaaatag

SEQ ID NO: 169287 - DNA, 309 bp, Artificial Sequence
  derived and/or modified sequence
atgccgtctattaaactccagagctctgatggcgagatttttgaggtcgatgtcgagattgccaagcagagcgttactattaagaccatgctcgaagacctgggaatggacgacgagggggatgacgaccctgtccctttgcccaacgtgaacgctgcaatattgaagaaggtgattcagtggtgcacacatcataaagacgaccccccaccacccgaggatgacgagaacaaggagaagaggaccgacgatataccggtgtgggaccaagagtttctgaaggtggatcagggcacattattcgagtag

SEQ ID NO: 169288 - DNA, 483 bp, Artificial Sequence
  derived and/or modified sequence
atgccatccatcaaactacagagctccgatggggaaattttcgaggtggacgttgaaatagccaagcagtctgtgaccataaaaacaatgctggaggatttgggaatggacgacgaaggtgatgacgatcctgttccgctgccaaatgttaatgccgctatcctgaagaaggtgattcagtggtgcacacaccataaagatgaccccccacctccagaagacgatgagaataaagaaaagcggacagacgacattccagtctgggaccaggaatttctaaaagtggatcagggcacactcttcgagcttattctggcggcaaactatctggatatcaagggtctgttggacgttacctgcaaaaccgtcgcaaatatgatcaaaggaaaaacgcctgaagaaattaggaagactttcaatatcaagaacgacttcaccgaggaggaagaggcccaggtcgggagtacgcagttctgtctgtag

SEQ ID NO: 169289 - DNA, 57 bp, Artificial Sequence
  derived and/or modified sequence
atgccatcgattaaacttcaaagcagcgacggggagatcttcgaggtagacgtctag

SEQ ID NO: 169290 - DNA, 692 bp, Artificial Sequence
  derived and/or modified sequence
gctgtagtggcttcgtcttcggtttttctcttccttcgctaacgcctcccggctctcgtcagcctcccgccggccgtctccttaacaccgaacaccgtgagtagccgcccactgaactggaaagggtcgtggctaccggattgcgtgccggctggcctcaccgctgcggtttgggcctgcccgcggcgggcggtgactgggcctggccttctttcgggcccggtggatcgcgttgtcgaccctgttcttcgggagaccctaccagatgccttcaattaagttgcagagttctgatggagagatatttgaagttgatgtggaaattgccaaacaatctgtgactattaagaccatgttggaagatttgggaatggatgatgaaggagatgatgacccagttcctctaccaaatgtgaatgcagcaatattaaaaaaggtcattcagtggtgcacccaccacaaggatgaccctcctcctcctgaagatgatgagaacaaagaaaagcgaacagatgatatccctgtttgggaccaagaattcctgaaagttgaccaaggaacactttttgaactcattctggctgcaaactacttagacatcaaaggtttgcttgatgttacatgcaagactgttgccaatatgatcaaggggaaaactcctgaggagattcgcaagaccttcaatatcaaaa

SEQ ID NO: 169291 - DNA, 610 bp, Artificial Sequence
  derived and/or modified sequence
tgtaagattatatctttttcctaacgactcataattaatctgaattaataaatgcgttttcagagcaagtaataggttattattatggagatcttgccaagagatctcaaagttggtcacctggacagtcagtactgaaagataaaaagggctctgaaatgaagcttttaagtagatttagggaattgtactcacatctgcttatctttaaatcattttattctcttgtatatggtcttgcattgcctcagacataaatgagcatattctgatgtactctttggatctgaactcatcttcacagatgccttcaattaagttgcagagttctgatggagagatatttgaagttgatgtggaaattgccaaacaatctgtgactattaagaccatgttggaagatttgggaatggatgatgaaggagatgatgacccagttcctctaccaaatgtgaatgcagcaatattaaaaaaggtcattcagtggtgcacccaccacaaggatgaccctcctcctcctgaagatgatgagaacaaagaaaagcgaacagatgatatccctgtttgggaccaagaattcctgaaagttgaccaaggaacactttttgaa

SEQ ID NO: 169292 - DNA, 1683 bp, Artificial Sequence
  derived and/or modified sequence
cgccgcgctgcgacgctgtagtggcttcgtcttcggtttttctcttccttcgctaacgcctcccggctctcgtcagcctcccgccggccgtctccttaacaccgaacaccatgccttcaattaagttgcagagttctgatggagagatatttgaagttgatgtggaaattgccaaacaatctgtgactattaagaccatgttggaagatttgggaatggatgatgaaggagatgatgacccagttcctctaccaaatgtgaatgcagcaatattaaaaaaggtcattcagtggtgcacccaccacaaggatgaccctcctcctcctgaagatgatgagaacaaagaaaagcgaacagatgatatccctgtttgggaccaagaattcctgaaagttgaccaaggaacactttttgaactcattctggctgcaaactacttagacatcaaaggtttgcttgatgttacatgcaagactgttgccaatatgatcaaggggaaaactcctgaggagattcgcaagaccttcaatatcaaaaatgactttactgaagaggaggaagcccaggtaggtagcacacagttttgtctttgatcacatgctcttaaaaagggagtaacacctataacatgccagcaaaagaggtgactgtatcaagtagtcttgatactttagggataatatgtacttaatgtgtcttaaacatactcttactgttctgtctttatgaatctgaacacttagatgatactgcattttaagcataagaacaattagttttcaatgagaagagctcttgttaatgtattaacagttactagttttggcacctgcaactttctgtatagaccatacatatctgacatcagaaaagcaggccctagagagaagtatatactagggtactttagagcaacttaatgaggggaggaaatgaaagaatagatcagaatgattttgttgacatgactacagactgaaataatgtgaatgaattaactgaatttgctctgtcaactttagtaaattgcccattgcctttgctttgttcataatttcagcagggcagaataaaaaccatgggaggcaaagaaaggaaatccggaaatatagtcttaacctggtgttgttctaattttccatctgttcttctgactcaactcactggctatcgatgaatcagtaggtagtatttataagtcttaggaaagactactcaagttaaggtacttccctatatccatctcttttaggtacgcaaagagaaccagtggtgtgaagagaagtgaaatgttgtgcctgacactgtaacactgtaaggattgttccaaatactagttgcactgctctgtttataattgttaatattagacaaacagtagacaaatgcagcagcaagtcaattgtattagcagaatattgtcctcattgcatgtgtagtttgagcacagatcccaaaccttacggccaagtttcttctagtatgatggaaagtttcttttttctttgctctgaataaaactgaactgtgggttctctataagtggcattttgggctttccctcttttttgtaaagcaatgtctgcctagtttattgtccagttaactttagtgaccttttaaaagttggcattgtaaataaaacaacttgcaaaaaagttttctggaatagaattaacaaaa

SEQ ID NO: 169293 - DNA, 748 bp, Artificial Sequence
  derived and/or modified sequence
ctgcattgttagatttgtgattctgcactgttcatttcagtactatctaatataaaaattacatgtttaaatgttttataattaaaaattgggctcaggttaaaatattttcttttggagataccttttgttgtggtcttgtcacaggaagggtcctctactctgcatccttctccattaagcagggacaactgcattattggcaagcgctaagcaacatggagaagcagacatgtttgtgaatcgcaaagtgaaatctgattctctccaactatggatgagtgagagtaggatatttcagtggctggttttaaaacatgctttacttttttgcttcctttgcctaacaacctgtttgctttggggttggcgacaattgtctcagagaagctgaatgaatattttaaccgatgtaatgggtcataagtctttgaacataaaatgggtgtgatgcatgttttaaatgccaaatgatacacttttgggaaaatatatgcgatttgtaatacaacacacctagaaaacttcagaggtgccataagttaatagtgacatcaccggattatgaatacttgagaagcatgggccttttaaaagttgtatgtgagttttaagaggccttgaattaatctgtaccagacataaatgagcatattctgatgtactctttggatctgaactcatcttcacagatgccttcaattaagttgcagagttctgatggagagatatttgaagttgatgtgga

SEQ ID NO: 169294 - protein, 496 aa, Artificial Sequence
  derived and/or modified sequence
MGTQKVTPALIFAITVATIGSFQFGYNTGVINAPEKIIKEFINKTLTDKGNAPPSEVLLTSLWSLSVAIFSVGGMIGSFSVGLFVNRFGRRNSMLIVNLLAVTGGCFMGLCKVAKSVEMLILGRLVIGLFCGLCTGFVPMYIGEISPTALRGAFGTLNQLGIVVGILVAQIFGLEFILGSEELWPLLLGFTILPAILQSAALPFCPESPRFLLINRKEEENAKQILQRLWGTQDVSQDIQEMKDESARMSQEKQVTVLELFRVSSYRQPIIISIVLQLSQQLSGINAVFYYSTGIFKDAGVQEPIYATIGAGVVNTIFTVVSLFLVERAGRRTLHMIGLGGMAFCSTLMTVSLLLKDNYNGMSFVCIGAILVFVAFFEIGPGPIPWFIVAELFSQGPRPAAMAVAGCSNWTSNFLVGLLFPSAAHYLGAYVFIIFTGFLITFLAFTFFKVPETRGRTFEDITRAFEGQAHGADRSGKDGVMEMNSIEPAKETTTNV

SEQ ID NO: 169295 - protein, 422 aa, Artificial Sequence
  derived and/or modified sequence
MIGSFSVGLFVNRFGRRNSMLIVNLLAVTGGCFMGLCKVAKSVEMLILGRLVIGLFCGLCTGFVPMYIGEISPTALRGAFGTLNQLGIVVGILVAQIFGLEFILGSEELWPLLLGFTILPAILQSAALPFCPESPRFLLINRKEEENAKQILQRLWGTQDVSQDIQEMKDESARMSQEKQVTVLELFRVSSYRQPIIISIVLQLSQQLSGINAVFYYSTGIFKDAGVQEPIYATIGAGVVNTIFTVVSLFLVERAGRRTLHMIGLGGMAFCSTLMTVSLLLKDNYNGMSFVCIGAILVFVAFFEIGPGPIPWFIVAELFSQGPRPAAMAVAGCSNWTSNFLVGLLFPSAAHYLGAYVFIIFTGFLITFLAFTFFKVPETRGRTFEDITRAFEGQAHGADRSGKDGVMEMNSIEPAKETTTNV

SEQ ID NO: 169296 - DNA, 1491 bp, Artificial Sequence
  derived and/or modified sequence
atgggaacccagaaagtgactcccgcactaatcttcgctattaccgttgcaacgatcggcagctttcaatttgggtacaacaccggggtcatcaatgcccccgaaaagataataaaagagtttatcaacaagacactgacagacaaggggaatgctccccccagcgaagtgctgcttactagcctgtggagcctgtctgtggccatattcagtgtcgggggtatgataggaagttttagtgttgggctgtttgtgaaccggtttggtcggcgcaattctatgctgattgttaacctgctggcagtgactgggggttgcttcatgggcctctgtaaggtcgcaaagtccgtggaaatgctgatcctcggccgcttggtgatagggctgttctgcggcctgtgtactggctttgtgccgatgtatattggagagatttcccccacagcactccgcggcgcatttggcaccctgaatcagctgggcatagtcgtagggatactggtcgcccaaatcttcggtctggaattcatccttggatctgaggaactttggcccctgctgctgggcttcacaatcctccccgctatactgcagtcagctgccctccctttttgccctgagtctccgagatttctgttgataaatcggaaagaagaagaaaacgcaaagcagatacttcagcgcttatggggaacacaggacgtctctcaggacatccaggagatgaaggatgaaagcgcgagaatgtcccaggagaagcaggtgaccgttctggaactttttagagtgagttcttataggcagcccataataatatcaatcgtactgcagctaagtcagcagctcagtggcattaatgcggtattctattactctacaggtatatttaaggacgcgggcgtccaggaaccaatttacgccaccataggtgctggtgtggtgaataccatctttacagtagtgtctctgtttttggtagaaagggcagggaggaggaccttacatatgatcggtctcggtggtatggctttttgtagtactcttatgacggtgtccttgctgttgaaggacaactacaacggaatgtctttcgtgtgtatcggtgccattctggtgttcgtagccttcttcgaaatcgggccgggtcccattccctggtttatcgtcgctgaactgttttcacagggaccacgcccagctgcaatggctgtggcgggatgttctaactggacctcaaactttctagtggggctcctcttccctagcgccgcacattacctgggggcatatgtatttataatttttaccggtttcttgatcacattccttgcctttacattctttaaagtgccagaaactcggggtcgaaccttcgaggacataactagagccttcgagggccaggcccatggcgccgatcgcagcgggaaggatggcgtaatggagatgaacagtatcgaaccagctaaggaaaccaccactaacgtttag

SEQ ID NO: 169297 - DNA, 1269 bp, Artificial Sequence
  derived and/or modified sequence
atgattggctctttctcggtgggtctttttgtgaatcggtttggaagacggaactcaatgctgattgtgaacctactcgctgtgacggggggatgcttcatgggtctctgcaaggtggcgaaatctgtggagatgctgatcctgggccggctggtgatcgggttgttctgcggcctatgtactggatttgtgcccatgtacattggcgagataagcccaacggccctcagaggcgcctttggcactcttaatcagttaggtattgtcgttggcattctggtggcacagatatttggtctggagttcattcttgggtctgaggaactgtggcctctgttgctggggttcacaattctgcctgccatcctccagagtgccgcactgcctttctgccctgaatctccgcggttcctcctgatcaataggaaagaggaagaaaacgccaagcagattctgcagagattatggggcacgcaggatgtgtctcaggacatacaggagatgaaggatgaatccgctaggatgagccaagagaagcaggttaccgtgctggaactctttcgcgtcagcagctacagacagcctattattatttcaatcgtgctacagctaagccaacagctgtccggcattaatgcagtattctactactcaactgggatcttcaaagacgcaggggtgcaggagccgatctacgctacaatcggagctggcgtcgttaatacaatctttactgttgtaagcctgttcttggtggaacgcgcaggccgccgcacacttcacatgattggactcggagggatggcattttgcagcaccttaatgacagtgagcttactgctgaaggacaattacaatgggatgagttttgtgtgcattggcgcaatactggtgtttgtcgcatttttcgaaatcggcccgggccccattccatggtttattgtcgccgagctttttagccaagggccccggcccgcagctatggcagtggcaggatgttccaactggaccagtaattttctggtcggactactgtttccctctgctgcacattacttgggtgcctatgtgttcatcattttcacaggatttctgatcacttttctagctttcacattttttaaagttcctgagacccggggacgaacattcgaagacataaccagagctttcgagggacaggctcacggtgctgataggtccggcaaggatggagttatggaaatgaacagcatagaacctgcgaaggaaaccaccactaacgtatag

SEQ ID NO: 169298 - DNA, 1491 bp, Artificial Sequence
  derived and/or modified sequence
atgggcacccagaaggtgaccccagccctgatctttgccatcaccgtggccaccatcggcagcttccagtttggctacaacacaggagtcatcaatgcccctgagaagatcatcaaggagttcatcaacaagaccctgacagacaagggaaatgcccctccttctgaggtgctgctgaccagcctgtggagcctgtctgtggccatcttctctgtgggcggcatgattggcagcttctctgtgggcctgtttgtgaaccgcttcggcagaagaaattccatgctgattgtgaacctgctggccgtgactggaggctgcttcatgggcctgtgcaaggtggccaagtctgtggagatgctgatcctgggccgcctggtgattggcctcttctgtggcctgtgcaccggctttgtgcccatgtacatcggggagatcagccccacagccctgcggggggccttcggcaccctgaaccagctgggcatcgtggtgggcatcctggtggcccagatcttcggcctggagttcatcctgggcagcgaggagctgtggcccctgctgctgggcttcaccatcctgcctgccatcctgcagagcgctgccctgcccttctgcccagagagcccccgcttcctgctgatcaacaggaaggaggaggagaatgccaagcagatcctgcagaggctgtggggcacccaggatgtgtcccaggacatccaggagatgaaggatgagagcgccaggatgagccaggagaagcaggtgacagtgctggagctgttccgggtgtcctcctaccggcagcccatcatcatcagcatcgtgctgcagctgagccagcagctgagcggcatcaatgctgtgttctactacagcacaggcatcttcaaggatgctggggtgcaggagcccatctatgccaccatcggggccggcgtggtgaacaccatcttcaccgtggtgtccctcttcctggtggagagagctggaagaaggaccctgcacatgattggcctgggcggcatggccttctgcagcaccctgatgacagtgtccctgctgctgaaggacaactacaacggcatgagctttgtgtgcattggagccatcctggtgtttgtggccttctttgaaattggccctggccccatcccctggttcatcgtggccgagctgttcagccagggccccaggcctgctgccatggctgtggccggctgcagcaactggaccagcaacttcctggtgggcctgctcttccccagcgctgcccactacctgggcgcctacgtgttcatcatcttcaccggcttcctgatcaccttcctggccttcaccttcttcaaggtgcctgagacccggggccgcacctttgaggacatcacccgggcctttgagggccaggcccacggggctgacagaagtggcaaggatggagtgatggagatgaacagcattgagcccgccaaggagaccaccaccaacgtgtag

SEQ ID NO: 169299 - DNA, 1269 bp, Artificial Sequence
  derived and/or modified sequence
atgattggcagcttctctgtgggcctgtttgtgaaccgcttcggcagaagaaattccatgctgattgtgaacctgctggccgtgactggaggctgcttcatgggcctgtgcaaggtggccaagtctgtggagatgctgatcctgggccgcctggtgattggcctcttctgtggcctgtgcaccggctttgtgcccatgtacatcggggagatcagccccacagccctgcggggggccttcggcaccctgaaccagctgggcatcgtggtgggcatcctggtggcccagatcttcggcctggagttcatcctgggcagcgaggagctgtggcccctgctgctgggcttcaccatcctgcctgccatcctgcagagcgctgccctgcccttctgcccagagagcccccgcttcctgctgatcaacaggaaggaggaggagaatgccaagcagatcctgcagaggctgtggggcacccaggatgtgtcccaggacatccaggagatgaaggatgagagcgccaggatgagccaggagaagcaggtgacagtgctggagctgttccgggtgtcctcctaccggcagcccatcatcatcagcatcgtgctgcagctgagccagcagctgagcggcatcaatgctgtgttctactacagcacaggcatcttcaaggatgctggggtgcaggagcccatctatgccaccatcggggccggcgtggtgaacaccatcttcaccgtggtgtccctcttcctggtggagagagctggaagaaggaccctgcacatgattggcctgggcggcatggccttctgcagcaccctgatgacagtgtccctgctgctgaaggacaactacaacggcatgagctttgtgtgcattggagccatcctggtgtttgtggccttctttgaaattggccctggccccatcccctggttcatcgtggccgagctgttcagccagggccccaggcctgctgccatggctgtggccggctgcagcaactggaccagcaacttcctggtgggcctgctcttccccagcgctgcccactacctgggcgcctacgtgttcatcatcttcaccggcttcctgatcaccttcctggccttcaccttcttcaaggtgcctgagacccggggccgcacctttgaggacatcacccgggcctttgagggccaggcccacggggctgacagaagtggcaaggatggagtgatggagatgaacagcattgagcccgccaaggagaccaccaccaacgtgtag

SEQ ID NO: 169300 - DNA, 1491 bp, Artificial Sequence
  derived and/or modified sequence
atgggcacccagaaggtgacccccgccctgatcttcgccatcaccgtggcaaccattggaagtttccagtttgggtataacaccggggtcatcaatgcgcccgagaagattatcaaggagttcataaacaaaactttaacagataaagggaacgcccctccgagtgaggtcctgctgacatctctgtggtcattgtccgtggccatcttttctgttggtggcatgataggctctttctccgtgggattgtttgtgaataggttcggcaggcgcaattcaatgcttatcgtgaatctcctggcagtgaccggaggctgctttatgggcctgtgtaaagtcgcaaagagcgtggagatgctgatcttaggacggctggttatcggcctgttctgcgggctctgcacggggtttgtgccaatgtacatcggggagatttcccctacagccctgaggggcgcgtttggcacattgaaccagctcggaatcgttgtcggcatactggtcgcccagatctttggactggagttcatcctgggatcagaggaactctggccattactactgggtttcaccattctgcccgcgatcctgcagtcggctgccttgccattttgtccggagtctcctcggttcctgttgattaaccggaaagaggaagaaaatgccaagcagattctgcagcgattatgggggacacaggatgttagtcaagatatccaagaaatgaaagacgagtccgctcgcatgtcgcaggagaagcaagtcaccgtcctcgagttgttcagagtgtcctcttacagacagcctatcattatcagtattgttttacagcttagtcagcagctgagtggcatcaacgcagtgttttactacagcactgggatcttcaaggacgctggggtgcaggaacctatctatgcaaccatcggagccggggttgtgaatacaattttcaccgtggtctcccttttcctggtggaacgggctggccggcggacactccatatgataggacttggcggaatggctttttgctcaacccttatgaccgtgagcctcctgctcaaagacaactacaatgggatgtcatttgtatgcataggggcaatcctggttttcgtcgcgtttttcgagatcgggcctggtcccattccctggttcattgtcgccgaactgttctcacaagggcctcggccagccgctatggcagtagccgggtgctccaattggacttccaattttctagtgggcttgcttttcccatctgccgcacactacttaggggcttacgtgtttatcattttcacaggcttcctaatcacattcctggcctttaccttcttcaaggttcccgagacgagaggaaggacatttgaggacatcacccgcgctttcgaagggcaggcccatggggccgataggtctggtaaggatggggtgatggagatgaactctatagaaccagcgaaagagaccaccacaaacgtgtag

SEQ ID NO: 169301 - DNA, 1269 bp, Artificial Sequence
  derived and/or modified sequence
atgatcggcagcttcagcgtgggcctgttcgtgaaccggttcggccgaagaaatagtatgctgattgtgaacttactagctgttacaggcgggtgcttcatgggcttgtgtaaggttgcaaagtccgtggaaatgctgatcctcggcagacttgtgattggtcttttctgcggactttgcactgggttcgtccctatgtacatcggggagatttcccctacagccctccgaggtgcgttcggcactctgaaccagctcggaatcgttgtggggatcctggttgctcagattttcggccttgaattcatcctgggcagtgaggagctctggcctttgttgctcggatttactattctgcccgccatactgcaatccgccgccctgcctttttgtccagagtcgccgcgctttcttttgattaaccgcaaggaggaggagaatgcaaagcagatcctacagaggctctggggtacccaggacgtgagccaagacatccaagaaatgaaggacgaaagcgccaggatgagccaggagaagcaggtcaccgttttagagttgttccgtgtcagttcgtatcgccagcccattattatttccattgtattgcagctctctcagcaattatctggcattaatgcagtcttctactacagtaccggaatattcaaagacgcaggtgtgcaggagcctatctatgccaccatcggggcaggggtggttaatacaattttcactgtagtcagtttgttcctggtggagagagctggaagacggacactgcacatgatcggacttggcggtatggccttctgttccactctgatgacggtgtcactcctgctcaaagacaactataacggtatgtccttcgtatgcatcggcgccattctggtcttcgtggctttctttgagatagggcccggcccaatcccatggtttattgtggctgagttattcagtcagggccccaggcctgccgccatggccgtggcgggttgttctaactggacgagcaactttctggtcggcttgctgtttccctcagccgctcactacctcggggcctacgttttcattatcttcacaggttttctgattacatttctggccttcaccttctttaaagtccccgagacacgcggacgaacattcgaagacattacccgggcatttgagggtcaggcccacggagcagaccgctccggcaaggacggcgtcatggagatgaactctatcgagcccgctaaggagaccactacaaatgtctag

SEQ ID NO: 169302 - DNA, 1491 bp, Artificial Sequence
  derived and/or modified sequence
atggggacgcagaaggtgactccggcattgatctttgcaataaccgtcgccacaattggatcctttcagtttggctataacaccggtgtaattaacgcgccagagaaaatcatcaaggaatttattaacaagacgttgaccgataaaggcaacgcaccgccaagcgaagtcctgctgacctcgctgtggtccctttctgtggccatctttagcgtgggcggaatgattgggagcttcagcgttggcctgtttgtcaaccgatttggtcggaggaactcgatgctcattgtgaacctactggctgtgaccggtggatgcttcatgggactgtgcaaagttgcaaaatccgtggaaatgctgattcttgggaggcttgtaattgggctgttctgcggactgtgcaccggattcgtgcctatgtacattggcgagatctcacccactgcattaaggggggcattcggcaccttaaaccagctcggtatcgtggtgggaatactcgttgcacagattttcgggttggagttcattctgggatcagaagaactatggcccctgttgctgggatttacgatcctgccagctatcctgcagtcagcagctctgcctttttgcccagagtcacctaggtttcttctcattaatcggaaggaggaagagaatgctaagcagattctgcagcgattatgggggacacaggacgtctcacaggatatccaagagatgaaagacgaatctgcgaggatgtcacaggaaaaacaagtgacggtgctggagctgtttagagttagcagttaccgacaaccaattattatatccattgtgctgcagctctctcagcagctgtctgggattaacgccgttttttactatagcacagggatattcaaggatgctggcgtccaggaacctatctacgcaaccatcggagctggcgtcgtcaacactatatttactgtcgtgagcctgtttctagtggaacgggcaggcaggagaactctacatatgattgggctgggaggaatggctttctgcagtactcttatgaccgtgtcgctactactgaaggataattataacggcatgtccttcgtgtgtataggcgctatcctagtgtttgtagctttcttcgagattggcccaggccctattccttggtttatcgtggccgaactcttctcccaggggccacggccagcagctatggcagtggccggttgtagcaactggacctctaatttcctggtcggactgctgtttccttctgccgctcattacttaggggcatacgtgttcataatcttcacgggctttctgatcacctttctggcgtttaccttcttcaaggtacccgagactagaggtaggacctttgaggatatcacacgtgcgttcgaggggcaggcccacggagcagacaggtcagggaaagatggggtcatggagatgaacagcatcgaacccgcaaaggagacaactaccaatgtctag

SEQ ID NO: 169303 - DNA, 1269 bp, Artificial Sequence
  derived and/or modified sequence
atgatagggtccttcagcgtggggttattcgtaaatcgctttggacggcgaaattcgatgctgatagttaatctcctcgctgtcacaggtggctgcttcatggggctgtgcaaggtcgctaaatctgtagagatgctcatcctgggccgtctcgtgatcggactgttctgcggactgtgcactgggtttgtgcctatgtatattggcgaaattagcccgactgctctacggggagcatttggaacccttaatcagttgggaattgtggtgggaatcctagtcgctcaaatttttggcctggagtttatcctgggcagtgaagagctctggccacttttactgggatttacaatcctgcctgctattttacagagcgccgctctgccattttgtcccgaatctcctcggttccttttaatcaaccgcaaggaggaagaaaatgccaagcagattcttcagcgcctatggggaacccaagacgtcagtcaggatatacaggaaatgaaggacgagtcagctcgaatgtcacaagagaagcaagttacggtgctagaactgttcagagtgtcttcatatcgacagcctattattatcagcatcgtgctgcagttgtcccaacagctctccggaatcaatgccgttttttactatagcaccggaatctttaaggatgcaggggtgcaggaacccatttatgccactataggggctggcgtggttaatactatttttacagtggtgtcattatttctggttgaaagggccggtcggagaacactccacatgatcggcctcggaggcatggccttttgctccacactgatgactgtgtccctgctgctgaaagataattacaatggcatgtcatttgtctgtattggggcaattctggtctttgttgccttttttgagatcggtccgggaccaatcccctggttcattgtcgctgaattgttttctcagggtccgaggcctgcagctatggcagtagccggatgttctaattggacctccaatttcttggtaggcctgctctttccatccgccgcacattacctcggtgcttatgtatttattatatttaccggctttctgataactttcctggccttcaccttttttaaggtgcccgagaccagggggcgtacgtttgaggatatcactcgggctttcgaaggtcaagcacacggggctgacagaagtggcaaagatggagtgatggagatgaacagcatagagcccgcaaaggaaaccaccaccaacgtctag

SEQ ID NO: 169304 - DNA, 1491 bp, Artificial Sequence
  derived and/or modified sequence
atggggacccaaaaagtgactccagccctgatatttgccattactgttgccacgatcggaagttttcaattcggctataacacaggagttataaatgctcctgagaaaattatcaaggaatttattaataaaaccctgaccgacaaaggtaatgcaccacccagcgaggttctgctgaccagcttatggtccctgtccgtggcaatcttctcagttggtggcatgataggctctttttccgttggtcttttcgtgaatagattcgggaggaggaactccatgctgatcgtaaatctgctcgccgtcactggggggtgtttcatgggtctctgtaaagttgccaagtccgtggagatgctgatacttgggcgcttggtcatcggtcttttttgcggcttgtgcaccggattcgtccctatgtatataggtgaaattagtccaactgcactccgaggcgcctttggcacccttaatcagttgggcatagtggttgggatccttgtggcgcagatcttcgggctagaattcatcctgggaagtgaggagctgtggcctctgttattaggttttacgattctccccgcaatactgcaatctgctgccctgcccttttgtcccgaatccccgcgcttcttgttgattaaccggaaagaagaggaaaatgctaagcagatcctgcaaagattgtgggggacgcaggacgtcagccaggacatacaggaaatgaaggacgagtctgcccgcatgtcccaagaaaagcaggttacagtactcgagctcttccgggtcagctcgtatagacaaccaattatcatatcaatcgtcctacagctctcacagcagctctccggcatcaatgcagtgttctactacagcacaggaattttcaaggacgcaggagtacaagaacccatctatgccacgataggtgcaggagtggtgaacactatcttcaccgtggtgagcctctttctggttgagcgagccggacgacggacattacacatgattggactcggggggatggctttctgctctactctaatgaccgtctctttgttactgaaggataactataacgggatgtctttcgtgtgtatcggcgcaatccttgtgttcgttgccttcttcgagatcggccccggtcccatcccttggttcatcgtggccgagctgtttagtcagggaccacggcccgccgcaatggccgttgcaggctgctctaactggactagtaattttttagtaggcctgttgtttcccagcgctgcacactacttgggcgcttacgtgtttatcatctttacaggcttcctgatcacatttttggcctttaccttttttaaggtccccgagacgagaggcagaacatttgaggacattacaagagcatttgaaggtcaagcgcatggtgccgatcggagtggcaaagatggtgtgatggagatgaacagtattgaacctgccaaagaaacaaccaccaacgtgtag

SEQ ID NO: 169305 - DNA, 1491 bp, Artificial Sequence
  derived and/or modified sequence
atggggacgcaaaaagtcacccccgctctgatcttcgctataactgtcgccactatcggcagctttcagttcggatacaatactggcgttatcaatgctcccgagaaaatcattaaagagttcatcaataagacactcacagacaagggaaacgcccccccttcagaagtcctgctgacaagcttgtggagcctctctgtcgcaatattttctgttggtgggatgataggctccttctcagtcggattgttcgtaaataggtttggccggagaaattcaatgctcattgtgaatctgcttgccgtgaccggggggtgtttcatgggtctttgcaaggtggccaaatcagtggaaatgttaatcctgggcagattagttattggactgttttgcggtctctgtactggttttgtccctatgtatatcggcgaaatatcaccaaccgcccttcggggagcttttggcaccttaaatcagcttggcatcgttgtgggcatccttgtcgctcagattttcggattggagttcatacttgggagcgaagaactctggcctctgctgctgggcttcacaatcttgccagccattctgcagtctgcagcactgcccttttgtccagagtctccccgcttcctgcttattaatagaaaagaagaagagaacgctaaacagatccttcaaaggctgtggggcacccaggatgtcagtcaagatatacaggaaatgaaggatgagtccgcccggatgtctcaggagaagcaggtcacagtgctggagctcttccgtgtttcgagttacaggcagcctatcatcatttcaattgtcctacagctaagccaacaactgtcagggatcaacgcagttttctattacagcacaggaattttcaaagatgccggagtacaggaaccaatctacgccactatcggcgctggcgttgtaaataccattttcaccgtagttagcctgttcctggtcgagagggctggccggcgaaccttgcacatgattggtttgggaggtatggcgttttgctctactttgatgaccgtgagtcttctgctcaaagacaactacaacggtatgtccttcgtctgtattggagctatccttgtgttcgttgctttttttgagattggccccggacccatcccctggtttatcgtggcagagctcttttctcaggggcctcggcctgcagccatggcagtcgctggatgtagcaattggacctcaaactttttggtgggtctgttgttcccctccgcagcacattacttgggagcctacgtgttcatcatttttaccggattcttgataaccttcctggcctttaccttctttaaagtaccagaaacacgcggcagaactttcgaggatattactagagccttcgaaggccaagcgcatggagctgatcgaagcggaaaggatggcgtaatggaaatgaactctatagaacctgccaaagaaacaacgaccaatgtgtag

SEQ ID NO: 169306 - DNA, 3915 bp, Artificial Sequence
  derived and/or modified sequence
gtggggtggggtggggctgggggcttgtcgccctttcaggctccaccctttgcggagattataaatagtcatgatcccagcgagacccagagatgctgtaatggtaagactttggatccttcctgaggacgtggagaaaacttgctgctgagaaggacattttgaaggttttgttggctgaaaaagctgtttctggaatcacccctagatctttcttgaagacttgaattagattacagcgatggggacacagaaggtcaccccagctctgatatttgccatcacagttgctacaatcggctctttccaatttggctacaacactggggtcatcaatgctcctgagaagatcataaaggaatttatcaataaaactttgacggacaagggaaatgccccaccctctgaggtgctgctcacgtctctctggtccttgtctgtggccatattttccgtcgggggtatgatcggctccttttccgtcggactcttcgtcaaccgctttggcaggcgcaattcaatgctgattgtcaacctgttggctgtcactggtggctgctttatgggactgtgtaaagtagctaagtcggttgaaatgctgatcctgggtcgcttggttattggcctcttctgcggactctgcacaggttttgtgcccatgtacattggagagatctcgcctactgccctgcggggtgcctttggcactctcaaccagctgggcatcgttgttggaattctggtggcccagatctttggtctggaattcatccttgggtctgaagagctatggccgctgctactgggttttaccatccttcctgctatcctacaaagtgcagcccttccattttgccctgaaagtcccagatttttgctcattaacagaaaagaagaggagaatgctaagcagatcctccagcggttgtggggcacccaggatgtatcccaagacatccaggagatgaaagatgagagtgcaaggatgtcacaagaaaagcaagtcaccgtgctagagctctttagagtgtccagctaccgacagcccatcatcatttccattgtgctccagctctctcagcagctctctgggatcaatgctgtgttctattactcaacaggaatcttcaaggatgcaggtgttcaagagcccatctatgccaccatcggcgcgggtgtggttaatactatcttcactgtagtttctctatttctggtggaaagggcaggaagaaggactctgcatatgataggccttggagggatggctttttgttccacgctcatgactgtttctttgttattaaaggataactataatgggatgagctttgtctgtattggggctatcttggtctttgtagccttctttgaaattggaccaggccccattccctggtttattgtggccgaactcttcagccagggcccccgcccagctgcgatggcagtggccggctgctccaactggacctccaacttcctagtcggattgctcttcccctccgctgctcactatttaggagcctacgtttttattatcttcaccggcttcctcattaccttcttggcttttaccttcttcaaagtccctgagacccgtggcaggacttttgaggatatcacacgggcctttgaagggcaggcacacggtgcagatagatctggaaaggacggcgtcatggagatgaacagcatcgagcctgctaaggagaccaccaccaatgtctaagtcgtgcctccttccacctccctcccggcatgggaaagccacctctccctcaacaagggagagacctcatcaggatgaacccaggacgcttctgaatgctgctacttaattcctttctcatcccacgcactccatgagcaccccaaggctgcggtttgttggatcttcaatggctttttaaattttatttcctggacatcctcttctgcttaggagagaccgagtgaacctaccttcatttcaggagggattggccgcttggcacatgacaactttgccagcttttcctcccttgggttctgatattgccgcactaggggatataggagaggaaaagtaaggtgcagttcccccaacctcagacttaccaggaagcagatacatatgagtgtggaagccggagggtgtttatgtaagagcaccttcctcacttccatacagctctacgtggcaaattaacttgagttttatttattttatcctctggtttaattacataattttttttttttaactttaagtttcaggatacatgtgccgaatgtgcaggtttgttacataggtatatatatgccatgatggaaatatttatttttttaagcgtaattttgccaaataataaaaacagaaggaaattgagattagagggaggtgtttaaagagaggttatagagtagaagatttgatgctggagaggttaaggtgcaataagaatttagggagaaatgttgttcattattggagggtaaatgatgtggtgcctgaggtctgtacgttacctcttaacaatttctgtccttcagatggaaactctttaacttctcgtaaaagtcatatacctatataataaagctactgatttcctttggagcttttttctttaagataatagtttacatgtagtagtacttgaaatctaggattattaactaatatgggcattgtagttaatgatggttgatgggttctaattttggatggagtccagggaagagaaagtgatttctagaaagcctgttcccctcactggatgaaataactccttcttgtagtagtctcattacttttgaagtaatcccgccacctatctcgtgggagagccatccaaataagaaacctaaaataattggttcttggtagagattcattatttttccactttgttctttaggagattttaggtgttgattttctgttgtattttaactcatacctttaaaggaattccccaaagaatgtttatagcaaacttggaatttgtaacctcagctctgggagaggatttttttctgagcgattattatctaaagtgtgttgttgctttaggctcacggcacgcttgcgtatgtctgttaccatgtcactgtggtcctatgccgaatgccctcaggggacttgaatctttccaataaaccaggtttagacagtatgagtcaatgtgcagtgtagcccacacttgagaggatgaatgtatgtgcactgtcactttgctctgggtggaagtacgttattgttgacttattttctctgtgtttgttcctacagcccctttttcatatgttgctcagtctccctttcccttcttggtgcttacacatctcagaccctttagccaaacccttgtcagtgacagtattttggttcttagttctcactgttccctctgctcctggagcctttgaataaaaatgcacgtagctgaggccggatgcggtggctcacgcctgtaatcccagcactttgggaggcctaggcgggcggtcaggggttcgagaccagtctggccaacatcgtgaaaccctgtctctactaaaaatgcaaaaattagccgggcgtggtggcgggcgcctgtaatcccagctacttgggaagctgaggcgggagaatcatgtgaacccgggacgcaggggttgcagtgagcggagatcgcatcattgcactctagcctgggccacagggcgagactccgtctcaaaaaaaaaaaaatgcacatagctatcaagtgtgctttagcttgaaaaggtgaccttgcaacttcatgtcaacttctggctcctcaaacagtaggttggcagtaaggcagggtcccatttctcactgagaagattgtgaatatttccatatggattttctattgttactctggttctttgttttaaaataaaaattctgaatgtacacga

SEQ ID NO: 169307 - DNA, 1481 bp, Artificial Sequence
  derived and/or modified sequence
agagatgctgtaatggtaagactttggatccttcctgaggacgtggagaaaacttgctgctgagaagatcataaaggaatttatcaataaaactttgacggacaagggaaatgccccaccctctgaggtgctgctcacgtctctctggtccttgtctgtggccatattttccgtcgggggtatgatcggctccttttccgtcggactcttcgtcaaccgctttggcaggcgcaattcaatgctgattgtcaacctgttggctgtcactggtggctgctttatgggactgtgtaaagtagctaagtcggttgaaatgctgatcctgggtcgcttggttattggcctcttctgcggactctgcacaggttttgtgcccatgtacattggagagatctcgcctactgccctgcggggtgcctttggcactctcaaccagctgggcatcgttgttggaattctggtggcccagatctttggtctggaattcatccttgggtctgaagagctatggccgctgctactgggttttaccatccttcctgctatcctacaaagtgcagcccttccattttgccctgaaagtcccagatttttgctcattaacagaaaagaagaggagaatgctaagcagatcctccagcggttgtggggcacccaggatgtatcccaagacatccaggagatgaaagatgagagtgcaaggatgtcacaagaaaagcaagtcaccgtgctagagctctttagagtgtccagctaccgacagcccatcatcatttccattgtgctccagctctctcagcagctctctgggatcaatgctgtgttctattactcaacaggaatcttcaaggatgcaggtgttcaagagcccatctatgccaccatcggcgcgggtgtggttaatactatcttcactgtagtttctctatttctggtggaaagggcaggaagaaggactctgcatatgataggccttggagggatggctttttgttccacgctcatgactgtttctttgttattaaaggataactataatgggatgagctttgtctgtattggggctatcttggtctttgtagccttctttgaaattggaccaggccccattccctggtttattgtggccgaactcttcagccagggcccccgcccagctgcgatggcagtggccggctgctccaactggacctccaacttcctagtcggattgctcttcccctccgctgctcactatttaggagcctacgtttttattatcttcaccggcttcctcattaccttcttggcttttaccttcttcaaagtccctgagacccgtggcaggacttttgaggatatcacacgggcctttgaagggcaggcacacggtgcagatagatctggaaaggacggcgtcatggagatgaacagcatcgagcctgctaaggagaccaccaccaatgtctaagtcgtgcctccttccacctccctcccggcat

SEQ ID NO: 169308 - DNA, 1491 bp, Artificial Sequence
  derived and/or modified sequence
atgggcacccagaaggtgacccccgccctgatcttcgccatcaccgtggccaccatcggcagcttccagttcggctacaacaccggcgtgatcaacgcccccgagaagatcatcaaggagttcatcaacaagaccctgaccgacaagggcaacgccccccccagcgaggtgctgctgaccagcctgtggagcctgagcgtggccatcttcagcgtgggcggcatgatcggcagcttcagcgtgggcctgttcgtgaacagattcggcagaagaaacagcatgctgatcgtgaacctgctggccgtgaccggcggctgcttcatgggcctgtgcaaggtggccaagagcgtggagatgctgatcctgggcagactggtgatcggcctgttctgcggcctgtgcaccggcttcgtgcccatgtacatcggcgagatcagccccaccgccctgagaggcgccttcggcaccctgaaccagctgggcatcgtggtgggcatcctggtggcccagatcttcggcctggagttcatcctgggcagcgaggagctgtggcccctgctgctgggcttcaccatcctgcccgccatcctgcagagcgccgccctgcccttctgccccgagagccccagattcctgctgatcaacagaaaggaggaggagaacgccaagcagatcctgcagagactgtggggcacccaggacgtgagccaggacatccaggagatgaaggacgagagcgccagaatgagccaggagaagcaggtgaccgtgctggagctgttcagagtgagcagctacagacagcccatcatcatcagcatcgtgctgcagctgagccagcagctgagcggcatcaacgccgtgttctactacagcaccggcatcttcaaggacgccggcgtgcaggagcccatctacgccaccatcggcgccggcgtggtgaacaccatcttcaccgtggtgagcctgttcctggtggagagagccggcagaagaaccctgcacatgatcggcctgggcggcatggccttctgcagcaccctgatgaccgtgagcctgctgctgaaggacaactacaacggcatgagcttcgtgtgcatcggcgccatcctggtgttcgtggccttcttcgagatcggccccggccccatcccctggttcatcgtggccgagctgttcagccagggccccagacccgccgccatggccgtggccggctgcagcaactggaccagcaacttcctggtgggcctgctgttccccagcgccgcccactacctgggcgcctacgtgttcatcatcttcaccggcttcctgatcaccttcctggccttcaccttcttcaaggtgcccgagaccagaggcagaaccttcgaggacatcaccagagccttcgagggccaggcccacggcgccgacagaagcggcaaggacggcgtgatggagatgaacagcatcgagcccgccaaggagaccaccaccaacgtgtag

SEQ ID NO: 169309 - DNA, 1269 bp, Artificial Sequence
  derived and/or modified sequence
atgatcggcagcttcagcgtgggcctgttcgtgaacagattcggcagaagaaacagcatgctgatcgtgaacctgctggccgtgaccggcggctgcttcatgggcctgtgcaaggtggccaagagcgtggagatgctgatcctgggcagactggtgatcggcctgttctgcggcctgtgcaccggcttcgtgcccatgtacatcggcgagatcagccccaccgccctgagaggcgccttcggcaccctgaaccagctgggcatcgtggtgggcatcctggtggcccagatcttcggcctggagttcatcctgggcagcgaggagctgtggcccctgctgctgggcttcaccatcctgcccgccatcctgcagagcgccgccctgcccttctgccccgagagccccagattcctgctgatcaacagaaaggaggaggagaacgccaagcagatcctgcagagactgtggggcacccaggacgtgagccaggacatccaggagatgaaggacgagagcgccagaatgagccaggagaagcaggtgaccgtgctggagctgttcagagtgagcagctacagacagcccatcatcatcagcatcgtgctgcagctgagccagcagctgagcggcatcaacgccgtgttctactacagcaccggcatcttcaaggacgccggcgtgcaggagcccatctacgccaccatcggcgccggcgtggtgaacaccatcttcaccgtggtgagcctgttcctggtggagagagccggcagaagaaccctgcacatgatcggcctgggcggcatggccttctgcagcaccctgatgaccgtgagcctgctgctgaaggacaactacaacggcatgagcttcgtgtgcatcggcgccatcctggtgttcgtggccttcttcgagatcggccccggccccatcccctggttcatcgtggccgagctgttcagccagggccccagacccgccgccatggccgtggccggctgcagcaactggaccagcaacttcctggtgggcctgctgttccccagcgccgcccactacctgggcgcctacgtgttcatcatcttcaccggcttcctgatcaccttcctggccttcaccttcttcaaggtgcccgagaccagaggcagaaccttcgaggacatcaccagagccttcgagggccaggcccacggcgccgacagaagcggcaaggacggcgtgatggagatgaacagcatcgagcccgccaaggagaccaccaccaacgtgtag

SEQ ID NO: 169310 - protein, 917 aa, Artificial Sequence
  derived and/or modified sequence
MADEALAGLDEGALRKLLEVTADLAERRRIRSAIRELQRQELEREEEALASKRFRAERQDNKENWLHSQQREAEQRAALARLAGQLESMNDVEELTALLRSAGEYEERKLIRAAIRRVRAQEIEAATLAGRLYSGRPNSGSREDSKGLAAHRLEQCEVPEREEQEQQAEVSKPTPTPEGTSQDVTTVTLLLRAPPGSTSSSPASPSSSPTPASPEPPLEPAEAQCLTAEVPGSPEPPPSPPKTTSPEPQESPTLPSTEGQVVNKLLSGPKETPAAQSPTRGPSDTKRADVAGPRPCQRSLSVLSPRQPAQNRESTPLASGPSSFQRAGSVRDRVHKFTSDSPMAARLQDGTPQAALSPLTPARLLGPSLTSTTPASSSSGSSSRGPSDTSSRFSKEQRGVAQPLAQLRSCPQEEGPRGRGLAARPLENRAGGPVARSEEPGAPLPVAVGTAEPGGSMKTTFTIEIKDGRGQASTGRVLLPTGNQRAELTLGLRAPPTLLSTSSGGKSTITRVNSPGTLARLGSVTHVTSFSHAPPSSRGGCSIKMEAEPAEPLAAAVEAANGAEQTRVNKAPEGRSPLSAEELMTIEDEGVLDKMLDQSTDFEERKLIRAALRELRQRKRDQRDKERERRLQEARGRPGEGRGNTATETTTRHSQRAADGSAVSTVTKTERLVHSNDGTRTARTTTVESSFVRRSENGSGSTMMQTKTFSSSSSSKKMGSIFDREDQASPRAGSLAALEKRQAEKKKELMKAQSLPKTSASQARKAMIEKLEKEGAAGSPGGPRAAVQRSTSFGVPNANSIKQMLLDWCRAKTRGYEHVDIQNFSSSWSDGMAFCALVHNFFPEAFDYGQLSPQNRRQNFEVAFSSAEMLVDCVPLVEVDDMMIMGKKPDPKCVFTYVQSLYNHLRRHELRLRGKNV

SEQ ID NO: 169311 - protein, 718 aa, Artificial Sequence
  derived and/or modified sequence
MRAVLDTADIAIVALYFILVMCIGFFAMWKSNRSTVSGYFLAGRSMTWVTIGASLFVSNIGSEHFIGLAGSGAASGFAVGAWEFNALLLLQLLGWVFIPIYIRSGVYTMPEYLSKRFGGHRIQVYFAALSLILYIFTKLSVDLYSGALFIQESLGWNLYVSVILLIGMTALLTVTGGLVAVIYTDTLQALLMIIGALTLMIISIMEIGGFEEVKRRYMLASPDVTSILLTYNLSNTNSCNVSPKKEALKMLRNPTDEDVPWPGFILGQTPASVWYWCADQVIVQRVLAAKNIAHAKGSTLMAGFLKLLPMFIIVVPGMISRILFTDDIACINPEHCMLVCGSRAGCSNIAYPRLVMKLVPVGLRGLMMAVMIAALMSDLDSIFNSASTIFTLDVYKLIRKSASSRELMIVGRIFVAFMVVISIAWVPIIVEMQGGQMYLYIQEVADYLTPPVAALFLLAIFWKRCNEQGAFYGGMAGFVLGAVRLILAFAYRAPECDQPDNRPGFIKDIHYMYVATGLFWVTGLITVIVSLLTPPPTKEQIRTTTFWSKKNLVVKENCSPKEEPYQMQEKSILRCSENNETINHIIPNGKSEDSIKGLQPEDVNLLVTCREEGNPVASLGHSEAETPVDAYSNGQAALMGEKERKKETDDGGRYWKFIDWFCGFKSKSLSKRSLRDLMEEEAVCLQMLEETRQVKVILNIGLFAVCSLGIFMFVYFSL

SEQ ID NO: 169312 - DNA, 2157 bp, Artificial Sequence
  derived and/or modified sequence
atgagagccgtgctggacaccgccgacatcgccatcgtggccctgtacttcatcctggtgatgtgcatcggcttcttcgccatgtggaagagcaacagaagcaccgtgagcggctacttcctggccggcagaagcatgacctgggtgaccatcggcgccagcctgttcgtgagcaacatcggcagcgagcacttcatcggcctggccggcagcggcgccgccagcggcttcgccgtgggcgcctgggagttcaacgccctgctgctgctgcagctgctgggctgggtgttcatccccatctacatcagaagcggcgtgtacaccatgcccgagtacctgagcaagagattcggcggccacagaatccaggtgtacttcgccgccctgagcctgatcctgtacatcttcaccaagctgagcgtggacctgtacagcggcgccctgttcatccaggagagcctgggctggaacctgtacgtgagcgtgatcctgctgatcggcatgaccgccctgctgaccgtgaccggcggcctggtggccgtgatctacaccgacaccctgcaggccctgctgatgatcatcggcgccctgaccctgatgatcatcagcatcatggagatcggcggcttcgaggaggtgaagagaagatacatgctggccagccccgacgtgaccagcatcctgctgacctacaacctgagcaacaccaacagctgcaacgtgagccccaagaaggaggccctgaagatgctgagaaaccccaccgacgaggacgtgccctggcccggcttcatcctgggccagacccccgccagcgtgtggtactggtgcgccgaccaggtgatcgtgcagagagtgctggccgccaagaacatcgcccacgccaagggcagcaccctgatggccggcttcctgaagctgctgcccatgttcatcatcgtggtgcccggcatgatcagcagaatcctgttcaccgacgacatcgcctgcatcaaccccgagcactgcatgctggtgtgcggcagcagagccggctgcagcaacatcgcctaccccagactggtgatgaagctggtgcccgtgggcctgagaggcctgatgatggccgtgatgatcgccgccctgatgagcgacctggacagcatcttcaacagcgccagcaccatcttcaccctggacgtgtacaagctgatcagaaagagcgccagcagcagagagctgatgatcgtgggcagaatcttcgtggccttcatggtggtgatcagcatcgcctgggtgcccatcatcgtggagatgcagggcggccagatgtacctgtacatccaggaggtggccgactacctgaccccccccgtggccgccctgttcctgctggccatcttctggaagagatgcaacgagcagggcgccttctacggcggcatggccggcttcgtgctgggcgccgtgagactgatcctggccttcgcctacagagcccccgagtgcgaccagcccgacaacagacccggcttcatcaaggacatccactacatgtacgtggccaccggcctgttctgggtgaccggcctgatcaccgtgatcgtgagcctgctgacccccccccccaccaaggagcagatcagaaccaccaccttctggagcaagaagaacctggtggtgaaggagaactgcagccccaaggaggagccctaccagatgcaggagaagagcatcctgagatgcagcgagaacaacgagaccatcaaccacatcatccccaacggcaagagcgaggacagcatcaagggcctgcagcccgaggacgtgaacctgctggtgacctgcagagaggagggcaaccccgtggccagcctgggccacagcgaggccgagacccccgtggacgcctacagcaacggccaggccgccctgatgggcgagaaggagagaaagaaggagaccgacgacggcggcagatactggaagttcatcgactggttctgcggcttcaagagcaagagcctgagcaagagaagcctgagagacctgatggaggaggaggccgtgtgcctgcagatgctggaggagaccagacaggtgaaggtgatcctgaacatcggcctgttcgccgtgtgcagcctgggcatcttcatgttcgtgtacttcagcctgtag

SEQ ID NO: 169313 - DNA, 2157 bp, Artificial Sequence
  derived and/or modified sequence
atgagagcagtgctagataccgccgacatcgctatagtagccttgtacttcatactggttatgtgtatcggattctttgctatgtggaagagtaatcgctctacagtaagtggttacttcttagcaggcaggagcatgacatgggtgacaattggagcatccttattcgtgtcgaatataggcagcgagcacttcattggcctcgccggttcaggagcagcttcaggctttgccgttggcgcctgggagttcaatgcgctgctgttgctacagctgctgggctgggtattcatccccatctacatacggtctggggtgtacacaatgccagaatatctcagtaagcgcttcggtggtcaccggatacaggtgtactttgccgccctgtccctaatcctgtacatcttcaccaagctgagtgttgacctgtattcgggagctctgtttatccaggagagtctaggatggaatttgtacgtttcagtgatactccttattggcatgaccgccctgctcacagtaaccggcggattggtggctgtgatttacaccgatactctgcaagctctgttgatgataataggtgctctgacattaatgattatctcaatcatggagatcggcgggttcgaagaagtcaagagaaggtatatgctcgctagcccagatgtgacatcgatattgctaacctacaacctgagtaacaccaactcatgtaacgtgtcgccgaaaaaagaggctctgaaaatgctgagaaatcctaccgacgaagacgtaccctggcccggatttatcttggggcagacacctgcttccgtctggtattggtgtgctgatcaggttattgtgcagcgtgttctcgcagctaaaaatatcgcacacgcaaagggttcaaccctgatggcgggtttcctgaagctattaccaatgttcatcatcgtggtgcccggcatgatttcccgaattctgtttaccgacgatatcgcttgtatcaaccccgaacactgcatgctcgtgtgcgggtcacgagctggctgctctaacatcgcctatccgagactggttatgaaattggtgcccgtgggactgcggggcctcatgatggcggtgatgatcgccgctctcatgagcgacctggattctatttttaatagtgctagtactattttcacactggacgtgtacaagcttattcgaaagtccgcatcatcgcgggagttgatgattgtcgggcgaatctttgtggcttttatggtggtgatctctattgcctgggtacccatcattgtggagatgcagggaggccagatgtacctctacatacaagaggttgccgactacttgactccgcccgtggccgcactatttcttctagccattttctggaaacgttgcaacgagcagggggctttttatgggggaatggcaggctttgtgctcggcgccgtgagacttatcttggccttcgcctatagggccccagaatgtgaccaacctgataatcgccccggctttataaaggacattcattacatgtatgtggccaccgggctgttttgggtcactgggttgataaccgtaatagtaagcctcttaacaccacctccgactaaagaacagatcagaaccacgacattctggtccaagaaaaacctcgtggtgaaggagaattgttctcctaaggaagagccctaccagatgcaggaaaagagcatcctgcgctgctctgaaaacaacgagactatcaaccacatcatacccaacgggaagagcgaagactccataaaaggcctgcagccagaagacgtcaacttgttggtcacatgcagggaggagggcaatccggtggcctctttgggccacagtgaggctgagactcccgtggatgcttacagcaacggtcaggccgccttaatgggcgaaaaggaacgtaaaaaggagactgacgacggcgggcggtactggaaatttattgactggttttgtggcttcaagtctaaaagtctgagcaagagatccctcagggatctgatggaagaggaggcagtgtgtctgcagatgctggaagagactcgtcaagttaaggtaatcctgaacatcgggttgttcgccgtctgcagcttgggcattttcatgtttgtttatttttctctctag

SEQ ID NO: 169314 - DNA, 2157 bp, Artificial Sequence
  derived and/or modified sequence
atgagagctgtgctggacacagctgacatcgccatcgtggccctgtacttcatcctggtgatgtgcatcggcttctttgccatgtggaagagcaacagaagcacagtgtctggctacttcctggccggccgctccatgacctgggtgaccatcggggccagcctgtttgtgagcaacatcggcagcgagcacttcatcggcctggccggcagcggggccgccagcggctttgctgtgggcgcctgggagttcaatgccctgctgctgctgcagctgctgggctgggtgttcatccccatctacatccgcagcggcgtgtacaccatgcctgagtacctgagcaagagatttggaggccaccgcatccaggtgtactttgctgccctgagcctcatcctgtacatcttcaccaagctgtctgtggacctgtacagcggggccctcttcatccaggagagcctgggctggaacctgtatgtgtctgtcatcctgctgattggcatgacagccctgctgactgtgactggaggcctggtggccgtcatctacacagacaccctgcaggccctgctgatgatcatcggggccctgaccctgatgatcatcagcatcatggagattggaggctttgaggaggtgaagaggcgctacatgctggccagcccagatgtgaccagcatcctgctgacctacaacctgagcaacaccaacagctgcaatgtgagccccaagaaggaggccctgaagatgctgaggaaccccacagatgaagatgtgccctggccaggcttcatcctgggccagaccccagcctctgtgtggtactggtgtgccgaccaggtgattgtgcagagggtgctggccgccaagaacatcgcccacgccaagggcagcaccctgatggccggcttcctgaagctgctgcccatgttcatcatcgtggtgcccggcatgatcagccgcatcctcttcacagatgacatcgcctgcatcaaccctgagcactgcatgctggtgtgtggcagccgggccggctgcagcaacatcgcctacccccggctggtgatgaagctggtgcctgtgggcctgcggggcctgatgatggctgtgatgattgctgccctgatgtctgacctggacagcatcttcaacagcgccagcaccatcttcaccctggatgtgtacaagctgatcaggaagagcgccagcagccgggagctgatgattgtgggccgcatctttgtggccttcatggtggtgatcagcatcgcctgggtgcccatcatcgtggagatgcagggcggccagatgtacctgtacatccaggaggtggccgactacctgaccccacctgtggccgccctcttcctgctggccatcttctggaagcgctgcaatgagcagggcgccttctacggcggcatggccggctttgtgctgggcgctgtgcggctcatcctggcctttgcctaccgggccccagaatgtgaccagcctgacaacagacctggcttcatcaaggacatccactacatgtatgtggccaccggcctcttctgggtgacaggcctcatcaccgtcatcgtgtccctgctgaccccaccacccaccaaggagcagatccgcaccaccaccttctggagcaagaagaacctggtggtgaaggagaactgcagccccaaggaggagccctaccagatgcaggagaagagcatcctgcgctgcagtgaaaataatgagaccatcaaccacatcatccccaacgggaagtctgaggacagcatcaagggcctgcagccagaagatgtgaacctgctggtgacctgccgggaggagggcaaccctgtggccagcctgggccacagcgaggccgagacccctgtggatgcctacagcaatggccaggccgccctgatgggagagaaggagaggaagaaggagacagatgatggcggccgctactggaagttcatcgactggttctgtggcttcaagagcaagagcctgagcaagaggagcctgcgggacctgatggaggaggaggccgtgtgcctgcagatgctggaggagacccggcaggtgaaggtgatcctgaacatcggcctgtttgctgtgtgcagcctgggcatcttcatgtttgtgtacttcagcctgtag

SEQ ID NO: 169315 - DNA, 2157 bp, Artificial Sequence
  derived and/or modified sequence
atgcgggccgtgctggacaccgccgacatcgccatcgtggccctgtacttcattctggtcatgtgcattggattttttgcaatgtggaagtctaacagatcgaccgtgtcaggatacttcctggccggccggagcatgacctgggtgactatcggcgcatctttattcgtgtctaacattggcagtgaacatttcattggacttgcggggagcggcgccgctagcgggttcgctgtgggcgcttgggaattcaacgcactgttactgctgcagcttctgggatgggtgtttattcccatctatataaggagcggagtttacacaatgccagagtacctatctaaaaggtttggtggccaccgtattcaggtctacttcgcagctttgtcactcatcctgtatattttcaccaaactttccgtggatctttattccggtgctctttttatccaggagagcctgggctggaacctctacgtcagcgtcatactgctcatcggcatgacagccctcctgacagttaccggaggcctcgtggcagtgatttataccgatacgcttcaagctctgctcatgattatcggtgctctgaccttaatgatcatcagtataatggaaatcggcgggttcgaggaagtgaagcgacgatacatgttggctagccccgatgtcacgagcatccttctgacctacaacctgtctaacaccaattcctgcaatgtcagtcctaaaaaagaagccctgaaaatgctgcgcaatcctacggatgaggatgtgccgtggcccgggttcattctgggccagacaccagcatccgtatggtactggtgtgctgaccaggtgattgtccagagagtacttgcagctaaaaatattgcccatgcaaaggggagtacccttatggcaggttttctgaaactcctgcccatgttcataatcgtagttcccggtatgatttctaggattctgtttacagacgacattgcctgcataaatccagagcactgcatgctcgtttgtgggtccagggcaggctgctccaacattgcctatcccaggctggttatgaagctcgtgccagtgggcttaaggggtctgatgatggccgtgatgatcgccgcgctcatgtctgatctcgattcaattttcaactctgccagtactattttcaccctggacgtgtacaaactcatccgtaaatccgcaagtagtcgagagctgatgattgttggccggatcttcgtggcgttcatggtcgtgatctccatcgcctgggtgcctattatagtggaaatgcaaggaggacagatgtatctgtacattcaggaggtcgcagactatctcaccccccctgtcgcagccctcttcctgctggcaatcttctggaaacgatgcaacgagcagggagccttttacggcgggatggcgggctttgtgctgggggccgtccgcctcatcctggcctttgcttacagggcgccggagtgcgaccaaccagataatcgacctggatttataaaggacatccattacatgtacgtagcgacagggctgttttgggtgacaggactgatcaccgttatcgtgtcactgctgacgcctccaccaaccaaagagcagatacggaccacaactttttggagtaaaaagaacctggttgtcaaggagaactgttcccctaaagaggagccttatcagatgcaagaaaagagtattcttaggtgttccgaaaataatgaaaccattaatcacattattcccaatggtaagtcagaggacagcattaaaggcttacagcccgaagacgttaacctcctcgtcacatgccgggaagaggggaacccagtcgctagtctaggacactctgaagccgagacccccgtggatgcctattcaaatggacaggcagccctgatgggcgaaaaggaacgaaagaaggaaaccgatgatggagggcggtactggaagttcatagactggttctgcgggtttaagtctaagtccctgagcaagaggtctctgagggacctgatggaggaagaggcagtttgtcttcagatgctcgaggaaactaggcaggttaaagtgatactgaacattggactgttcgccgtgtgttcactaggcatttttatgtttgtctatttctcactctag

SEQ ID NO: 169316 - DNA, 2157 bp, Artificial Sequence
  derived and/or modified sequence
atgcgagcagttctcgacaccgccgacatcgccatcgtcgctctgtatttcattctggttatgtgcatcgggttctttgctatgtggaagtcaaatcggagtacagtgtcaggatattttttagcaggtcgttcaatgacttgggttaccattggcgctagcttatttgtctctaatataggctccgaacatttcattggcctcgcaggctctggagcagcatccgggttcgccgtgggggcttgggagtttaacgcactgcttctgttgcaactgcttggttgggtgtttatccctatctatatcagaagcggggtgtacacaatgccagaatatctgagcaagaggttcggagggcatcggattcaggtttatttcgcagccctgtctctgatactatacatttttacaaaattgtccgtcgacctgtattccggcgctttattcattcaggagagcctcggctggaacctgtacgtcagtgtgattctgctgatcggaatgacagcactgttgacggtgacgggaggcctggtggcagtgatttatacggacacgttgcaggccctcctaatgataattggtgcactgaccctcatgattatctccattatggagatcgggggattcgaagaggtgaaacgcaggtatatgctggcgtcccccgatgtgacatctatcctgctcacctataacttgtccaacactaacagctgtaatgtgagccctaaaaaagaggccttgaaaatgctgcgaaaccccactgacgaggacgtaccatggcctggattcatactgggccagacaccggctagcgtgtggtattggtgtgccgaccaggttatcgtccagagggttttagccgcaaaaaacatcgcccacgccaagggcagtactcttatggctggcttcctgaaactgttgccaatgttcatcatcgtcgttccaggtatgatctcccggattctgtttaccgacgatatcgcctgcatcaacccagagcactgcatgctggtgtgtggcagccgcgctggttgcagcaatattgcatacccacgcctggtgatgaagcttgtccctgtgggcctacggggtcttatgatggccgtgatgattgccgctctgatgagcgacctcgattctatcttcaacagtgcttccacaatttttaccctcgacgtctacaagctgataagaaagagtgcgtctagtcgggaattgatgatcgttggcagaattttcgtggcatttatggtggttatctcaatagcatgggtgcctatcatcgtcgagatgcaggggggacagatgtatctctatatacaggaggtggccgattatcttaccccgcctgtggccgctctgttcctcctcgcaattttctggaagaggtgcaatgagcagggtgcattttacgggggtatggccggatttgttctgggggctgttaggctcatcctggcttttgcttacagagcgcctgagtgtgaccagcctgacaaccgtcctggcttcattaaggacatccattatatgtacgtggcaaccggcctgttctgggttacgggtctgatcacagtaatcgtttctttgctcaccccccctccaactaaagaacagattaggaccacaaccttttggtccaaaaagaatttggtagtaaaagagaattgcagtccgaaggaggaaccctaccagatgcaagagaagagcatacttagatgctcggagaataatgaaactatcaatcacatcatcccgaatggaaagtccgaagactcaatcaagggcctgcaaccggaagacgtaaatctgctcgtcacctgcagagaagaaggcaacccggtggcttcactcgggcattccgaagcagaaacccctgtagacgcctatagtaacggtcaggccgcattgatgggggagaaagagaggaagaaagaaactgacgacggcggacgctattggaaattcattgattggttttgcgggttcaagtcgaagagcctctcaaaacgcagccttcgcgacctaatggaggaagaggccgtttgcctgcagatgcttgaggagacaagacaagttaaggtcatcttaaacatcggtctgttcgcggtgtgtagtctgggtattttcatgttcgtgtatttctcactctag

SEQ ID NO: 169317 - DNA, 11574 bp, Artificial Sequence
  derived and/or modified sequence
cggaccgtgctttcgccgcctgggagccgtccggcgcagcagtttctaggtccccactgtccccgccgtcccgccccttcgcgtcccgggaaccggctggcttccgagccgcactcgccgatcctccaggcatgccccgctacgagctggctttaatcctgaaagccatgcagcggggttggtacagtaggcttcactagacttagctgcaactcagaatttctcctccagcacctgagtaaatgctgatggtcttgtggagagtggattaagagtacgagctaagttctcaatcccaattaagaagcggaaaatttaaactgtcttcttcaaagtttatcacaaccaccaccatcaagacagcaaaccaaaggacaaagactttgaccctgctgtgttgctctgtgtagtccagttcacgtatggtttacagacttggctggggttactaaaaataaataaaaagttggacacttctgtcattggagcgctattattcacaagttaccagaatgagagctgtactggacacagcagacattgccatagtggccctgtattttatcctggtcatgtgcattggtttttttgccatgtggaaatctaatagaagcaccgtgagtggatacttcctggcggggcgctctatgacctgggtaacaattggtgcctctctgtttgtgagcaatattgggagtgagcacttcattgggctggcaggatctggagctgcaagtggatttgcagtgggcgcatgggaattcaatgccttactgcttttacaacttctgggatgggttttcatcccaatttacatccggtcaggggtatataccatgcctgaatacttgtccaagcgatttggtggccataggattcaggtctattttgcagccttgtctctgattctctatattttcaccaagctctcggtggatctgtattcgggtgccctttttatccaggagtctttgggttggaatctttatgtgtctgtcatcctgctcattggcatgactgctttgctgactgtcaccggaggccttgttgcagtgatctacacagacactctgcaggctctgctcatgatcattggggcacttacacttatgattattagcataatggagattggcgggtttgaggaagttaagagaaggtacatgttggcctcacccgatgtcacttccatcttattgacatacaacctttccaacacaaattcttgtaatgtctcccctaagaaagaagccctgaaaatgctgcggaatccaacagatgaagatgttccttggcctggattcattcttgggcagaccccagcttcagtatggtactggtgtgctgaccaagtcatcgtgcagagggtccttgcagccaaaaacattgctcatgccaaaggctctactcttatggctggcttcttaaagctcctgccaatgtttatcatagttgtcccaggaatgatttccaggatactgtttactgatgatatagcttgcatcaacccagagcactgcatgctggtgtgtggaagcagagctggttgctccaatattgcttacccacgcctggtgatgaagctggttcctgtgggccttcggggtttaatgatggcagtgatgattgcagctctgatgagtgacttagactctatctttaacagtgccagtaccatattcaccctcgatgtgtacaaacttatccgcaagagcgcaagctcccgggagttaatgattgtggggaggatatttgtggcatttatggtggtgatcagcatagcatgggtgccaatcatcgtggagatgcaaggaggccagatgtacctttacattcaggaggtagcagattacctgacacccccagtggcagccttgttcctgctggcaattttctggaagcgctgcaatgaacaaggggctttctatggtggaatggctggctttgttcttggagcagtccgtttgatactggcctttgcctaccgtgccccagaatgtgaccaacctgataataggccgggcttcatcaaagacatccattatatgtatgtggccacaggattgttttgggtcacgggactcattactgtaattgtgagccttctcacaccacctcccacaaaggaacagattcgaaccaccaccttttggtctaagaagaacctggtggtgaaggagaactgctccccaaaagaggaaccataccaaatgcaagaaaagagcattctgagatgcagtgagaataatgagaccatcaaccacatcattcccaacgggaaatctgaagacagcattaagggccttcagcctgaagatgttaatctgttggtaacctgcagagaggagggcaacccagtggcatccttaggtcattcagaggcagaaacaccagttgacgcttactccaatgggcaagcagctctcatgggtgagaaagagagaaagaaagaaacggatgatggaggtcggtactggaagttcatagactggttttgtggctttaaaagtaagagcctcagcaagaggagtctcagagacctgatggaagaggaggctgtttgtttacagatgctagaagagactcggcaagttaaagtaatactaaatattggactttttgctgtgtgttcacttggaattttcatgtttgtttatttctccttatgaacttaaggatatggtgagacactaacttaagacaatactgactggtctttggggaaaaaagttatgtaactgtgcatctctcaggcattgtttacgctgtaggttttagccaaattttacttagcagaaaatcatctaattacaagactttattttcccagagatggattaaagtaaatcttcaacttaagtgaagccaaacctaacagactgaattgtgcaaatgtggttttaaattttgcataccaaagtaagaagagaccaattattctcacagagcacttagagcagaatatatgttaagttaccatgaattaaggtatactgtctgcactgccaagtcttggcagaccttaccctgaagtagaagatttgctcatttctaaagttttttttctgtctctgtaatccctcctaccattaagaaaaacttatttcttagacattgtacaatcagttatgtactgaaaatcgaatgtgcttgtgtgatacttgtttcaggacaagttcatttgccaggttcattttgttagcatgagcctacggattctgatttcccaaagaaagaatgttttcctgtaggtatttttgtaccaccagtatatggaatgttagggaaaaactttgttccagttcctttttttttttctttctactttcaagtttaagtgaaccatactgaaatgaccaacaagtctgcctgtaaagttacatgtcatgattgtgttgttaaatgattatgggggagaaaatgaagtaaatgttgctgatgatccccatatttattgatcatattaaggttgtttatatagtttggaaatgaccagccccctaagcagtgtttgattaacttatgctaatcagatgattactcatatattctgctaattttctagctttattcttgttatttggaaaaattattagccaaatgccttcctaggtggatccagttggaagatatgtccagaaacctgaagaaaaattgacgctgcctttgtgtgctggattgctctacttgattagatcatgatatatcaaggttgaatttttagagggaaaatttaattctgatatcttattgcatccttgataagtttttccctgattttttttttcctcaaaagactttccatctgtacacagcctctacatttttgttgtagtgacttagagcataaggatgtttcagtgcaaactggccgtcggtaacagaaaactcagtgcatactttgctgttgttaggttgtcaatatagtctttctgtaggatggatagcatgtttgagaggtgccaaacaagaacttttggggttagtagtgtgtcttgtggagggtattacaggactgtgtaattataggactctaacttgacatggcttggcacccacttgcagctagtgggtacagggtacaaaagatgttagagaaaagctctacagattacgtacttctgtgtcttcgtatgctcaacactgtcctttgtcctccatgaaagatgaaggaagcaaattatgtatgtactttctttgaccttctttaatctctgatactttttagattgcatgattttactaggcttgtatttagggaaattactttcataaatacttttgtagattttgaatcaaaactcagtctttttaatttttttgtagtctataaactagtttcattatgatggacttgattagtccaaagttaattttagaaattgtcaggtagcatagtgtcttcccatgatcaggaggctttctgaaggactgagtctgtaaatgaaaaaataatttatgtatgaatagcatgtatttctgaagagcttagagtgccttgtagaatttttttctcaattttattcttgaggtttataatttgggggccaaatagatagagctcatcattttcttgtttggaagttgaggctgcgacatgtccaaggttatgaagtctcttttgggaagaacagaaaccaggtctccaaatctggactcatggtttgttcagatgtgtctggacaaatggttgtcaatgttttgtcctgttttttcaaaggaactgttcttcctttgggacaaccttttggtgtttgggaaagtaataagatcttggatttttcaaattaacattaagttgtaagaactaaaattttctttgaaccacattactgtgtaattcactgataattgacatattggctgggcagcctatctcttccatatccagcgtaaatgaataggaggtgtttgtgattttttttttctccctttatttaacattgagtcctagtagtttggagaattagggtccctctaccttctttctgctcttgtcttagtaagatacataaggtacatcatcttgtgtctgtgtgtatatagcagtaggtcaagtttagagtactaaagtctgtaaataaggaatgactattagcatattcattagaattgtttattcttgccagtataaacatcattttatttagactaaagtccctgaagcttgtctttcttattgcttcccagtaatagataatgtgctcgagtaagtttgtgaattgctgattgcaacttaattcagggaccagtcttcaatctatatttcattagaatgattgttcctggaatgatcatacatggactgtcttaagctagcaaaatgttcatactttacactgactaaatgggtcctaaatgatgacattggtctttagacattaacatgtgtatatttttatattagctcaagctaaggttcagaattgaagcttgatattgactagaatagctaaaagtcaaaatgaggtgaggacactggtcttggaaggtagagaaaaataaatgtcttaccaggtgttaatggtatccccagttcttagacttttgtcttctcaggcaattttcatctcaagatctgatgagaagggcatattacattggtatgcaggatgattattgcatattttgtgggacctctaatttccctggtcatctttcagaatattctgttctgccacccccagagagtaaacacttgagccgatttcttcttccccagctattctttcctgggggtaattatgctttgtctttagattagagaagcatcaagcaatagcaatggtgctgtgtccttcggcctaaattcaatagatctcatctcctagggcttccttttcacttggctcaaaggatccattgtattttggcacaaagagcctggccagggtcatgtagccatagctcttagggatgatacctcaagaaattagctgggacccatcactctgtgaaacttcacattttaagaactgagttgagggggttgttatgcacttctgtaacttgaggctaagcaaggggttaactcttgtgagagccaatagagtgtgtctgtattcgcagtccatggctcattttctttatagtaggcatatggatcttcccctctgactttgaatatcatttggtgtggcctgtgggttattttcattctttaccaccaaataaagcggcttattagctactcagttacttgctactcaaaggttaggtcttccctgttcctgcttggcagtgttaaagcttacagggttaacttatgatgattctcctggctcattttcatcagaggcatgatgactggaaagggatcacatgggtcgttggtggtgacacctcactgtttcctaggtttggatagagagatgtatacaagacctttcctgttaaattacgtgactacagagacttgccaggacaaaattttcctaagaaatcagaaaaatgattaagtgagataagtacctgggtgacacagatattagcccgttggtaaaagacaacaaatattagcttaaaatctgcatatgtagaatcattttcattagatttagagcttgaagcaccttggctctcagctactttaaactcctccccatataaatcagggcaccaataaataagtttcagctttttaaaccctggtttgatgttaagcattataaagtacgaagtttgttaccacagtagagataatttagtagaaaaatgctttgaggcttcagtatttgtaagattttgcattagccagatgctaggttgttgaaggcatttcagtgttgataatagcctgagcagacttctttacaaatgggatctgtttctatatgtgtatatgcccacttaccattcagagagactggtctttctctttgtcttccttcacattgctgtgtcagttctacacctagtcttttcagcacttagcaaattcaaattttgatttttttgtcagcttagttcactttaaggcatattggcatggtgtgtgaaagtgatgttttgccccagtattgaggacttttagatccaaataatgactcattaaatataattatgttttaagtatactgaatttctgttagcttaaaatgttaattctcaggaatgattttctcacactttgtgttggctaataataaaagcactgttttattctcaaaactcctttttcaaaaattagggagagagcagtagtgatcatttatgtgagcccctttgaaatgatggtgtcagagtgcagagaaacaatggagttttgatgccaaaaaggtttttttgcagtaaaagtaaaaatttggaattagttggcatatagaggaacccttttgtactggaacgtatgaggctggattgtgaaaaggtaatctttcgattgctagacttggttaacttagggctgcaaatctttttcttctgtcaaggtcacttaatatggaatgtttttgtcagactgtcctttgttggaatactttagctgttcagctactttgactcctaggagagaatttagttaaggttcaaagtaattaactggctttgccagtggtgagtcccacaccattattcacttagtagtcatataaatgtttttatttaaacttctctctcttcaatgctgagaataaggctttaaattactgattcacctttaaaggaatgttgtgagaattgatgtaatttctgtttctgtttccatctaaacttctttataaaaagagggattagtttttttgttttggggtaagcacctaatttatccagtaaccaacaaccctaaccattggcatatatagtctttcactcagaaataaacaaaaactgtttggtatatctgtatcattgctaatcttgtgcactttactttttgggcagtaccatacatagtctgaggctattgacttaaaccaataactgtactttatgtaatgactcttaaatttggttacctgggttcacagcttgcttgaagagaaaggatgctagaataaagtaagcagctgaagagcgagcaaatcaagacaaaacacagtggtctcagatttttcgtagtgtgggaacagtggttttgctctataccactgaaaagcactataacataattgttgtccatgatactgaagcttttcccctcacttctaggttgtttacattcagagctctatcaataagaggaatacatattacagtgaattcgacaaccgcacaagttggcagtaggtatccccaacctaatttatcttggtaaattcaccctgtttcctagtgctgctggataaaagagtgtttactttttattgctcttagacagagtagtctagataagttttcaatttatcaacatagcctagacttctgtaagtggaatgttcattagtaactcatctttttgttgttataattggaaacagaaacgaggcttattgctattgcagaaatcccaaactggcaaaggccagtatatatggtattccataatataaccagcttttgaaatttatgtgtttggattagtgccttctggttaccagtattgactctgctagtttgcacctttccgttcttaacagaaaatttgtatttgttattcctcttaaattttgtcgtaactagtgaaggaagtaaaaaaaaaaaaaaaacatgcattacattgacatactttatgtgcagcctttatttaggttcagtgaaaccaggtagttctgtatttgtgttgtagcctaaatgttgtttcttttatatccattaaaaacttaaagttacttatgttctgtgatcttaattttgttgtgtttccattgtaggttgataggtatatcgagaacaggtacgtgacaacagtttatattccatgatagaaagctaaagtccatagaaagcacaaaatcgtgttcacacattagtgtacccacacatagaaagcacaagactaatagtattctctgtatcccacaagtgccagtcataaaggccaccaggtatttgtctcagagttgctatgagcactacagtattgataagcccaagacaatgcggtatctaaactggtcctaatggtaagggacccaaaggaataatctcaataagtttgtaccacattgatggagggagagaatataaatgtcaagaatgccaaaattatatttgggggttactagctaaaatggggtttgagggctttttactgcaacttgaaactggagaaatagggacagatgtctaggtttttggtgggtggaacaggtgacatatttctgttttaagctgtagtgtgattggggttttttgtaaaaaatcttaaatcttttaggaaatattacctcttaacagtgcccccccaaacatgcagaaagtcatactttaacagggcaaatactacttgtctttgattttttttgtgtacgtttgtatgtgagagatgaagttacctttatttttttcctatacttgactgtgcttcattttaataaaggataatttgatctgagtgttctgagcatcagactaattctgaagcatatttgctagaggagctactttgcttttcacaatggggtggagaggattctttcacttgtcccattaaccctcttctagtctagatgagatgaaatctgttaatgtgtgtgtagaagaaaacgtatgttcttctactcagcattgcccttttccacctcctcacttcacctccgagtagcttgtttatcaagaatgaatgaatgtctttgtcttaaattttgcccatgtgttaaaagatgtaattctcagaatgggagagaaatgactacctttgttcctactcttttatataattatccttttagggaaagacttggtcaactctaatatatctagaaggaagactatatctggtgtagactaatatgagatgttttagaagagttaacctgaacactttgagggagagattattcttgccagcaaaaagctagccaggaatgagcctaccacattatttgagaatatcaaacctcaggcctggggggatgaggggaagaagattaccagaagtgcaggaaagagaagtttgaggaacacccttggcttagcaacatgtgataatgcaaagctgttataacctgttaatcctacgtactatgtgttctgtacctttacatgtttttaaatttaagatagtttgtaagaactgtacaaaaaaatgcttctggagatttctttggcagaaatgcctttcatctataatttcatggagaactgctttaattagcctaggtgaaaagtagtcctagcagtgtaaatatgtataattagagttttctaatttcactgtgagatctctaacttttgagtggcaaacagatcaagtcttttgctcatagacttttctgtggggttattaaaatgcaaaagctttattttttttaataatgccatactccattagtgtcagatgatggtatggaatttgttcccttgctttcccccactgttactgcttcagtttatagattgccagcagagttcagaaatagagcagggatttacccgttctttgcttggacatcccattttcttttgtccagacccatgttggcaatcatgtatgaactgtgttatacttctcagtgctttcttttttctttttgataagatggatatcaaaaatagttgctgtgcaaaagttagtagtcttcttcaagaagaaaaccaattctttttctaataatatcctgtgaaattgcttcattcattcatttatttttaagccaaatgtcagcagagtgctgctgcttttatctagtaattttgatatgtaagtattaatgcatttttaaaagatgtctacattgaaacatgttcttcccagtgtcctgcttatgatgctttgttcagattttttgtaagagaccagttagtacactgggggtgtatattgtgtacatgtgtcattttagttaggcattgtaggccaaatgtgattataaatgaagttgatgaacattaattttgttattagtgagttttttgaattgtaaatggatttccagtttaccttctgttgtctacagcttttttaattttaaggtttgactaattgtatccatctcattgtacagtgttttagttgcaagcagaaagtagaatttggtataaagcaggttatttctatattgaaaggagtacagttgaaattgtagatttaagattgttaaaatcatgacaattctaacttgtctattctaacctattgtgtacaatctgattttttaaaattgtaaacatgtatgatcttggtttcatgtgtttttgaaagtgttattgtttaaaaaatgaaaaaagcatatctgctaaagagctgtcagttttcattactgactctgtaaaatacactgttctttgtgtactgtgtgttattttgccagctgctgcattagccttcaaaagtatttggaaacttaagatgaactacatttcttgcaaagtacattcctttctgtggtattttgtcctgtaactgaagtatagtaattattttatggaaatgttagcaattctgtaccaactttgaataaaatgaaaaattta

SEQ ID NO: 169318 - protein, 103 aa, Artificial Sequence
  derived and/or modified sequence
MSEEKPKEGVKTENDHINLKVAGQDGSVVQFKIKRHTPLSKLMKAYCERQGLSMRQIRFRFDGQPINETDTPAQLEMEDEDTIDVFQQQTGGVPESSLAGHSF

SEQ ID NO: 169319 - DNA, 312 bp, Artificial Sequence
  derived and/or modified sequence
atgtcagaggaaaagcccaaggaaggggtcaagactgaaaatgatcacattaacctgaaagtggccggacaggacggatctgtggttcagttcaagattaaacgacacacacccctcagcaagctcatgaaagcctattgtgaaaggcagggtttaagtatgcgtcagatcagatttcgttttgacggccaacctattaacgagaccgacacccccgcccagcttgaaatggaggacgaggacacaatcgacgtcttccagcagcagacagggggcgtgccggaatcctcattagcgggtcactctttttag

SEQ ID NO: 169320 - DNA, 312 bp, Artificial Sequence
  derived and/or modified sequence
atgtctgaggagaagcccaaggagggcgtgaagacagaaaatgaccacatcaacctgaaggtggccggccaggacggctctgtggtgcagttcaagatcaagaggcacacccccctgagcaagctgatgaaggcctactgtgagcggcagggcctgtccatgaggcagatccgcttccgctttgatggccagcccatcaatgaaacagacaccccagcccagctggagatggaggatgaggacaccattgatgtgttccagcagcagacaggaggagtgcctgagagcagcctggccggccacagcttctag

SEQ ID NO: 169321 - DNA, 312 bp, Artificial Sequence
  derived and/or modified sequence
atgagcgaggagaagcccaaggagggcgtgaagaccgagaacgaccacatcaatttaaaagtggcagggcaggacggctcggttgtccaatttaaaatcaaacggcacactccactgtccaagttaatgaaagcctactgcgaacgtcaaggactctccatgcgacagattagattccggtttgatggccagccaattaatgagaccgacactcctgcgcagcttgagatggaggacgaagatacgatagatgtgtttcaacagcagactggaggtgtcccagaatcttcactagcaggccactcattttag

SEQ ID NO: 169322 - DNA, 312 bp, Artificial Sequence
  derived and/or modified sequence
atgagtgaagaaaagcccaaggagggcgtgaagacagaaaacgatcacattaacctgaaagtggcagggcaggatggcagtgtagttcagttcaagattaaacgccacacacccctgagcaaactcatgaaagcctactgtgagcgccaaggattatctatgagacagattagattccggttcgacggccagccaatcaatgagaccgataccccagctcagctggaaatggaagatgaggacacgatcgacgtttttcaacagcagaccggaggagtcccagagagctccctggcaggacatagcttctag

SEQ ID NO: 169323 - DNA, 1807 bp, Artificial Sequence
  derived and/or modified sequence
agccacgtgacccccgtgccggccaacgggtgcgccgggatttgggggataaagcgcggccccgcgcacagttgcggcgggagagcggcggggccgagagcgtgactcgcccgctccgcgctgcttcccccgcgccgcctccccgcgccgctcgcgcagccatgtccgaggagaagcccaaggagggtgtgaagacagagaatgaccacatcaacctgaaggtggccgggcaggacggctccgtggtgcagttcaagatcaagaggcacacgccgctgagcaagctgatgaaggcctactgcgagaggcagggcttgtcaatgaggcagatcagattcaggttcgacgggcagccaatcaatgaaactgacactccagcacagctggagatggaggacgaggacaccatcgacgtgttccagcagcagacgggaggtgtgccggagagcagcctggcagggcacagtttctagagggcccgtccccagcccgggccgtccatcctcgcattgctgttgaatggtgagcacgtgaccatgccgaccacaaaggtgtctgcggaaactcgaggacattcaccacgatgattttcctctctttgatgtacttcaagtgcaactcaaaactatatctgcagggatgaatctgtaacttaaattgggccaatcagaattgttatctttgttcaggtaaaatgagttgcaagatattgtgggtacttttgtgtgctcatttgtgttttccccccctcctacaacatttttttaaccccaaaattatagcctgaatgttcgcttttagtctggccagggatctgactcctgagttggttgcctctcccctgctcactccagtcacatagagaattggtgtttcccgcagtggggatgcagctgttggacaggtattgggggcaaggttggtagggaggacagactgtcacttgctgttacaggcacaggtgattaaaatgctaaatattgcaaatttaagctttgtcagtatatggaaaagttgaagggaaaatactggaatgcttcttcaaaggttaaaaaataaccgagtcttttggtaatttgaccccacgtgctctctggccctcaagcatgtaacctcggggtctgaggcccaggacccacccccctgccacccctcccaccccactccctgctcagtacctggcgttggtacacaggcaaggattggcacaaccaaaattggcctttttctccctcttaatattgaagaaattcccacatttctcatttggtaatggtgttgtggcctcagatttcttctagtatttgcttctgatgaatgattatggtctatacataaaaaagtaagactaagtattgctgaatttgcagttatgttgtcgtgtataagagctacttccaagtgtggttacaaatgaacccatggaatgatgacttcatgttcttctcgtgggtttgtgccgtgctgctttccaaataggtattgaatttatgcattagtctggtgatttcagttctgtgaaatattttgggatctataccaattaaacattttcatagttctgcctattgtccttccctgaggctccattgctgcttggtggccattctctgcctttttacagtcacctgaacaatgacccatcatctcttgcttgcttgaaatcttgctgaaatgttctcatttcctgtttgctgtatgggctcgggtgggatgtttgttggctctgttgtgtttattcaccaatttgtacattatttgttgtcctttactactgtaaacagtaaatatagtttggtattctgtc

SEQ ID NO: 169324 - DNA, 312 bp, Artificial Sequence
  derived and/or modified sequence
atgagcgaggagaagcccaaggagggcgtgaagaccgagaacgaccacatcaacctgaaggtggccggccaggacggcagcgtggtgcagttcaagatcaagagacacacccccctgagcaagctgatgaaggcctactgcgagagacagggcctgagcatgagacagatcagattcagattcgacggccagcccatcaacgagaccgacacccccgcccagctggagatggaggacgaggacaccatcgacgtgttccagcagcagaccggcggcgtgcccgagagcagcctggccggccacagcttctag

SEQ ID NO: 169325 - protein, 95 aa, Artificial Sequence [sequence omitted]

SEQ ID NO: 169326 - protein, 95 aa, Artificial Sequence
  derived and/or modified sequence
MADEKPKEGVKTENNDHINLKVAGQDGSVVQFKIKRHTPLSKLMKAYCERQGLSMRQIRFRFDGQPINETDTPAQLEMEDEDTIDVFQQQTGGVY

SEQ ID NO: 169327 - DNA, 288 bp, Artificial Sequence
  derived and/or modified sequence
atggccgacgagaagccaaaagagggcgtgaagaccgagaataacgatcatatcaatctgaaggttgctggacaggacggttcagtcgtgcaattcaagatcaaaagacatacgcctctgtccaaactgatgaaagcgtactgcgagcgccagggtctgtcagtcaggcagattcgattccggtttgacgggcagcccatcaatgagactgacacaccggctcagcttgagatggaggacgaggacaccatcgacgtttttcagcagcaaaccggcggggtgtattag

SEQ ID NO: 169328 - DNA, 288 bp, Artificial Sequence
  derived and/or modified sequence
atggctgatgagaagcccaaggagggcgtgaagacagaaaataatgaccacatcaacctgaaggtggccggccaggacggctctgtggtgcagttcaagatcaagaggcacacccccctgagcaagctgatgaaggcctactgtgagcggcagggcctgtctgtgcggcagatccgcttccgctttgatggccagcccatcaatgaaacagacaccccagcccagctggagatggaggatgaggacaccattgatgtgttccagcagcagacaggaggagtgtactag

SEQ ID NO: 169329 - DNA, 1020 bp, Artificial Sequence
  derived and/or modified sequence
ccctggtccatcgctgccgcctccttcttctgcagctcctggtgctgcttgtgtgctcgtttggtgcggacctggtacctcttttgtgaaacggcagctgaggagattccggcgcttgccatggccgacgaaaaacccaaggaaggagtcaagactgagaacaacgatcatattaatttgaaggtggcggggcaggatggttctgtggtgcagtttaagattaagaggcatacaccacttagtaaactaatgaaagcctattgtgaacgacagggattgtcagtgaggcagatcagattccgattcgacgggcaaccaatcaatgaaacagacacacctgcacagttggaaatggaggatgaagatacaattgatgtgttccaacagcagacgggaggtgtctactgaaaagggaacctgcttctttactccagaactctgttctttaaagaccaagattacattctcaattagaaaactgcaatttggttccaccacatcctgactactaccgtatagttttctctattctttcatttcccccttccctattcctttattgtacataaagtaactggtatatgtacacaagcatattgcattttttttaactaaacagccaatgatatgttttgattgacatcaagtggagatgggatggggaaaaatactgattctgtgaaaataccccctttctccattagtggcatgctcattcagctcttatctttatattccagtaagttattttgctctcactgttttaacaaaaacaacaacaacaacaacataaaaatccttgcatacctttttcaattggagaattttaatgattttcatttatcattgtaaaaccaaggacaattttataactttttcgtacatagctgctacatgtagggcaatctgtctttaagtagggataaattactctaaaacaaaaaagaatcctagatacttttcccttcaagtcaagcgtcttgtttaaataaactgcttgtttaaaatgaaaaaaaaaaa

SEQ ID NO: 169330 - DNA, 288 bp, Artificial Sequence
  derived and/or modified sequence
atggccgacgagaagcccaaggagggcgtgaagaccgagaacaacgaccacatcaacctgaaggttgctggccaggatggatcagtggttcagttcaaaattaaaaggcatactccgctgtccaaactgatgaaagcatactgcgaacgacagggcttgtccgttcgacaaatccgttttcggtttgacggacaaccgattaacgagacggacacccccgcacagctcgagatggaggatgaggataccatagacgtctttcaacagcagacaggaggtgtgtactag

SEQ ID NO: 169331 - DNA, 288 bp, Artificial Sequence
  derived and/or modified sequence
atggcagatgagaaaccaaaggagggggtgaaaaccgagaataatgaccacatcaacttgaaggtggctggccaggacggaagtgtggtacagtttaaaataaaacggcacacgcccctgtccaagctgatgaaagcatactgtgagaggcagggtctctccgtacgccagattagattccgatttgatggccagccgattaatgagactgatacgccagcacagttagagatggaagacgaagataccattgatgtttttcagcagcaaacagggggagtatactag

SEQ ID NO: 169332 - DNA, 288 bp, Artificial Sequence
  derived and/or modified sequence
atggccgacgagaagcccaaggagggcgtgaagaccgagaacaacgaccacatcaacctgaaggtggccggccaggacggcagcgtggtgcagttcaagatcaagagacacacccccctgagcaagctgatgaaggcctactgcgagagacagggcctgagcgtgagacagatcagattcagattcgacggccagcccatcaacgagaccgacacccccgcccagctggagatggaggacgaggacaccatcgacgtgttccagcagcagaccggcggcgtgtactag

SEQ ID NO: 169333 - DNA, 288 bp, Artificial Sequence
  derived and/or modified sequence
atggccgacgagaagcccaaggagggcgtgaagaccgagaacaacgaccacatcaacctgaaggtggccggccaggacggcagcgtggtgcagttcaagatcaagagacacacccccctgagcaagctgatgaaggcctactgcgagagacagggcctgagcatgagacagatcagattcagattcgacggccagcccatcaacgagaccgacacccccgcccagctggagatggaggacgaggacaccatcgacgtgttccagcagcagaccggcggcgtgtactag

SEQ ID NO: 169334 - DNA, 288 bp, Artificial Sequence
  derived and/or modified sequence
atggcagatgagaagcccaaggaaggtgtaaagaccgagaataatgaccacattaaccttaaggtagccggtcaagacggaagcgtcgtccagtttaagattaagaggcacacaccactctccaaattgatgaaggcctattgtgaacgacaaggtctgtccatgcgacaaatccgcttcaggttcgatggacagcccatcaacgaaactgacaccccggcacaacttgaaatggaggacgaagacactatagatgtcttccagcagcagactggcggcgtctactag

SEQ ID NO: 169335 - DNA, 288 bp, Artificial Sequence
  derived and/or modified sequence
atggctgatgagaagcccaaggagggcgtgaagacagaaaataatgaccacatcaacctgaaggtggccggccaggacggctctgtggtgcagttcaagatcaagaggcacacccccctgagcaagctgatgaaggcctactgtgagcggcagggcctgtccatgaggcagatccgcttccgctttgatggccagcccatcaatgaaacagacaccccagcccagctggagatggaggatgaggacaccattgatgtgttccagcagcagacaggaggagtgtactag

SEQ ID NO: 169336 - DNA, 288 bp, Artificial Sequence
  derived and/or modified sequence
atggccgacgagaagcccaaggagggcgtgaagaccgagaacaacgatcacataaatcttaaagttgccggccaggacggatccgtcgtccagtttaagataaagagacacactcccttgagcaagctgatgaaagcttactgtgagaggcaaggtctgtctatgcggcagattcgttttcgctttgacgggcagcccatcaacgaaacagacacccccgcacagctagagatggaagatgaggatactatcgatgtgttccagcagcagaccggaggagtctactag

SEQ ID NO: 169337 - DNA, 288 bp, Artificial Sequence
  derived and/or modified sequence
atggcggacgagaaacccaaagagggcgtgaagaccgaaaacaatgaccacatcaacctcaaggtcgcgggacaggacgggagtgtggtgcagtttaagattaagcggcatacaccactttccaaactgatgaaagcctactgcgagagacaaggtttatcgatgagacagatcagattccggtttgacggccagcctattaacgagacagatacacctgcccagttggagatggaggatgaggatacaattgatgtctttcagcagcagactggcggtgtgtactag

SEQ ID NO: 169338 - DNA, 1066 bp, Artificial Sequence
  derived and/or modified sequence
gcgcacgcagggtggggggagggagcgcacgacgtgcgcgcaccctctcccctcgtccaccgctgccgcctccttcttctgccgctcctggtgctgcttgtgtgctcgtttggtgcggacctggtacctcttttgtgaagcggcagctgaggagactccggcgctcgccatggccgacgaaaagcccaaggaaggagtcaagactgagaacaacgatcatattaatttgaaggtggcggggcaggatggttctgtggtgcagtttaagattaagaggcatacaccacttagtaaactaatgaaagcctattgtgaacgacagggattgtcaatgaggcagatcagattccgatttgacgggcaaccaatcaatgaaacagacacacctgcacagttggaaatggaggatgaagatacaattgatgtgttccaacagcagacgggaggtgtctactgaaaagggaacctgcttctttactccagaactctgttctttaaagaccaagattacattctcaattagaaaactgcaatttggttccaccacatcctgactactaccgtatagttttctctattctttcatttcccccttccccattcctttattgtacataaagtaactggtatatgtgcacaagcatattgcattttttttttttttaactaaacagccaatggtatgttttgattgacatcaagtggagacgggatggggaaaaatactgattctgtgaaaataccccctttctccattagtggcatgctcattcagctcttatctttatattccagtaagttattttgctctcactgttttaacaaaaaaaaaaaacaacaacataaaaatccttgcataccttgttcaattggagaattttaatgtttttcatttatcattgtaaaaccaaggacaattttataacttttttgtacgtagctgttacatgtagggcaatctgtctttaagtagggataaattactctaaaacaaaaaagaatcctagatagttttcccttcaagtcaagcgtcttgttgtttaaataaacttcttgtttaaaatga

SEQ ID NO: 169339 - protein, 119 aa, Artificial Sequence
  derived and/or modified sequence
MKLVRFLMKLSHETVTIELKNGTQVHGTITGVDVSMNTHLKAVKMTLKNREPVQLETLSIRGNNIRYFILPDSLPLDTLLVDVEPKVKSKKREAVAGRGRGRGRGRGRGRGRGRGGPRR

SEQ ID NO: 169340 - DNA, 360 bp, Artificial Sequence
  derived and/or modified sequence
atgaaactcgtgcgttttctgatgaagctgtcccatgaaactgtaaccatcgagctgaagaatggaacccaagtacacggaacaattactggcgtagacgtttcaatgaatacacacctgaaggcggtaaaaatgactctaaagaaccgggaacccgtgcaactggagactctttccatcagaggcaataacatccggtactttattttaccagacagcctcccgctcgatacgttattggtggatgtggagccgaaggtgaaatcgaaaaaacgagaggccgtagcagggaggggccggggccgtgggagagggcgcggacgaggacgtggcagagggagaggtgggcccaggaggtag

SEQ ID NO: 169341 - DNA, 360 bp, Artificial Sequence
  derived and/or modified sequence
atgaagctggtgcgcttcctgatgaagctgagccatgagaccgtgaccatcgagctgaagaatggcacccaggtgcacggcaccatcaccggggtggatgtgtccatgaacacccacctgaaggctgtgaagatgaccctgaagaaccgggagcctgtgcagctggagaccctgagcatccggggcaacaacatccgctacttcatcctgcctgacagcctgcccctggacaccctgctggtggatgtggagcccaaggtgaagagcaagaagcgggaggccgtggccggccggggccggggccggggccggggccggggccggggccggggccggggccggggcggccccaggaggtag

SEQ ID NO: 169342 - DNA, 360 bp, Artificial Sequence
  derived and/or modified sequence
atgaagctggtgcggttcctgatgaagctgagccacgagaccgtgactatcgaattgaagaatgggactcaagtacacggcacgattaccggggtggacgtctcgatgaatacacacttaaaggctgtgaaaatgacactgaaaaaccgcgagcctgtacagttggaaaccctcagcataagagggaacaacatacgctattttatactgcccgattccctccctcttgacacactcctagtagatgtggaaccaaaggttaagagtaagaagcgggaagcagtggccgggcgcgggcgagggagagggcgggggcgcgggcgcggcaggggacgaggacgtggaggcccccgcaggtag

SEQ ID NO: 169343 - DNA, 360 bp, Artificial Sequence
  derived and/or modified sequence
atgaaactcgttaggtttttgatgaaactgtcgcatgaaacggtgaccattgagctgaaaaacggaacgcaggtacatggcaccatcacaggcgtcgacgtgtccatgaatacccacctgaaagctgtcaagatgactcttaaaaaccgtgaaccggtccagctggagaccttgagtatcagaggcaacaatatacggtactttatcctcccagactcactgcccctggacacccttctggttgacgttgaaccaaaagtgaagtccaagaagcgggaggcggtcgcaggtcggggacgcggaaggggcagaggcagagggagaggtcgcggacggggacgcggaggtccgagaaggtag

SEQ ID NO: 169344 - DNA, 1596 bp, Artificial Sequence
  derived and/or modified sequence
agtgctccgcgcgctcttgacgtccggagcccctggagtaggcgcttccggccattcatactgcagtcggtcagtgttcggttgaaggattctgtgtgctgtcggacccagagggtgacggcgccgctaggatgaagctcgtgagatttttgatgaaattgagtcatgaaactgtaaccattgaattgaagaacggaacacaggtccatggaacaatcacaggtgtggatgtcagcatgaatacacatcttaaagctgtgaaaatgaccctgaagaacagagaacctgtacagctggaaacgctgagtattcgaggaaataacattcggtattttattctaccagacagtttacctctggatacactacttgtggatgttgaacctaaggtgaaatctaagaaaagggaagctgttgcaggaagaggcagaggaagaggaagaggaagaggacgtggccgtggcagaggaagagggggtcctaggcgataatgtctctcaagatttcaaagtcatatgagatttgggatattttttgtacaggttgtgtttgtttatgtcagtttttaataaacataaatgtgggacagagctgtctatttagtatatcaaagttttagtagtttcctccacattcacgaaattaccacagtgagagctaagcatttctactgggcagtttcatttttagttgatcaggttttaagtttttgaactaaaatttttctttttctttttatgatgaataaggttaaaataaaagccttagacaaattaaatttggcagagtttaattgagcaaaggacaattcacaaatcaggtagcccctgaaccataataggctcagaggcttcagcccagctgcatagttgaagatttatggacagaaggaaagtgatgtatggaaaatggaagtgagatacagcaacagccggattagttacagttcagcgtttgccttatttgaatatggtttgaacagttcgctgtctttggttggctgaaacttagtgattgccacaagagtagggtaccgtctgtttacacgtccagttaggctacagttctatgtactgagaaacctttaagctgaacttgagatatgtaaagagactttaggctaaacttaacaatatatataggatatatacccttctacttcacatgcactgaatatgcattttattgctttactcttcattctgtggcacctacccacaggggaagtaagaagtttgttttggtatttcggaaactaaagtccttatgggatggggtctagaattgattctcctttcctgagttttactccacggagtcttaggtacctggtaaaaagttgtcttctaaattaagggtcattgctttgttgtctagctgctaatgtcttacttttgtttcttttgctttttaatcagttcttaataggatatagttttatgttttccaagttataacttggagttaatggtcactagattatcagttatgagcagtgttaaaatctcctattaatgtgtaatgtacctgtcagtgcctcctttattaaggggttctttgagaataaaagagaaaagacctactttatttgacagc

SEQ ID NO: 169345 - DNA, 360 bp, Artificial Sequence
  derived and/or modified sequence
atgaagctggtgagattcctgatgaagctgagccacgagaccgtgaccatcgagctgaagaacggcacccaggtgcacggcaccatcaccggcgtggacgtgagcatgaacacccacctgaaggccgtgaagatgaccctgaagaacagagagcccgtgcagctggagaccctgagcatcagaggcaacaacatcagatacttcatcctgcccgacagcctgcccctggacaccctgctggtggacgtggagcccaaggtgaagagcaagaagagagaggccgtggccggcagaggcagaggcagaggcagaggcagaggcagaggcagaggcagaggcagaggcggccccagaagatag

SEQ ID NO: 169346 - protein, 1332 aa, Artificial Sequence [sequence omitted]

SEQ ID NO: 169347 - protein, 1299 aa, Artificial Sequence
  derived and/or modified sequence
MQQAPQPYEFFSEENSPKWRGLLVSALRKVQEQVHPTLSANEESLYYIEELIFQLLNKLCMAQPRTVQDVEERVQKTFPHPIDKWAIADAQSAIEKRKRRNPLLLPVDKIHPSLKEVLGYKVDYHVSLYIVAVLEYISADILKLAGNYVFNIRHYEISQQDIKVSMCADKVLMDMFDQDDIGLVSLCEDEPSSSGELNYYDLVRTEIAEERQYLRELNMIIKVFREAFLSDRKLFKPSDIEKIFSNISDIHELTVKLLGLIEDTVEMTDESSPHPLAGSCFEDLAEEQAFDPYETLSQDILSPEFHEHFNKLMARPAVALHFQQLKACSEEQEDRECLNQAITALMNLQGSMDRIYKQYSPRRRPGDPVCPFYSHQLRSKHLAIKKMNEIQKNIDGWEGKDIGQCCNEFIMEGPLTRIGAKHERHIFLFDGLMISCKPNHGQTRLPGYSSAEYRLKEKFVMRKIQICDKEDTCEHKHAFELVSKDENSIIFAAKSAEEKNNWMAALISLHYRSTLDRMLDSVLLKEENEQPLRLPSPEVYRFVVKDSEENIVFEDNLQSRSGIPIIKGGTVVKLIERLTYHMYADPNFVRTFLTTYRSFCKPQELLSLLIERFEIPEPEPTDADKLAIEKGEQPISADLKRFRKEYVQPVQLRILNVFRHWVEHHFYDFERDLELLERLESFISSVRGKAMKKWVESIAKIIRRKKQAQANGVSHNITFESPPPPIEWHISKPGQFETFDLMTLHPIEIARQLTLLESDLYRKVQPSELVGSVWTKEDKEINSPNLLKMIRHTTNLTLWFEKCIVEAENFEERVAVLSRIIEILQVFQDLNNFNGVLEIVSAVNSVSVYRLDHTFEALQERKRKILDEAVELSQDHFKKYLVKLKSINPPCVPFFGIYLTNILKTEEGNNDFLKKKGKDLINFSKRRKVAEITGEIQQYQNQPYCLRIEPDMRRFFENLNPMGSASEKEFTDYLFNKSLEIEPRNCKQPPRFPRKSTFSLKSPGIRPNTGRHGSTSGTLRGHPTPLEREPCKISFSRIAETELESTVSAPTSPNTPSTPPVSASSDLSVFLDVDLNSSCGSNSIFAPVLLPHSKSFFSSCGSLHKLSEEPLIPPPLPPRKKFDHDASNSKGNMKSDDDPPAIPPRQPPPPKVKPRVPVPTGAFDGPLHSPPPPPPRDPLPDTPPPVPLRPPEHFINCPFNLQPPPLGHLHRDSDWLRDISTCPNSPSTPPSTPSPRVPRRCYVLSSSQNNLAHPPAPPVPPRQNSSPHLPKLPPKTYKRELSHPPLYRLPLLENAETPQ

SEQ ID NO: 169348 - DNA, 3999 bp, Artificial Sequence
  derived and/or modified sequence
atgcagcaggccccccagccctacgagttcttcagcgaggagaacagccccaagtggagaggcctgctggtgagcgccctgagaaaggtgcaggagcaggtgcaccccaccctgagcgccaacgaggagagcctgtactacatcgaggagctgatcttccagctgctgaacaagctgtgcatggcccagcccagaaccgtgcaggacgtggaggagagagtgcagaagaccttcccccaccccatcgacaagtgggccatcgccgacgcccagagcgccatcgagaagagaaagagaagaaaccccctgctgctgcccgtggacaagatccaccccagcctgaaggaggtgctgggctacaaggtggactaccacgtgagcctgtacatcgtggccgtgctggagtacatcagcgccgacatcctgaagctggccggcaactacgtgttcaacatcagacactacgagatcagccagcaggacatcaaggtgagcatgtgcgccgacaaggtgctgatggacatgttcgaccaggacgacatcggcctggtgagcctgtgcgaggacgagcccagcagcagcggcgagctgaactactacgacctggtgagaaccgagatcgccgaggagagacagtacctgagagagctgaacatgatcatcaaggtgttcagagaggccttcctgagcgacagaaagctgttcaagcccagcgacatcgagaagatcttcagcaacatcagcgacatccacgagctgaccgtgaagctgctgggcctgatcgaggacaccgtggagatgaccgacgagagcagcccccaccccctggccggcagctgcttcgaggacctggccgaggagcaggccttcgacccctacgagaccctgagccaggacatcctgagccccgagttccacgagcacttcaacaagctgatggccagacccgccgtggccctgcacttccagagcatcgccgacggcttcaaggaggccgtgagatacgtgctgcccagactgatgctggtgcccgtgtaccactgctggcactacttcgagctgctgaagcagctgaaggcctgcagcgaggagcaggaggacagagagtgcctgaaccaggccatcaccgccctgatgaacctgcagggcagcatggacagaatctacaagcagtacagccccagaagaagacccggcgaccccgtgtgccccttctacagccaccagctgagaagcaagcacctggccatcaagaagatgaacgagatccagaagaacatcgacggctgggagggcaaggacatcggccagtgctgcaacgagttcatcatggagggccccctgaccagaatcggcgccaagcacgagagacacatcttcctgttcgacggcctgatgatcagctgcaagcccaaccacggccagaccagactgcccggctacagcagcgccgagtacagactgaaggagaagttcgtgatgagaaagatccagatctgcgacaaggaggacacctgcgagcacaagcacgccttcgagctggtgagcaaggacgagaacagcatcatcttcgccgccaagagcgccgaggagaagaacaactggatggccgccctgatcagcctgcactacagaagcaccctggacagaatgctggacagcgtgctgctgaaggaggagaacgagcagcccctgagactgcccagccccgaggtgtacagattcgtggtgaaggacagcgaggagaacatcgtgttcgaggacaacctgcagagcagaagcggcatccccatcatcaagggcggcaccgtggtgaagctgatcgagagactgacctaccacatgtacgccgaccccaacttcgtgagaaccttcctgaccacctacagaagcttctgcaagccccaggagctgctgagcctgctgatcgagagattcgagatccccgagcccgagcccaccgacgccgacaagctggccatcgagaagggcgagcagcccatcagcgccgacctgaagagattcagaaaggagtacgtgcagcccgtgcagctgagaatcctgaacgtgttcagacactgggtggagcaccacttctacgacttcgagagagacctggagctgctggagagactggagagcttcatcagcagcgtgagaggcaaggccatgaagaagtgggtggagagcatcgccaagatcatcagaagaaagaagcaggcccaggccaacggcgtgagccacaacatcaccttcgagagcccccccccccccatcgagtggcacatcagcaagcccggccagttcgagaccttcgacctgatgaccctgcaccccatcgagatcgccagacagctgaccctgctggagagcgacctgtacagaaaggtgcagcccagcgagctggtgggcagcgtgtggaccaaggaggacaaggagatcaacagccccaacctgctgaagatgatcagacacaccaccaacctgaccctgtggttcgagaagtgcatcgtggaggccgagaacttcgaggagagagtggccgtgctgagcagaatcatcgagatcctgcaggtgttccaggacctgaacaacttcaacggcgtgctggagatcgtgagcgccgtgaacagcgtgagcgtgtacagactggaccacaccttcgaggccctgcaggagagaaagagaaagatcctggacgaggccgtggagctgagccaggaccacttcaagaagtacctggtgaagctgaagagcatcaaccccccctgcgtgcccttcttcggcatctacctgaccaacatcctgaagaccgaggagggcaacaacgacttcctgaagaagaagggcaaggacctgatcaacttcagcaagagaagaaaggtggccgagatcaccggcgagatccagcagtaccagaaccagccctactgcctgagaatcgagcccgacatgagaagattcttcgagaacctgaaccccatgggcagcgccagcgagaaggagttcaccgactacctgttcaacaagagcctggagatcgagcccagaaactgcaagcagccccccagattccccagaaagagcaccttcagcctgaagagccccggcatcagacccaacaccggcagacacggcagcaccagcggcaccctgagaggccaccccacccccctggagagagagccctgcaagatcagcttcagcagaatcgccgagaccgagctggagagcaccgtgagcgcccccaccagccccaacacccccagcaccccccccgtgagcgccagcagcgacctgagcgtgttcctggacgtggacctgaacagcagctgcggcagcaacagcatcttcgcccccgtgctgctgccccacagcaagagcttcttcagcagctgcggcagcctgcacaagctgagcgaggagcccctgatccccccccccctgccccccagaaagaagttcgaccacgacgccagcaacagcaagggcaacatgaagagcgacgacgacccccccgccatcccccccagacagccccccccccccaaggtgaagcccagagtgcccgtgcccaccggcgccttcgacggccccctgcacagcccccccccccccccccccagagaccccctgcccgacacccccccccccgtgcccctgagaccccccgagcacttcatcaactgccccttcaacctgcagcccccccccctgggccacctgcacagagacagcgactggctgagagacatcagcacctgccccaacagccccagcaccccccccagcacccccagccccagagtgcccagaagatgctacgtgctgagcagcagccagaacaacctggcccacccccccgccccccccgtgccccccagacagaacagcagcccccacctgcccaagctgccccccaagacctacaagagagagctgagccacccccccctgtacagactgcccctgctggagaacgccgagaccccccagtag

SEQ ID NO: 169349 - DNA, 3999 bp, Artificial Sequence
  derived and/or modified sequence
atgcagcaagccccacagccctacgagttcttcagcgaagaaaacagtcctaagtggagaggactgctggtttcggccctgcgaaaggtgcaggagcaggtgcatccaacgctgagcgcaaatgaggagtccctgtactacatcgaggagcttatcttccaacttctgaacaaactgtgtatggcccagccacggaccgtacaggatgtggaggaaagggtgcagaagacattcccacatcctatcgacaagtgggcgattgcagatgcccagagcgctatagaaaagcgaaaacggcgcaaccctctgttgctgcccgttgacaagattcacccgagcctcaaggaagttctgggctacaaagtcgattaccatgtcagcctctacatcgtcgccgtactcgaatatatctcagctgacattttgaaactggcgggaaattatgtgttcaatatacgccactacgaaattagtcaacaggacattaaagtgtcaatgtgtgctgacaaagtactcatggacatgttcgaccaggatgacatcggtcttgtgagtctgtgcgaggacgaaccatcttcctcaggagagctgaactactacgacctggtgcgcaccgagattgccgaggaaaggcagtatctccgcgagctcaacatgatcataaaagtgtttcgcgaagcctttctgtcggatcgcaagttgtttaagccaagtgatatcgagaaaatttttagtaacatcagtgacattcacgaactgacagtgaaactcctagggttgattgaagacactgtagagatgaccgatgaatcatcaccccatccactggctggctcatgttttgaggatctcgcggaggagcaggcattcgatccctacgagacactcagccaagacatattgtctcccgaatttcacgagcatttcaacaaactgatggctcgtcccgccgtggccctgcatttccagtcaatcgccgatggctttaaggaagcagttaggtatgtgctacctcgcctaatgctggtgcccgtgtaccactgctggcattacttcgaacttttgaaacagctaaaggcctgctcagaagaacaagaagaccgtgaatgtctgaaccaagccattaccgctctgatgaacctccaggggtctatggatcgaatttacaaacagtacagccctcggagacggcctggcgatccagtgtgtccgttctatagtcatcagttgcggtcaaagcatctcgccattaagaaaatgaacgaaatccagaaaaatattgatggctgggagggaaaagacatcggacagtgctgcaacgagttcatcatggaaggccctttgacacgaattggagccaaacatgaaagacacatttttctgttcgacggcctgatgattagctgcaagcccaaccacggacagacacgactgcctggctattcctctgccgagtatcgactgaaagagaagttcgtgatgcgcaagatccaaatctgcgataaagaggatacctgtgaacataagcacgcctttgagctggtgtccaaggatgaaaactcaatcatcttcgccgcaaaaagtgccgaggagaagaataactggatggccgctctgatcagcctccattatcggtccaccctcgacaggatgttggattctgtcctgttaaaagaagaaaatgaacaaccactgcgcttgccgagtcccgaggtgtaccgctttgtcgtgaaggactccgaggagaacatcgtttttgaggacaatctacaatccaggtctggcatcccaattatcaaggggggcacggttgtaaagctgattgaacggctgacataccatatgtacgccgatcccaattttgtccggacttttttaaccacatacagaagcttttgtaaacctcaagagctgctttctttgcttatcgaaaggttcgaaattcctgagcccgaaccaaccgacgccgataaactagctatcgagaaaggggagcagcccatcagtgctgatctgaagagattcagaaaagaatacgtgcagcctgttcaactgcgcattctgaacgtctttcgccactgggtagagcatcacttttatgacttcgagagggacctcgagctgttagaacggctcgagagctttattagtagcgtgaggggtaaggcaatgaagaagtgggtggaatccattgcaaagataattaggagaaaaaaacaggcccaggccaatggagtgagccataatattacctttgagtctcctccccccccaattgagtggcacatttcaaagccggggcagttcgaaacgttcgaccttatgaccctgcaccctattgagatcgccagacaactcactctgctggaaagtgacctgtatcgcaaggtacaacctagcgagctggtgggttctgtctggactaaggaagacaaggaaattaatagccctaatctccttaagatgattagacataccacgaacctgactctgtggttcgaaaaatgcatcgtcgaggctgagaacttcgaggagcgggtggccgtcctgtcacgaatcatcgagatcctccaggtgtttcaggacttaaacaacttcaacggcgtgttggaaattgtctccgcggtgaatagtgtgagtgtgtacaggttagatcatacctttgaagcattgcaggaacgaaagcgtaagatactcgatgaggccgtcgaactctcccaggaccattttaagaagtacctggtgaaattgaagagtatcaatcctccgtgcgtgccgttctttggcatctatctgaccaatatccttaaaaccgaggagggcaacaacgacttcttgaagaagaagggcaaagatctgattaacttctctaagagaagaaaggtggccgaaattaccggggagatccagcagtatcagaaccagccatactgtctaaggatagagcctgacatgcgcaggttttttgagaacctgaaccccatggggagcgcttcagagaaggaatttacggactacctgtttaataaatctctggagatcgaacctcgcaattgcaaacagccgccccgttttcccaggaagagcaccttctccttaaaatcccctggcatccgtccaaatacaggcagacatggtagcacctcaggtacactgaggggccacccaacgccgttggagagagagccctgtaaaataagcttttctagaatcgccgaaaccgagctggagagcaccgtcagtgcacctaccagccctaacactccttccacacctccggtgagcgcgtcgagcgacctgagcgtgttcctagatgtcgacttgaacagctcctgcggatctaacagcatttttgctccagtcttgctgcctcattcgaaatccttctttagttcatgcggcagcctgcataaactgtccgaagaacccctgatcccaccgccacttccaccccggaagaaattcgaccacgacgcctccaactccaaaggtaacatgaagtctgacgacgatcctcctgcaatcccgccgagacagcccccaccacctaaagtcaagccccgcgtaccagtgcccaccggggctttcgatggaccactccatagcccacctccgcctccccctcgggacccactccctgacacaccgcctcctgtgcccttgcgccctccagagcacttcatcaattgtccgtttaatctgcagcccccgcccttgggacacttgcaccgcgacagcgactggctccgcgatattagtacatgccccaactcgccctccacaccaccttctactccttcacccagagtgccgcgcaggtgctatgtcctctctagcagccaaaataatctggcccatccccctgcgcctcccgtgccccctaggcagaacagttcgccgcaccttccaaagctgccaccaaaaacatacaaaagagagctgagtcacccccctctgtatcgccttccactgctagagaatgctgaaacaccacaatag

SEQ ID NO: 169350 - DNA, 3999 bp, Artificial Sequence
  derived and/or modified sequence
atgcagcaggccccccagccctatgagttcttcagcgaggagaacagccccaagtggaggggcctgctggtgtctgccctgaggaaggtgcaggagcaggtgcaccccaccctgagcgccaatgaggagagcctgtactacatcgaggagctgatcttccagctgctgaacaagctgtgcatggcccagcccaggacagtgcaggatgtggaggagcgggtgcagaagaccttcccccaccccatcgacaagtgggccatcgcagatgcccagagcgccatcgagaagaggaagagaagaaaccccctgctgctgcctgtggacaagatccaccccagcctgaaggaggtgctgggctacaaggtggactaccacgtgtccctgtacatcgtggccgtgctggagtacatctctgctgacatcctgaagctggccggcaactacgtgttcaacatccgccactatgagatcagccagcaggacatcaaggtgtccatgtgtgccgacaaggtgctgatggacatgtttgaccaggatgacatcggcctggtgtccctgtgtgaagatgagcccagcagcagcggggagctgaactactatgacctggtgaggacagaaattgctgaggagcggcagtacctgcgggagctgaacatgatcatcaaggtgttccgggaggccttcctgagtgacaggaagctgttcaagcccagcgacatcgagaagatcttcagcaacatcagtgacatccacgagctgactgtgaagctgctgggcctgattgaggacacagtggagatgacagatgagagcagcccccaccccctggccggcagctgctttgaggacctggccgaggagcaggcctttgacccctatgagaccctgagccaggacatcctgagccctgagttccacgagcacttcaacaagctgatggcccggcctgctgtggccctgcacttccagagcattgctgatggcttcaaggaggccgtgcgctacgtgctgccccggctgatgctggtgcctgtgtaccactgctggcactactttgagctgctgaagcagctgaaggcctgcagcgaggagcaggaggacagagaatgtctgaaccaggccatcacagccctgatgaacctgcagggctccatggaccgcatctacaagcagtacagcccccggcggcggcctggggaccctgtgtgccccttctacagccaccagctgcggagcaagcacctggccatcaagaagatgaatgagatccagaagaacattgatggctgggagggcaaggacatcggccagtgctgcaatgagttcatcatggagggccccctgaccagaattggagccaagcatgagcggcacatcttcctgtttgatggcctgatgatcagctgcaagcccaaccacggccagacccggctgcccggctacagcagcgctgagtaccgcctgaaggagaagtttgtgatgaggaagatccagatctgtgacaaggaggacacctgtgagcacaagcacgcctttgagctggtgtccaaggatgaaaattccatcatctttgctgccaagtctgctgaggagaagaacaactggatggccgccctgatcagcctgcactaccgcagcaccctggacaggatgctggacagcgtgctgctgaaggaggagaatgagcagcccctgcggctgcccagccctgaggtgtacagatttgtggtgaaggacagcgaggagaacatcgtgtttgaggacaacctgcagagccgcagcggcatccccatcatcaagggcggcaccgtggtgaagctgattgaaaggctgacctaccacatgtatgctgaccccaactttgtgaggaccttcctgaccacctaccgctccttctgcaagccccaggagctgctgagcctgctgattgaaagatttgagatccctgagcctgagcccacagatgctgacaagctggccattgaaaaaggagagcagcccatctctgctgacctgaagcgcttcaggaaggagtatgtgcagcctgtgcagctgcgcatcctgaatgtgttccgccactgggtggagcaccacttctatgactttgagcgggacctggagctgctggagcggctggagagcttcatcagctctgtgcggggcaaggccatgaagaagtgggtggagagcatcgccaagatcatccggaggaagaagcaggcccaggccaacggggtgagccacaacatcacctttgagagccccccaccacccatcgagtggcacatcagcaagccaggccagtttgagacctttgacctgatgaccctgcaccccatcgagatcgcccggcagctgaccctgctggagagtgacctgtacaggaaggtgcagcccagcgagctggtgggctctgtgtggaccaaggaggacaaggagatcaacagccccaacctgctgaagatgatccgccacaccaccaacctgaccctgtggtttgagaagtgcatcgtggaggctgaaaattttgaggagcgggtggccgtgctgagccgcatcatcgagatcctgcaggtgttccaggacctgaacaacttcaatggagtgctggagatcgtgtctgctgtgaacagcgtgtctgtgtaccgcctggaccacacctttgaggccctgcaggagaggaagaggaagatcctggatgaggccgtggagctgagccaggaccacttcaagaagtacctggtgaagctgaagagcatcaaccccccctgtgtgcccttcttcggcatctacctgaccaacatcctgaagacagaggagggcaacaatgacttcctgaagaagaagggcaaggacctgatcaacttcagcaagaggaggaaggtggccgagatcaccggggagatccagcagtaccagaaccagccctactgcctgagaattgaaccagacatgaggcgcttctttgagaacctgaaccccatgggcagcgccagcgagaaggagttcacagactacctgttcaacaagagcctggagattgagcccaggaactgcaagcagcccccacgcttccccaggaagagcaccttcagcctgaagagccctggcatccggcccaacacaggaagacatggcagcaccagcggcaccctgcggggccaccccacccccctggagcgggagccctgcaagatctccttcagcagaattgctgagacagagctggagagcacagtgtctgcccccaccagccccaacacccccagcaccccacctgtgtctgccagcagtgacctgtctgtgttcctggatgtggacctgaacagcagctgtggcagcaacagcatctttgcccctgtgctgctgccccacagcaagagcttcttcagcagctgtggcagcctgcacaagctgtctgaggagcccctcatccccccacccctgccccccaggaagaagtttgaccatgatgccagcaacagcaaaggaaacatgaagagtgatgatgaccccccagccatccccccccggcagcccccaccacccaaggtgaagccccgggtgcctgtgcccactggagcctttgatggccccctgcacagccccccacctcctccaccccgggaccccctgcctgacaccccacctcctgtgcccctgcggcccccagagcacttcatcaactgccccttcaacctgcagcccccacccctgggccacctgcaccgggacagcgactggctgcgggacatcagcacctgccccaacagccccagcaccccacccagcacccccagcccccgggtgccccggcgctgctacgtgctgagcagcagccagaacaacctggcccaccccccagcccctcctgtgcccccccggcagaacagcagcccccacctgcccaagctgccccccaagacctacaagcgggagctgagccacccccccctgtaccgcctgcccctgctggagaatgctgagaccccccagtag

SEQ ID NO: 169351 - DNA, 3999 bp, Artificial Sequence
  derived and/or modified sequence
atgcagcaggccccccagccctacgagttcttcagcgaggagaactcccctaagtggaggggactgctggtttcagctcttcggaaggttcaggagcaggtgcatccgactctgtcggccaacgaagaatccctctattacatcgaagagctgatctttcagcttttgaataaactgtgcatggcccagccacgaacagtccaggacgtggaggagcgcgtgcagaaaacatttccacaccccatcgataagtgggccatagccgacgctcagtccgcgatagagaaacgcaaacgtagaaatccattattgctgccggtggacaaaatccacccttccctaaaggaggttctgggctacaaggtggactaccatgttagcctgtatatagtggcagtgctggagtacatctccgccgatattctcaaactagcaggaaactatgtgttcaatattagacattatgaaatatcccaacaagatatcaaggtgtccatgtgcgctgataaggtactgatggatatgtttgaccaggatgatattgggctcgtgtctttatgtgaggacgaacccagcagtagtggggagttaaactactacgacctcgtgagaacagaaatcgctgaagaaagacagtacctgcgagaattaaatatgatcattaaagtcttccgcgaggcatttcttagcgatcggaaactgttcaaaccctcggacatcgaaaaaatcttctctaatattagcgacatccatgagctcaccgtcaagttgcttgggcttattgaagacacagtggaaatgaccgacgaatccagtccacacccacttgcaggctcatgtttcgaagacttagcagaagagcaggccttcgatccttacgagaccttgtctcaggacattttgagtcctgagttccatgaacacttcaacaaactgatggctaggccggctgtggcactgcacttccaaagcattgctgatggattcaaagaagctgtccggtacgtgctgccgcggttgatgcttgtccctgtttaccattgctggcattatttcgaactgctaaagcaactcaaagcctgttctgaggagcaggaggatagagagtgcctcaatcaggctattacggccttgatgaacttgcagggctcaatggaccgcatttataagcagtactctcctcgtcgccgacctggcgaccccgtgtgtcctttctattcacaccaactgcgaagcaaacatctggccatcaagaagatgaatgagatccagaagaatatagacggctgggaaggcaaggacatcggccagtgctgtaatgagttcatcatggagggtcctctgacccggatcggggccaagcacgaacgccatatattcttgttcgacggactcatgatttcatgtaaaccgaatcacggacaaacacgcctgcctggatactcttcggctgaataccggttaaaggagaagtttgtcatgcggaaaatccagatatgtgataaagaggacacatgtgagcataagcacgctttcgagcttgtgtccaaggacgagaactccattatttttgcagccaaatctgcagaggagaagaataattggatggctgcactgattagtttacactataggagcacgctggaccgcatgttggacagcgtgctgttaaaggaagaaaacgagcaaccgctgaggttgccgtccccggaagtgtaccggtttgtggtgaaagactctgaagaaaatatagttttcgaggacaatctgcaaagccgatccggtatacccattatcaagggcggcacggtcgtcaagctgattgagcggctgacttaccatatgtacgctgatcctaatttcgtccggacctttctcaccacctacaggtcattttgtaagccacaagaactgctctctctgcttatcgagcgtttcgagatccccgaacctgagccaacagatgccgataaattggccatcgagaaaggcgagcagccaatctctgctgacctgaaacgcttccgtaaggagtatgtgcaaccggtgcagctgagaatcctgaatgtgttcagacactgggtggagcaccacttctatgacttcgagagagacttggagctcctggagcgactggagagcttcatatccagtgtcagggggaaagccatgaagaagtgggtggagtccatcgccaagataatccgcaggaaaaaacaggcacaggctaatggagtgtcgcacaacatcaccttcgaaagcccccctccacctatcgagtggcacattagtaagcctggccagttcgagacctttgatctgatgacgctgcatcctattgaaatcgcgaggcagctgactttgctggaatccgacctctataggaaggttcaacctagcgaactggtggggagcgtctggacaaaagaagacaaggaaatcaatagccccaacctgcttaagatgatcagacatactactaacctgacattgtggttcgagaagtgtatcgtggaagccgagaattttgaagaaagagtggccgtactgagccgcataatcgagatccttcaggtcttccaagatctaaacaatttcaatggtgttctggaaatagtaagcgcagttaactccgtgtcggtgtaccggcttgatcatacctttgaggcgctgcaggaacggaaacggaagattctggacgaggccgtcgagctgagccaggaccacttcaaaaagtacctcgtgaagctgaagtccattaacccgccttgtgtacctttttttggaatctacctgaccaatatccttaagacagaggaggggaacaacgattttctcaagaagaagggcaaagatctcatcaattttagcaagcgccgaaaagttgctgaaatcactggggagattcagcagtaccagaaccaaccctattgtctgcgcatcgaaccggatatgcggcggtttttcgagaacctgaaccctatggggtctgcaagcgagaaggaattcactgattacttattcaacaagagcctcgagatagaaccaaggaattgtaagcagcctccgcgcttcccaagaaaatccacctttagtctgaaatcccccggtatcagaccaaataccggcagacatggtagcacctccggaactttgcgggggcacccgacccctctcgagcgagagccctgcaaaatatcattcagccgtatcgcagagaccgagttagagtctacagtgtcggcccccacatcacccaatactcccagcactccccccgtaagcgcttcttccgacctcagcgtgtttctggacgtggaccttaatagttcctgcggctctaactccatattcgcgcctgtgctcttacctcacagtaagagcttcttttcatcttgcgggtctctccacaagctgagcgaggaaccgttaatcccacctcccctgcccccacggaagaaatttgaccacgacgctagcaactccaaaggcaacatgaagtcggatgatgatccaccagccattccgccaaggcagcccccaccccccaaggtgaaaccacgcgtgccagtgcccaccggggcatttgacggcccgctgcacagcccaccccctccacctccccgcgatcctctcccagatacacccccccctgtgccgctacggcctcccgagcattttatcaattgcccatttaacttacaacctcctcctcttggacacctgcatcgggactcagattggctccgcgatataagtacatgccctaattcaccatctacccccccatctactcctagcccacgggtacctagaagatgctatgttctgtcatccagccagaataatctcgcccatccgccagccccacctgtgccacctcgccagaattcctctcctcacctgcccaagctccctcccaaaacttacaagagggagctgtctcacccccctctctataggcttccattgctggaaaatgccgagaccccgcagtag

SEQ ID NO: 169352 - DNA, 3999 bp, Artificial Sequence
  derived and/or modified sequence
atgcagcaggctcctcagccttacgaatttttcagtgaagaaaattccccgaaatggcgcggtctgcttgtatccgcgcttcgtaaagttcaggagcaggtccacccaacgctaagtgccaacgaggagtctctttattacattgaggaacttatttttcagctgctaaataaattatgcatggcccaaccaaggaccgttcaagacgtcgaagaaagagtgcagaaaacattccctcacccaattgacaaatgggccattgccgacgctcagtctgcaattgaaaaacggaagaggcggaatcccctgctgttgcccgtggacaaaatacacccttccctgaaagaagtgctgggatacaaggtggactatcacgtctctctctatatcgtagccgtcctcgagtatatctccgctgacatactaaagctcgcaggcaattacgtttttaacatcagacactatgagatctcacagcaggatataaaagtgtctatgtgcgccgataaagtgttaatggacatgttcgaccaagacgatatcggactggtttcgctctgcgaagacgaaccaagcagcagcggcgaactgaattactacgacttggtgcggactgaaattgcagaagaacggcaatacctccgagaacttaatatgataatcaaggtttttcgtgaagcttttctgagcgaccggaagctgttcaagccctctgatattgaaaaaattttctctaatatttctgacatccacgagctcaccgtgaaactgctggggctcatcgaagacaccgtagagatgacagacgagagttcacctcatccgctggcgggatcctgtttcgaggacctcgccgaggagcaggccttcgatccttacgaaacgctctctcaggatatccttagtccagagtttcatgagcactttaacaagctcatggctaggcctgctgtggcactccattttcaatccatagccgacggctttaaggaggctgtacggtacgtgctccctcgcttaatgcttgttcccgtataccactgttggcactatttcgaactccttaagcaactcaaagcttgtagtgaggaacaggaagaccgggagtgcctgaaccaagcaataactgcacttatgaatctccagggttccatggacagaatctataaacagtactctccgagaagacggccaggagaccctgtctgtccattctactctcatcaattaaggtccaagcacctcgctatcaaaaagatgaatgagattcagaagaacattgatggctgggaaggcaaggacattggccaatgctgtaatgagtttataatggaggggccactgacacgcatcggcgcaaagcatgagcgacacatcttcctgtttgacgggttaatgattagctgcaaacccaaccacggacaaacacgactgcctggatacagttcagccgaataccggctgaaggagaaattcgttatgcgaaagatccagatctgtgataaggaagacacatgcgaacacaaacatgcgttcgagttagtgtcaaaagatgaaaattcaataatatttgccgcaaagtccgctgaagagaaaaacaactggatggctgcactgatcagcctccactaccgatctacactggataggatgctcgattctgtcctgctaaaggaagagaacgaacagcctctgcgactgccttctccagaagtctatcgcttcgtcgttaaggactccgaagaaaatatcgtgttcgaggacaacttgcagagcaggagcggcatccccattattaaaggcggtacagtggtgaagctcatcgaaagactcacctaccacatgtacgcggacccaaattttgtgcggacatttcttacgacatacagaagcttttgcaagcctcaggaactgctgtccctcctgatagagcggtttgagattccagagccagagccaactgacgccgacaaactggccatagaaaagggcgaacagccaatctccgccgacctgaagcgctttaggaaggaatatgtccaacccgtgcagctgagaattctcaacgttttcaggcattgggtggagcatcacttctacgactttgaaagggatctggagttgcttgagcgactggaaagttttatcagtagtgtcagaggaaaggcgatgaaaaaatgggtggaatccatcgccaagattattcggaggaagaagcaggctcaggcaaacggggtgtctcacaatatcacttttgaatcccccccaccgcctattgaatggcacatcagtaagcctggtcagttcgagactttcgatctgatgaccctccatccaatagagattgccaggcagctgactctgttggaaagtgatctgtatcgcaaagtgcagccatcagagctcgtgggttctgtgtggacgaaagaggacaaagaaatcaactcaccgaatctcctgaagatgataagacacactactaaccttactttatggtttgagaagtgcattgtcgaagcggaaaactttgaagaacgcgtggctgtgctctcccggatcatcgaaatccttcaggtattccaggacttgaacaattttaatggcgtcctcgaaattgtcagcgccgtgaatagcgtgtcagtgtacaggttggaccatacgtttgaggccttgcaggagagaaagcggaaaattcttgatgaggcggtggaactctctcaagaccactttaaaaagtatctggtaaagctgaaaagcatcaaccctccctgcgtgccgttctttgggatatacctgacaaacatcctcaagactgaggaagggaacaatgacttcctgaagaagaaaggcaaagatcttattaatttttcgaagaggagaaaggtcgcagagatcactggggaaattcaacagtatcaaaaccagccatattgtctgcgcattgagcctgacatgaggagattctttgaaaatctcaacccaatggggagtgctagtgagaaggagtttaccgattatctgtttaacaaatcgcttgagattgaacctcgaaactgcaaacagccaccacgctttccccgaaagtcaacatttagtttgaagtcccctgggatacgcccaaacaccggcaggcacggttccaccagtgggacattgcggggacacccaacgcctctcgagagagagccctgcaagatctcttttagtcgaatcgcagaaactgagctggagtccacagtgagcgcgcctaccagccctaacactcccagtacacctccagtgtcggcttcgtccgatctgagtgtgtttctggacgtagaccttaactcgagctgcggaagcaatagcatattcgcccctgttttgttaccccactccaaatctttctttagtagttgcgggtccctgcataagctctcagaggagcctctcatcccccctccccttccacctcggaaaaagttcgatcatgacgcgtccaatagcaagggtaatatgaaaagtgacgatgacccgcctgcaatacctcctaggcagccccctcccccaaaagtgaagcctcgagttccggtgccaacaggcgctttcgacgggcctctgcacagtccccctccacctcctcctcgcgacccactgcccgatactcctcccccagtgccgctgcggcctcccgagcattttatcaactgtcccttcaatctgcagcctccaccgctgggtcacctgcaccgcgacagtgattggctgcgggatatctcgacttgcccaaactcaccttctacccccccttcaaccccaagccctagggtgcccaggagatgttacgtgctgtcatctagccagaataatcttgcgcaccctcctgctccacccgttccccctagacagaactcatctccgcatctccccaaactccccccaaaaacctacaaacgggagttgagtcatccccctctgtataggctgcctctgcttgagaacgcagagacgccacaatag

SEQ ID NO: 169353 - DNA, 3900 bp, Artificial Sequence
  derived and/or modified sequence
atgcagcaggccccccagccctacgagttcttcagcgaggagaacagccccaagtggagaggcctgctggtgagcgccctgagaaaggtgcaggagcaggtgcaccccaccctgagcgccaacgaggagagcctgtactacatcgaggagctgatcttccagctgctgaacaagctgtgcatggcccagcccagaaccgtgcaggacgtggaggagagagtgcagaagaccttcccccaccccatcgacaagtgggccatcgccgacgcccagagcgccatcgagaagagaaagagaagaaaccccctgctgctgcccgtggacaagatccaccccagcctgaaggaggtgctgggctacaaggtggactaccacgtgagcctgtacatcgtggccgtgctggagtacatcagcgccgacatcctgaagctggccggcaactacgtgttcaacatcagacactacgagatcagccagcaggacatcaaggtgagcatgtgcgccgacaaggtgctgatggacatgttcgaccaggacgacatcggcctggtgagcctgtgcgaggacgagcccagcagcagcggcgagctgaactactacgacctggtgagaaccgagatcgccgaggagagacagtacctgagagagctgaacatgatcatcaaggtgttcagagaggccttcctgagcgacagaaagctgttcaagcccagcgacatcgagaagatcttcagcaacatcagcgacatccacgagctgaccgtgaagctgctgggcctgatcgaggacaccgtggagatgaccgacgagagcagcccccaccccctggccggcagctgcttcgaggacctggccgaggagcaggccttcgacccctacgagaccctgagccaggacatcctgagccccgagttccacgagcacttcaacaagctgatggccagacccgccgtggccctgcacttccagcagctgaaggcctgcagcgaggagcaggaggacagagagtgcctgaaccaggccatcaccgccctgatgaacctgcagggcagcatggacagaatctacaagcagtacagccccagaagaagacccggcgaccccgtgtgccccttctacagccaccagctgagaagcaagcacctggccatcaagaagatgaacgagatccagaagaacatcgacggctgggagggcaaggacatcggccagtgctgcaacgagttcatcatggagggccccctgaccagaatcggcgccaagcacgagagacacatcttcctgttcgacggcctgatgatcagctgcaagcccaaccacggccagaccagactgcccggctacagcagcgccgagtacagactgaaggagaagttcgtgatgagaaagatccagatctgcgacaaggaggacacctgcgagcacaagcacgccttcgagctggtgagcaaggacgagaacagcatcatcttcgccgccaagagcgccgaggagaagaacaactggatggccgccctgatcagcctgcactacagaagcaccctggacagaatgctggacagcgtgctgctgaaggaggagaacgagcagcccctgagactgcccagccccgaggtgtacagattcgtggtgaaggacagcgaggagaacatcgtgttcgaggacaacctgcagagcagaagcggcatccccatcatcaagggcggcaccgtggtgaagctgatcgagagactgacctaccacatgtacgccgaccccaacttcgtgagaaccttcctgaccacctacagaagcttctgcaagccccaggagctgctgagcctgctgatcgagagattcgagatccccgagcccgagcccaccgacgccgacaagctggccatcgagaagggcgagcagcccatcagcgccgacctgaagagattcagaaaggagtacgtgcagcccgtgcagctgagaatcctgaacgtgttcagacactgggtggagcaccacttctacgacttcgagagagacctggagctgctggagagactggagagcttcatcagcagcgtgagaggcaaggccatgaagaagtgggtggagagcatcgccaagatcatcagaagaaagaagcaggcccaggccaacggcgtgagccacaacatcaccttcgagagcccccccccccccatcgagtggcacatcagcaagcccggccagttcgagaccttcgacctgatgaccctgcaccccatcgagatcgccagacagctgaccctgctggagagcgacctgtacagaaaggtgcagcccagcgagctggtgggcagcgtgtggaccaaggaggacaaggagatcaacagccccaacctgctgaagatgatcagacacaccaccaacctgaccctgtggttcgagaagtgcatcgtggaggccgagaacttcgaggagagagtggccgtgctgagcagaatcatcgagatcctgcaggtgttccaggacctgaacaacttcaacggcgtgctggagatcgtgagcgccgtgaacagcgtgagcgtgtacagactggaccacaccttcgaggccctgcaggagagaaagagaaagatcctggacgaggccgtggagctgagccaggaccacttcaagaagtacctggtgaagctgaagagcatcaaccccccctgcgtgcccttcttcggcatctacctgaccaacatcctgaagaccgaggagggcaacaacgacttcctgaagaagaagggcaaggacctgatcaacttcagcaagagaagaaaggtggccgagatcaccggcgagatccagcagtaccagaaccagccctactgcctgagaatcgagcccgacatgagaagattcttcgagaacctgaaccccatgggcagcgccagcgagaaggagttcaccgactacctgttcaacaagagcctggagatcgagcccagaaactgcaagcagccccccagattccccagaaagagcaccttcagcctgaagagccccggcatcagacccaacaccggcagacacggcagcaccagcggcaccctgagaggccaccccacccccctggagagagagccctgcaagatcagcttcagcagaatcgccgagaccgagctggagagcaccgtgagcgcccccaccagccccaacacccccagcaccccccccgtgagcgccagcagcgacctgagcgtgttcctggacgtggacctgaacagcagctgcggcagcaacagcatcttcgcccccgtgctgctgccccacagcaagagcttcttcagcagctgcggcagcctgcacaagctgagcgaggagcccctgatccccccccccctgccccccagaaagaagttcgaccacgacgccagcaacagcaagggcaacatgaagagcgacgacgacccccccgccatcccccccagacagccccccccccccaaggtgaagcccagagtgcccgtgcccaccggcgccttcgacggccccctgcacagcccccccccccccccccccagagaccccctgcccgacacccccccccccgtgcccctgagaccccccgagcacttcatcaactgccccttcaacctgcagcccccccccctgggccacctgcacagagacagcgactggctgagagacatcagcacctgccccaacagccccagcaccccccccagcacccccagccccagagtgcccagaagatgctacgtgctgagcagcagccagaacaacctggcccacccccccgccccccccgtgccccccagacagaacagcagcccccacctgcccaagctgccccccaagacctacaagagagagctgagccacccccccctgtacagactgcccctgctggagaacgccgagaccccccagtag

SEQ ID NO: 169354 - DNA, 3900 bp, Artificial Sequence
  derived and/or modified sequence
atgcagcaggccccacagccctacgaatttttcagcgaagaaaattcacctaaatggagggggttgcttgtctctgcgttgcgcaaggtgcaggaacaggtgcacccgacactctctgcaaatgaagagtcactgtactatattgaagaactaattttccaactactcaataaactgtgtatggctcagccgcggactgtgcaggacgttgaagagagagttcagaagaccttcccgcaccctattgacaagtgggctattgccgatgcccagtctgcaatagagaagcgaaaacggaggaatccccttctcctccccgtcgataagatccacccaagcctcaaggaagtgctgggctacaaggtcgattatcatgtctccctctacattgtcgcagtgctcgagtatattagcgccgatatcctgaagcttgccggcaactacgtatttaacattcggcattatgagatttcccaacaggacataaaggttagtatgtgcgccgacaaagtgcttatggacatgttcgaccaggacgatatagggttggtgagcctgtgcgaagatgaacctagtagtagcggagagttgaactactacgacttagtgcgaaccgagatcgctgaggagcggcagtacctgagggaactgaatatgatcattaaagtatttcgtgaggcattcctgtccgaccgcaagttatttaagcccagtgacatagaaaagattttttctaatatcagcgacatccacgaactaactgtgaagctgcttggcctgatcgaagacacggtcgagatgaccgacgagtcctccccccaccctctcgccgggtcctgcttcgaggacttagcagaggagcaggcttttgatccttacgagacactgtcccaggatatcctctctcccgagttccacgagcatttcaacaaactgatggccagacctgcagtagctctacacttccagcaacttaaggcatgttctgaggaacaggaggatagagagtgtttgaatcaggcaatcacagccctgatgaacctccagggctcaatggaccggatttacaagcagtatagtccacggcgccgcccaggagaccccgtttgtccgttttactcccaccagctccgaagcaaacatctcgcgatcaagaaaatgaatgaaatccagaagaacatagacggatgggagggaaaggacatcggccagtgttgcaacgagtttatcatggaaggacccctcacccgaataggggctaagcacgaacgacacatcttcctctttgatggccttatgatctcgtgcaagcctaatcatggacaaactcggctgccggggtactcttccgccgaatatagactgaaggagaagtttgtgatgcgcaaaatacagatctgcgataaggaggacacctgtgaacataagcacgcctttgaactagtgagcaaagacgaaaactctatcattttcgcagccaaatctgcagaggaaaaaaataactggatggctgcactcattagtttgcactatcggagcacattggatcgcatgctggactcagtgctccttaaggaggaaaacgagcagcccttaagattgccatcaccagaggtttacaggtttgtggtgaaggatagcgaggagaacattgtgttcgaggacaatctgcagagtaggtccggcatccccattatcaagggaggaactgttgttaagctgatcgagaggctcacctatcacatgtatgccgatccaaactttgtgcgcacctttctgacgacataccgctctttttgcaagccccaggaattgctcagcctgctgatcgaacgcttcgagattcccgaaccggagcctacagacgcagataagcttgctatagagaaaggcgaacagcccatctcagcagatttaaagcggtttagaaaggaatacgtgcagcccgttcagttaaggattctcaatgtgttccgccactgggtggaacatcatttttacgattttgaaagggacttagagctgctggaaagactcgagtcatttattagctcagtaaggggcaaggctatgaagaagtgggttgagagcatcgcgaaaatcatcagacgcaaaaagcaggcgcaggctaacggggtcagccacaacataacattcgaatctccaccacctccaatcgagtggcatatatctaagcctggtcaatttgagacgtttgacctcatgacgctacatcccatagaaattgcccgacaactcacgctgctcgaaagcgacctgtaccgaaaagtgcagcctagcgagttagtggggagtgtgtggaccaaagaagacaaagagatcaattcacccaatctcctgaaaatgatcagacacacaacaaatttgacactgtggtttgagaagtgcattgtggaggcagaaaactttgaggaacgcgtggcagttctgagcaggatcatcgagatcttgcaggtcttccaggacttaaacaatttcaatggtgtgctcgagatagtttctgcagttaacagcgtgagcgtgtacaggctggaccacacattcgaggcactgcaggagcgcaagagaaagatcctcgatgaagccgtagaattgtcacaggatcattttaaaaaatatctggtcaagcttaagtcgattaatccaccttgcgtgcccttctttggtatttacttgacgaacatccttaagactgaggagggcaacaacgattttctcaagaagaaggggaaggatctcattaactttagtaaacgaagaaaagtggcagagattacaggtgagatccagcagtaccaaaaccagccgtattgcctgcgcattgagcctgacatgcgcagattcttcgaaaatttgaacccaatgggctctgcaagcgagaaagagtttacggactatctgtttaacaaatccttagagatcgagccccggaattgcaagcagcccccaaggtttccacgaaaatccacattcagcctcaaaagcccaggtattagacctaacactggtaggcacggctcaacctctggcaccttgcggggccatcccaccccgctcgaacgcgagccatgcaaaatcagtttttcacgcatcgcagaaaccgagttggaaagtacagtatccgccccaaccagcccaaatactcccagcacccctcctgtctccgccagttctgatctgtcagtattcctcgacgtggatctgaacagttcatgcggtagcaattccatcttcgccccggtactcctgccacattctaagagttttttctctagctgcggctccctgcataagctgagcgaggaacctcttatcccccccccacttcctccacgcaagaagtttgaccacgacgcctctaattcgaaaggaaatatgaaatcagacgatgacccacctgcaataccacctcgtcagccacctccacctaaggtcaagccccgtgtgccagtgcccactggtgcgtttgacggaccactccactccccacccccacctcctccccgcgatcctctcccagacacccccccgcctgtgcccctgcgcccaccagagcatttcatcaactgccccttcaacctccaacctccacccctggggcacttgcaccgcgacagcgactggctccgcgacatcagcacatgtccgaactctccctccacacctccgagcacccctagcccaagagtgccccgacgatgttacgttttgagtagcagccaaaataacctggcacatcctcccgctccccccgtgccaccacgccagaactccagcccacaccttcctaagctcccccctaagacttataagcgcgaattgagccaccctcccttatataggttacccctgctagagaacgcggagactccccagtag

SEQ ID NO: 169355 - DNA, 3900 bp, Artificial Sequence
  derived and/or modified sequence
atgcagcaggccccccagccctatgagttcttcagcgaggagaacagccccaagtggaggggcctgctggtgtctgccctgaggaaggtgcaggagcaggtgcaccccaccctgagcgccaatgaggagagcctgtactacatcgaggagctgatcttccagctgctgaacaagctgtgcatggcccagcccaggacagtgcaggatgtggaggagcgggtgcagaagaccttcccccaccccatcgacaagtgggccatcgcagatgcccagagcgccatcgagaagaggaagagaagaaaccccctgctgctgcctgtggacaagatccaccccagcctgaaggaggtgctgggctacaaggtggactaccacgtgtccctgtacatcgtggccgtgctggagtacatctctgctgacatcctgaagctggccggcaactacgtgttcaacatccgccactatgagatcagccagcaggacatcaaggtgtccatgtgtgccgacaaggtgctgatggacatgtttgaccaggatgacatcggcctggtgtccctgtgtgaagatgagcccagcagcagcggggagctgaactactatgacctggtgaggacagaaattgctgaggagcggcagtacctgcgggagctgaacatgatcatcaaggtgttccgggaggccttcctgagtgacaggaagctgttcaagcccagcgacatcgagaagatcttcagcaacatcagtgacatccacgagctgactgtgaagctgctgggcctgattgaggacacagtggagatgacagatgagagcagcccccaccccctggccggcagctgctttgaggacctggccgaggagcaggcctttgacccctatgagaccctgagccaggacatcctgagccctgagttccacgagcacttcaacaagctgatggcccggcctgctgtggccctgcacttccagcagctgaaggcctgcagcgaggagcaggaggaccgggagtgcctgaaccaggccatcacagccctgatgaacctgcagggctccatggaccgcatctacaagcagtacagccccaggagaagacctggggaccctgtgtgccccttctacagccaccagctgcggagcaagcacctggccatcaagaagatgaatgagatccagaagaacattgatggctgggagggcaaggacatcggccagtgctgcaatgagttcatcatggagggccccctgacccgcatcggggccaagcatgagcggcacatcttcctgtttgatggcctgatgatcagctgcaagcccaaccacggccagacccggctgcccggctacagcagcgctgagtaccgcctgaaggagaagtttgtgatgaggaagatccagatctgtgacaaggaggacacctgtgagcacaagcacgcctttgagctggtgtccaaggatgagaacagcatcatctttgctgccaagtctgctgaggagaagaacaactggatggccgccctgatcagcctgcactaccgcagcaccctggacaggatgctggacagcgtgctgctgaaggaggagaatgagcagcccctgcggctgcccagccctgaggtgtacagatttgtggtgaaggacagtgaagaaaatattgtgtttgaggacaacctgcagagccgcagcggcatccccatcatcaagggcggcaccgtggtgaagctgattgagcggctgacctaccacatgtatgctgaccccaactttgtgaggaccttcctgaccacctaccgctccttctgcaagccccaggagctgctgagcctgctgattgaaagatttgagatccctgagcctgagcccacagatgctgacaagctggccatcgagaagggggagcagcccatctctgctgacctgaagcgcttcaggaaggagtatgtgcagcctgtgcagctgcgcatcctgaatgtgttccgccactgggtggagcaccacttctatgactttgagcgggacctggagctgctggagcggctggagagcttcatcagctctgtgcggggcaaggccatgaagaagtgggtggagagcatcgccaagatcatccggaggaagaagcaggcccaggccaatggagtgagccacaacatcacctttgagagccccccaccacccatcgagtggcacatcagcaagccaggccagtttgagacctttgacctgatgaccctgcaccccattgaaattgcccggcagctgaccctgctggagagtgacctgtacaggaaggtgcagcccagcgagctggtgggctctgtgtggaccaaggaggacaaggagatcaacagccccaacctgctgaagatgatccgccacaccaccaacctgaccctgtggtttgagaagtgcatcgtggaggccgagaactttgaggagcgggtggccgtgctgagccgcatcatcgagatcctgcaggtgttccaggacctgaacaacttcaacggggtgctggagatcgtgtctgctgtgaacagcgtgtctgtgtaccgcctggaccacacctttgaggccctgcaggagaggaagaggaagatcctggatgaagctgtggagctgagccaggaccacttcaagaagtacctggtgaagctgaagagcatcaaccccccctgtgtgcccttcttcggcatctacctgaccaacatcctgaagacagaggagggcaacaatgacttcctgaagaagaagggcaaggacctgatcaacttcagcaagaggaggaaggtggccgagatcactggagagatccagcagtaccagaaccagccctactgcctgcgcatcgagccagacatgaggcgcttctttgagaacctgaaccccatgggcagcgccagcgagaaggagttcacagactacctgttcaacaagagcctggagattgagcccaggaactgcaagcagcccccacgcttccccaggaagagcaccttcagcctgaagagccctggcatccggcccaacacaggccgccacggcagcaccagcggcaccctgcggggccaccccacccccctggagcgggagccctgcaagatctccttcagcagaattgctgagacagagctggagagcacagtgtctgcccccaccagccccaacacccccagcaccccacctgtgtctgccagcagtgacctgagcgtcttcctggatgtggacctgaacagcagctgtggcagcaacagcatctttgcccctgtgctgctgccccacagcaagagcttcttcagcagctgtggcagcctgcacaagctgtctgaggagcccctcatccccccacccctgccccccaggaagaagtttgaccatgatgccagcaacagcaagggcaacatgaagagtgatgatgatcctccagccatccccccccggcagcccccaccacccaaggtgaagccccgggtgcctgtgcccaccggggcctttgatggccccctgcacagccccccacctcctccaccccgggaccccctgcctgacaccccacctcctgtgcccctgcggcccccagagcacttcatcaactgccccttcaacctgcagcccccacccctgggccacctgcaccgggacagcgactggctgcgggacatcagcacctgccccaacagccccagcaccccacccagcacccccagcccccgggtgccccggcgctgctacgtgctgagcagcagccagaacaacctggcccaccccccagcccctcctgtgcccccccggcagaacagcagcccccacctgcccaagctgccccccaagacctacaagcgggagctgagccacccccccctgtaccgcctgcccctgctggagaatgctgagaccccccagtag

SEQ ID NO: 169356 - DNA, 3900 bp, Artificial Sequence
  derived and/or modified sequence
atgcagcaggccccccagccctacgagttcttcagcgaggagaactcacctaagtggcggggtttgctggtgtctgctttgcgtaaagtacaagaacaggtgcatcccacactatctgcaaacgaagagtccctgtactacatcgaggagctgatcttccagctactcaacaagctatgcatggctcagcctcgaacagtccaggacgtggaggagagggttcaaaaaactttcccgcacccgatagacaagtgggccatagctgacgcccagtcagctattgaaaaacgtaagcggaggaacccccttctgctgcccgtcgacaagattcatccatcactaaaggaggtgctaggctacaaagtggattaccatgtgtccttgtacattgttgccgtacttgaatacattagcgctgacattctcaaactcgctggtaattacgtctttaatataagacattacgagatctcgcagcaagatattaaggtgtcgatgtgcgcagacaaagtgttaatggatatgtttgaccaggacgacattggactcgtgagtttgtgtgaagatgagccttcgagctccggtgagctcaactattatgaccttgtcaggactgagatagcagaagagagacaatatttgcgggaactgaatatgatcattaaggtgttcagagaggcattcctcagtgatcgaaagcttttcaaacctagcgatatcgagaagatcttttctaatattagtgacatccatgagctcactgtcaagctactaggcctgattgaagatacggtagagatgactgacgaatcctcaccccatccacttgccggaagctgcttcgaagatctggccgaagagcaagcgttcgacccgtacgaaactttgtcacaggacatactctcacccgagtttcatgagcacttcaacaagctgatggccaggccagctgtggcgctgcacttccagcaattgaaggcttgttcagaggaacaggaagaccgtgaatgcctgaaccaagcgattaccgctctaatgaacctgcaggggagtatggatcgcatatacaaacaatattctcccagacggcggcccggggacccggtctgtcccttttacagtcatcagctccgtagcaagcacctcgccataaaaaagatgaatgaaatccagaagaatattgatggctgggaaggcaaggatatcgggcagtgttgcaatgagttcattatggaaggccccctgacccgtatcggagcaaaacatgaaagacatattttcctgttcgacggacttatgatttcatgtaaacctaaccatgggcagacccgtctgcctgggtattctagtgcagagtatagactaaaagagaaattcgtgatgaggaagattcagatttgcgataaggaggacacatgcgaacataagcatgcattcgagttagtgtctaaggatgagaactcgattatttttgcggcaaaatccgcggaggagaaaaacaactggatggccgcactgatttctttacattacagatctaccttggatcgtatgctcgattccgtcctcctgaaggaagagaacgagcagcctttgcggttgcctagccctgaagtctacaggtttgtggtgaaggattctgaagaaaatatagttttcgaggataatctgcagtctcgatctggcattccaatcattaagggcggcacagtggtcaagctgatcgagagactgacttaccatatgtatgctgaccccaacttcgttcgcacgttcttgactacataccgatctttctgcaagcctcaggagctgttgagtttgttaatcgagcgctttgaaatacccgagcccgaacccacggatgcagacaagctcgccatcgagaaaggggagcagccaatcagtgcggatctaaaacggttccggaaagagtacgtccagccggtgcagcttagaattttaaatgttttccgacactgggtcgagcaccacttttatgatttcgagcgggacttggaattacttgagaggcttgagagctttatctcgtccgtacgtggaaaggccatgaaaaaatgggtggaatcaattgccaaaattatccggcggaagaagcaggctcaagccaacggagtcagccacaacataacattcgagagccctccccctcccattgagtggcatatctcaaagcctggccaatttgaaacgttcgatttgatgactctgcacccaatcgaaattgctcggcagcttaccctgctagagtctgacctctatcgcaaagtacagccctctgagcttgtcggatccgtgtggacaaaggaggataaggaaattaactcacccaatctgctcaagatgattcgacacaccacaaatctgacactttggttcgagaaatgtattgtcgaggctgaaaattttgaggagagggtcgccgttctctccaggatcattgaaatacttcaggtgttccaggacctgaacaactttaacggcgtgctcgagatcgtctctgccgtaaattccgtgtccgtgtacaggctggatcatacattcgaagccctgcaggaacgaaagcgaaaaatcctggatgaagcagttgaactgtcacaggatcatttcaagaagtacctggtcaagctaaaatctataaatccaccgtgcgttccttttttcgggatctacctcacaaatattctcaagaccgaggaagggaacaacgacttcctgaaaaagaagggcaaggatcttatcaatttctccaagagaaggaaagtggccgaaatcactggcgagattcaacaataccagaatcagccatattgcttgcggattgagcccgatatgcgacgatttttcgagaacctcaatcccatggggtccgctagtgagaaagagttcacagattatctttttaataagtctctggaaatcgaaccccggaattgcaaacaacctccaagattcccccggaagtcaaccttctcactcaagtcccccgggattaggccaaacaccgggcgtcatggctccacaagcggcacgttgagaggtcaccctacgccacttgaaagagaaccctgtaaaatctccttctctcgcattgccgaaacagagttggaaagtacggtgtccgcccccactagtccaaacaccccgtcaacacccccagtgagcgcgtctagtgatctttccgtcttcttggatgttgacctgaacagctcttgtggtagcaattctatcttcgcaccggtcttactgcctcacagtaaatcttttttttctagctgtgggagccttcacaagctatccgaagaaccacttattccccccccccttcctccacggaagaagttcgatcatgatgccagcaattcgaaaggcaatatgaaaagcgacgatgatccgcctgctatccccccacgtcagcctcctcctcctaaggttaaacccagggtccctgttccaacaggcgcgttcgatggacccctccacagcccgccaccacctccaccacgcgacccacttccggatactccaccccctgttccacttagaccccctgagcactttatcaattgtccttttaatcttcagcccccgcctcttggtcacctgcacagggactcagactggttaagggatatctcgacctgcccgaattcaccctctacccctcctagcactccatcccctcgtgtgcctcgcaggtgctacgtgctttcaagtagccaaaacaacctcgcgcatcctcctgcccctccggtgccgccgcgacaaaattctagtcctcatctccccaagcttccaccaaaaacgtacaaaagggagcttagccaccctcccttgtataggctccccctgctggaaaatgctgaaacaccccaatag

SEQ ID NO: 169357 - DNA, 3900 bp, Artificial Sequence
  derived and/or modified sequence
atgcagcaggcccctcagccttatgagttctttagcgaagaaaactccccaaagtggcgcggactgcttgtcagcgcactgcgcaaagtgcaagagcaagtacaccctacactgagcgctaacgaggaaagcctttactatatcgaagaactgatctttcagctgttgaacaaattatgcatggcccagccacggactgttcaggacgtggaagaaagagttcaaaagacattcccacacccaatagataagtgggccatcgccgatgcccaaagtgctattgaaaaacgcaagcgaaggaaccccttgctcctgcccgtggataaaattcatccatccctaaaggaagtgttgggatataaagtggattatcacgtgtcgttatacattgtggcagtcctagagtatatctcagcagacatcctaaagttggctgggaattacgtgttcaacatacggcactacgagatcagccagcaagacatcaaagtttcaatgtgtgccgacaaagttctaatggacatgttcgatcaggacgacatcggtctggtgagcctgtgcgaagacgagccttcgagcagtggggagctcaactactacgatctggtgcggacagaaattgccgaggagagacagtaccttagagagctaaacatgatcatcaaagtattcagggaagcattcctgtcagaccgtaagctctttaaaccatccgacattgagaagatcttctctaacataagtgacattcatgaactgacagtgaaattgctggggcttatcgaagacaccgttgagatgaccgatgaaagctctccacacccactagcgggatcctgtttcgaggatcttgccgaggaacaggcgtttgacccatacgagactttatcgcaagatattttaagtcctgagtttcatgaacacttcaacaagttgatggcgaggccagccgtggcactccactttcagcaattgaaagcttgtagcgaagagcaggaagatcgcgagtgcctcaaccaggcaattactgctttgatgaatctgcagggatctatggatcggatttataagcagtactcccctcgaaggcggccaggagatcccgtgtgcccgttctactcccatcagctcagaagcaagcatttggccatcaagaaaatgaatgagattcagaaaaatattgacggttgggaaggcaaggacattggccaatgctgcaacgagttcattatggagggaccattaacacggattggggcaaagcacgaacgccacatcttcctcttcgatggtctgatgatttcctgcaagcccaaccatggccagaccaggctccctggatattcatccgcagagtacaggctgaaggaaaagttcgtcatgaggaaaattcaaatctgcgataaagaggacacttgcgaacataaacacgcattcgagctagtgagtaaagacgagaatagcattattttcgccgcaaagtcagccgaagagaagaataattggatggcggcactgatttccctgcactaccggagtacattggatcgaatgctggacagtgttcttctcaaggaggagaacgaacagcccctgaggttgccgagcccggaagtgtaccggtttgtggtaaaggactccgaggagaatatcgtattcgaagacaatcttcaatcaaggagcggcatccctattatcaaaggcggaactgtcgtgaagttgattgaacgtctgacctatcacatgtacgctgatcctaattttgttaggaccttcctgactacttatagatctttctgtaagcctcaggagctattatcccttctgatcgaaaggtttgagatacctgagcctgagcccactgatgcagacaagctggctattgagaaaggggaacagccgatctccgcggacctgaaacgctttagaaaggagtatgtgcagccagtacagctgcggattctgaacgtgtttagacattgggtggaacatcacttctacgacttcgagcgggacctggaacttttggaaagactggaaagcttcatttcctccgtgcggggaaaggctatgaagaaatgggtagagagtatagctaaaatcatcaggaggaaaaaacaggcgcaggcgaatggggtctctcacaacattaccttcgagtctcctccccctcccatcgagtggcatatatccaagcctgggcagtttgagacattcgatttaatgaccctccatccaatcgaaatcgcgcgacagctcacactgctggagtcagacttatacaggaaggtgcagccatcggaactcgttgggtctgtgtggaccaaggaagataaagagattaacagccctaatttactcaaaatgattcggcacactacaaatcttaccctctggtttgagaagtgcatagtggaagctgagaactttgaggagagggtggcagtactgagccgcatcattgaaattctgcaggtgtttcaggatctgaataactttaacggggtgttggagattgttagtgctgtgaattccgtgtccgtgtatagactggaccatactttcgaagcacttcaggagagaaagcggaaaatcctggacgaagcggtcgaactgtcacaagaccatttcaagaagtacctggtgaagctgaaatctatcaacccaccttgtgtgcccttcttcggtatttacctaacaaatattctgaagacagaggaaggaaataacgattttttgaaaaagaaaggcaaggacttgatcaatttcagtaaacggagaaaagtggcggaaatcactggagagattcagcagtatcagaatcagccctactgtctgcgcatcgagcccgatatgcggcgttttttcgagaatctgaaccctatgggctctgcctctgagaaagagtttaccgactatctgtttaacaagtctctagagattgagcctagaaactgtaagcagccacccagattccccagaaagtctacatttagcctcaaaagcccaggaataagacccaataccggcagacacggctctacgagcggcaccctgcggggacacccaactcccctggagcgagagccatgtaagatctcatttagtcgaatagcagaaacggaacttgaatccacagtgtctgctcctacttcaccaaacacacctagtacacctcctgtctcggccagctctgaccttagcgtcttcttagacgttgatttgaacagctcgtgtggatctaattcaatatttgcccctgtgctgctgccacattctaaatctttttttagttcgtgtggctccctacacaagttatccgaagaacccctcattccccctccacttcctccaaggaaaaaattcgaccacgacgccagcaattctaaagggaatatgaaaagcgatgatgatccgccagctattcccccacgtcagccgccaccacccaaagttaaaccgagggtaccggttcctactggagctttcgatggcccactgcattctcctccccctccaccccctcgggatccgctgccagatacgccccctcctgtgccactgagaccacccgagcatttcatcaactgccctttcaatctccaacctcctcccctagggcatctccatagagactcagattggcttcgggacattagtacatgtccaaattccccgagtacgccaccctctaccccctcccccagagtgccaaggcggtgctatgtgctttctagttcccagaacaatctggcacaccctcctgcaccgccagttcctcccaggcagaactccagccctcacctgcctaaattaccccctaagacttacaaaagagaactctcgcacccaccattgtataggctgccactgctcgaaaatgccgaaacaccgcagtag

SEQ ID NO: 169358 - DNA, 5489 bp, Artificial Sequence
  derived and/or modified sequence
gggaaaggaggtcgccgcccggggtcgcccgggcttgcgggtcgccgcgcttcctctgcgggcgctgcgggaggcgagggccgcctcggcggaggaagccgaccccggggtctccgccagcccgccggcgccgcctccgagccgcctcggccgtagcctcggcccgggcgggaggcggcggccgccggcgaggcgaggcggcccgcgccctgcctgtcaggccaccggcccggcccgcgggctgcccccgatgcggaggcgctgtcgccggggccatgcagcaggcgccgcagccttacgagttcttcagcgaggagaacagtccgaaatggcggggactgttggtctcggccctgcggaaggttcaggaacaagtgcatcccactctctcagctaatgaagagtctctctattatattgaagagctgatttttcagctgcttaataaattatgcatggcccagccaaggactgttcaagatgtagaggagcgagttcagaagacctttcctcacccaattgataaatgggccattgctgatgcacaatctgctatagaaaaacgaaaacgaagaaatcctcttttactgcctgtggacaaaatccatccttcgttgaaggaagtattagggtacaaagtggactaccatgtatccctatatattgtggctgtactagagtatatctcagctgatattttaaaattggctggtaattatgtttttaatatccggcattatgaaatatctcagcaggacattaaagtgtcaatgtgtgcggataaggttttgatggacatgtttgatcaggatgacataggtttggtttctctctgtgaagatgaacctagttcttctggtgaattaaactactatgatcttgtcagaactgaaatcgcagaagaaagacagtatctacgggaattaaatatgatcataaaagtgtttcgagaagcctttctttctgatagaaagctgtttaaaccttctgatatcgaaaagatttttagtaacatttcagatatacatgaattgactgtgaaacttttaggtttgattgaagacacagttgaaatgactgatgaaagcagtcctcatcccttagctggcagctgttttgaagatttggcagaagagcaagcatttgatccttatgaaacattatcacaggacattctttcaccagagtttcatgaacatttcaataaattgatggccagacctgcagttgctctacactttcagtccattgctgatggttttaaagaggcagttcgttatgtccttccacgtcttatgctggtgccagtgtatcactgttggcactactttgagttactaaagcaattgaaagcatgtagtgaagaacaagaagacagagaatgtttgaaccaagctattactgctctcatgaatctccaaggtagcatggaccgaatttacaagcagtattcacctagacgtcgacctggagatcctgtttgccctttttatagtcaccaattaagaagcaaacacctggctatcaaaaaaatgaatgaaattcagaaaaatatcgatggatgggaaggcaaagatattggacagtgttgtaatgaattcattatggagggaccattgacaagaatcggtgccaaacatgaacggcatatttttctgtttgatggcttaatgatcagttgtaaacctaatcatggccagactcggcttccaggttacagtagtgcagaatacaggttaaaagaaaaatttgtcatgaggaaaatacaaatttgtgataaagaagatacttgtgagcacaagcatgcatttgaattagtatccaaagatgagaacagcataatatttgctgctaagtctgctgaagaaaaaaacaactggatggcagcccttatttctcttcattatcgtagtactctagatcgaatgttagattcagtattattgaaagaagaaaatgagcaaccactgagattaccaagtcctgaagtatatcgttttgtagtaaaagactctgaggaaaacattgtttttgaagacaacttgcaaagtagaagtggcatccccattattaaaggaggaactgtagtgaaattaattgaaaggttaacatatcatatgtatgcagatcccaattttgttcgtacttttcttaccacatatcgttcattttgtaaaccacaggaattgctgagcttactgattgaacggtttgaaattccagagccagaacctactgacgcagacaaattggcaatagagaaaggcgagcagccaatcagtgcagaccttaaaagatttcgcaaggaatatgtccaaccagtacaacttaggatcttaaatgtatttcggcattgggttgaacatcatttttatgactttgaaagagacttggaattgcttgaaagactagaatccttcatttcaagtgtaagagggaaagctatgaaaaaatgggtagagtcaattgctaagatcatcaggaggaagaagcaagctcaggcaaacggagtaagccataatattacctttgaaagtccacctccaccaattgaatggcatatcagcaaaccaggacagtttgaaacatttgatctcatgacacttcatccaatagaaattgcacgtcagctgacacttttggagtctgatctttacaggaaagttcaaccgtctgaacttgtagggagtgtgtggaccaaagaagataaagaaataaattctccaaatttattaaaaatgattcgccataccacaaatctcaccctctggtttgaaaaatgcattgtggaagcagaaaattttgaagaacgggtggcagtactaagtagaattatagaaattctgcaagtttttcaagatttgaataatttcaatggcgtattggagatagtcagtgcagtaaattcagtgtcagtatacagactagaccatacctttgaggcactgcaggaaaggaaaaggaaaattttggacgaagctgtggaattaagtcaagatcactttaaaaaatacctagtaaaacttaagtcaatcaatccaccttgtgtgcctttttttggaatatatttaacaaatattctgaagaccgaagaagggaataatgattttttaaaaaagaaagggaaagatttaatcaatttcagtaagaggaggaaagtagctgaaattactggagaaattcagcagtatcagaatcagccttactgtttacggatagaaccagatatgaggagattctttgaaaaccttaaccccatgggaagtgcatctgaaaaagagtttacagattatttgttcaacaagtcactagaaattgaacctcgaaactgcaaacagccacctcgatttcctaggaaatcaactttttccttaaaatctcctggaataaggcctaacacaggccgacatggctctacctcaggtactttacgaggtcacccaacaccattagaaagagaaccatgtaaaataagctttagtcggattgctgaaactgagctggaatcaacagtgtcagcaccaacctctccaaatacaccatctactccaccagtatctgcttcttcagaccttagtgtatttttagatgtggatctcaacagctcctgtggcagcaatagcatctttgctccagtgcttttgccacattcaaagtctttctttagttcatgtggtagtttacataaactaagtgaagagcccctgattcctcctcctcttcctcctcgaaaaaagtttgatcatgatgcttcaaattccaagggaaatatgaaatctgatgatgatcctcctgctattccaccgagacagcctcctcctccaaaggtaaaacccagagttcctgttcctactggtgcatttgatgggcctctgcatagtccacctccgccaccaccaagagatcctcttcctgatacccctccaccagttccccttcggcctccagaacactttataaactgtccatttaatcttcagccacctccactggggcatcttcacagagattcagactggctcagagacattagtacgtgtccaaattcgccaagcactcctcctagcacaccctctccaagggtaccgcgtcgatgctatgtgctcagttctagtcagaataatcttgctcatcctccagctccccctgttccaccaaggcagaattcaagccctcatctgccaaaactgccaccaaagacttacaaacgggagctttcgcaccccccattgtacagactgcctttgctagaaaatgcagaaactccccaatgaccttagccatatgtagtcattgacactggaatggtatttgtaaagttttttttttaatttattcaaaaaaagacatagtattttagtactttttacaaataatgctcttacaaaaatgctactgatcaaataagcttttaagaattggaaaaataaaaatacaaaagtccttcaccattatcctcaggtgatcagtagcattgccttgtcttggatcctcagtgctgccaaaaggccagtataaagaatttatatttgcactgtaaactctgcaaaaatatggtttaaagtgacatgattgcactgaaaagggatagtgcttttgtgaaatttttcaaatttgagtaatagatgcctttttaaggcagtgaatttacacaaatatgggaggggtatatggtgttactgatttttaaacctctttgaccatcttctagtttttacttctagtttttacatctaggagaattgtgaataacaccaactgttcttaaactctttaatgccatgtcttaaatgccggtatttgctgctgaagacaaaaatgaaaagtaggatgaaaataatagaatggcactgtaagtgtttattattttgtcaaaatgtaaacaaagactacataacccaatgatggagggaaaaagggcatgtatctcattcagatgtgccttttgtttttgcagactatgacgtctttagctaatgaattgcctattgttatggaaaacagttaatatgccatgtatgtacagttttgtttatattgtatatttaaagatactgctaataacctatataaatttaagtgacttgaggcctataatacaatctgctactttactaattcataaattcaaaaaaaattctatggcataggaaccaactgccttgccttcaagacctagtaactttctctataaatctcgtgttaactgaaattttttttaaatatattttttagattggtaatatttaaaccagcaaatacttaaagctttattaaacattttaatcagataagtgagtaaagcttttatttgccatttggatgccttcgttcaaagtgatagagtgttttgctgatagtgctgtagcagcagttgtaaagtagccaaaagccacgttgtttatttactggtttgtggccttttactgtgctttgtatcagagttcttaacaagattaataaatcaccccagtcttaatttttaaaag

SEQ ID NO: 169359 - DNA, 3960 bp, Artificial Sequence
  derived and/or modified sequence
gatgcggaggcgctgtcgccggggccatgcagcaggcgccgcagccttacgagttcttcagcgaggagaacagtccgaaatggcggggactgttggtctcggccctgcggaaggttcaggaacaagtgcatcccactctctcagctaatgaagagtctctctattatattgaagagctgatttttcagctgcttaataaattatgcatggcccagccaaggactgttcaagatgtagaggagcgagttcagaagacctttcctcacccaattgataaatgggccattgctgatgcacaatctgctatagaaaaacgaaaacgaagaaatcctcttttactgcctgtggacaaaatccatccttcgttgaaggaagtattagggtacaaagtggactaccatgtatccctatatattgtggctgtactagagtatatctcagctgatattttaaaattggctggtaattatgtttttaatatccggcattatgaaatatctcagcaggacattaaagtgtcaatgtgtgcggataaggttttgatggacatgtttgatcaggatgacataggtttggtttctctctgtgaagatgaacctagttcttctggtgaattaaactactatgatcttgtcagaactgaaatcgcagaagaaagacagtatctacgggaattaaatatgatcataaaagtgtttcgagaagcctttctttctgatagaaagctgtttaaaccttctgatatcgaaaagatttttagtaacatttcagatatacatgaattgactgtgaaacttttaggtttgattgaagacacagttgaaatgactgatgaaagcagtcctcatcccttagctggcagctgttttgaagatttggcagaagagcaagcatttgatccttatgaaacattatcacaggacattctttcaccagagtttcatgaacatttcaataaattgatggccagacctgcagttgctctacactttcagcaattgaaagcatgtagtgaagaacaagaagacagagaatgtttgaaccaagctattactgctctcatgaatctccaaggtagcatggaccgaatttacaagcagtattcacctagacgtcgacctggagatcctgtttgccctttttatagtcaccaattaagaagcaaacacctggctatcaaaaaaatgaatgaaattcagaaaaatatcgatggatgggaaggcaaagatattggacagtgttgtaatgaattcattatggagggaccattgacaagaatcggtgccaaacatgaacggcatatttttctgtttgatggcttaatgatcagttgtaaacctaatcatggccagactcggcttccaggttacagtagtgcagaatacaggttaaaagaaaaatttgtcatgaggaaaatacaaatttgtgataaagaagatacttgtgagcacaagcatgcatttgaattagtatccaaagatgagaacagcataatatttgctgctaagtctgctgaagaaaaaaacaactggatggcagcccttatttctcttcattatcgtagtactctagatcgaatgttagattcagtattattgaaagaagaaaatgagcaaccactgagattaccaagtcctgaagtatatcgttttgtagtaaaagactctgaggaaaacattgtttttgaagacaacttgcaaagtagaagtggcatccccattattaaaggaggaactgtagtgaaattaattgaaaggttaacatatcatatgtatgcagatcccaattttgttcgtacttttcttaccacatatcgttcattttgtaaaccacaggaattgctgagcttactgattgaacggtttgaaattccagagccagaacctactgacgcagacaaattggcaatagagaaaggcgagcagccaatcagtgcagaccttaaaagatttcgcaaggaatatgtccaaccagtacaacttaggatcttaaatgtatttcggcattgggttgaacatcatttttatgactttgaaagagacttggaattgcttgaaagactagaatccttcatttcaagtgtaagagggaaagctatgaaaaaatgggtagagtcaattgctaagatcatcaggaggaagaagcaagctcaggcaaacggagtaagccataatattacctttgaaagtccacctccaccaattgaatggcatatcagcaaaccaggacagtttgaaacatttgatctcatgacacttcatccaatagaaattgcacgtcagctgacacttttggagtctgatctttacaggaaagttcaaccgtctgaacttgtagggagtgtgtggaccaaagaagataaagaaataaattctccaaatttattaaaaatgattcgccataccacaaatctcaccctctggtttgaaaaatgcattgtggaagcagaaaattttgaagaacgggtggcagtactaagtagaattatagaaattctgcaagtttttcaagatttgaataatttcaatggcgtattggagatagtcagtgcagtaaattcagtgtcagtatacagactagaccatacctttgaggcactgcaggaaaggaaaaggaaaattttggacgaagctgtggaattaagtcaagatcactttaaaaaatacctagtaaaacttaagtcaatcaatccaccttgtgtgcctttttttggaatatatttaacaaatattctgaagaccgaagaagggaataatgattttttaaaaaagaaagggaaagatttaatcaatttcagtaagaggaggaaagtagctgaaattactggagaaattcagcagtatcagaatcagccttactgtttacggatagaaccagatatgaggagattctttgaaaaccttaaccccatgggaagtgcatctgaaaaagagtttacagattatttgttcaacaagtcactagaaattgaacctcgaaactgcaaacagccacctcgatttcctaggaaatcaactttttccttaaaatctcctggaataaggcctaacacaggccgacatggctctacctcaggtactttacgaggtcacccaacaccattagaaagagaaccatgtaaaataagctttagtcggattgctgaaactgagctggaatcaacagtgtcagcaccaacctctccaaatacaccatctactccaccagtatctgcttcttcagaccttagtgtatttttagatgtggatctcaacagctcctgtggcagcaatagcatctttgctccagtgcttttgccacattcaaagtctttctttagttcatgtggtagtttacataaactaagtgaagagcccctgattcctcctcctcttcctcctcgaaaaaagtttgatcatgatgcttcaaattccaagggaaatatgaaatctgatgatgatcctcctgctattccaccgagacagcctcctcctccaaaggtaaaacccagagttcctgttcctactggtgcatttgatgggcctctgcatagtccacctccgccaccaccaagagatcctcttcctgatacccctccaccagttccccttcggcctccagaacactttataaactgtccatttaatcttcagccacctccactggggcatcttcacagagattcagactggctcagagacattagtacgtgtccaaattcgccaagcactcctcctagcacaccctctccaagggtaccgcgtcgatgctatgtgctcagttctagtcagaataatcttgctcatcctccagctccccctgttccaccaaggcagaattcaagccctcatctgccaaaactgccaccaaagacttacaaacgggagctttcgcaccccccattgtacagactgcctttgctagaaaatgcagaaactccccaatgaccttagccatatgtagtcattgacactggaatgg

SEQ ID NO: 169360 - protein, 763 aa, Artificial Sequence [sequence omitted]

SEQ ID NO: 169361 - DNA, 4333 bp, Artificial Sequence
  derived and/or modified sequence
gagaaaatcaattggtttagaaggtttggactcacttgacaggttcagttggagacgatcataggtggctgctgtgacaaagggaaattgtgcttttccagcatgcttactgaccctgatttacctcaggagtttgaaaggatgtcttccaagcgaccagcctctccgtatggggaagcagatggagaggtagccatggtgacaagcagacagaaagtggaagaagaggagagtgacgggctcccagcctttcaccttcccttgcatgtgagttttcccaacaagcctcactctgaggaatttcagccagtttctctgctgacgcaagagacttgtggccataggactcccacttctcagcacaatacaatggaagttgatggcaataaagttatgtcttcatttgccccacacaactcatctacctcacctcagaaggcagaagaaggtgggcgacagagtggcgagtccttgtctagtacagccctgggaactcctgaacggcgcaagggcagtttagctgatgttgttgacaccttgaagcagaggaaaatggaagagctcatcaaaaacgagccggaagaaacccccagtattgaaaaactactctcaaaggactggaaagacaagcttcttgcaatgggatcggggaactttggcgaaataaaagggactcccgagagcttagctgagaaagaaaggcaactcatgggtatgatcaaccagctgaccagcctccgagagcagctgttggctgcccacgatgagcagaagaaactagctgcctctcagattgagaaacagcgtcagcaaatggagctggccaagcagcaacaagaacaaattgcaagacagcagcagcagcttctacagcaacaacacaaaatcaatttgctccagcaacagatccaggttcaaggtcagctgccgccattaatgattcccgtattccctcctgatcaacggacactggctgcagctgcccagcaaggattcctcctccctccaggcttcagctataaggctggatgtagtgacccttaccctgttcagctgatcccaactaccatggcagctgctgccgcagcaacaccaggcttaggcccactccaactgcagcagttatatgctgcccagctagctgcaatgcaggtatctccaggagggaagctgccaggcataccccaaggcaaccttggtgctgctgtatctcctaccagcattcacacagacaagagcacaaacagcccaccacccaaaagcaaggatgaagtggcacagccactgaacctatcagctaaacccaagacctctgatggcaaatcacccacatcacccacctctccccatatgccagctctgagaataaacagtggggcaggccccctcaaagcctctgtcccagcagcgttagctagtccttcagccagagttagcacaataggttacttaaatgaccatgatgctgtcaccaaggcaatccaagaagctcggcaaatgaaggagcaactccgacgggaacaacaggtgcttgatgggaaggtggctgttgtgaatagtctgggtctcaataactgccgaacagaaaaggaaaaaacaacactggagagtctgactcagcaactggcagttaaacagaatgaagaaggaaaatttagccatgcaatgatggatttcaatctgagtggagattctgatggaagtgctggagtctcagagtcaagaatttatagggaatcccgagggcgtggtagcaatgaaccccacataaagcgtccaatgaatgccttcatggtgtgggctaaagatgaacggagaaagatccttcaagcctttcctgacatgcacaactccaacatcagcaagatattgggatctcgctggaaagctatgacaaacctagagaaacagccatattatgaggagcaagcccgtctcagcaagcagcacctggagaagtaccctgactataagtacaagcccaggccaaagcgcacctgcctggtggatggcaaaaagctgcgcattggtgaatacaaggcaatcatgcgcaacaggcggcaggaaatgcggcagtacttcaatgttgggcaacaagcacagatccccattgccactgctggtgttgtgtaccctggagccatcgccatggctgggatgccctcccctcacctgccctcggagcactcaagcgtgtctagcagcccagagcctgggatgcctgttatccagagcacttacggtgtgaaaggagaggagccacatatcaaagaagagatacaggccgaggacatcaatggagaaatttatgatgagtacgacgaggaagaggatgatccagatgtagattatgggagtgacagtgaaaaccatattgcaggacaagccaactgataagggtcaaaagattgttgtgaccttaggacttaaagaagccctaactggttcatccttaccagtggccaagcacattaactttctcatacactgactgttactttaactgttagtcttaaatagttgggacatcagctgactaatagacctcagcctcaaaaggcttggaaagaaaaaacaaatacaacaagcaaacaacaatatcaacaacaagagattgaaataagctatgggtaaaataatgccagtaattcagctgctacatccaagcactgaagtcttacccgtcaacttttttttttttttaaataaactttatggctgtttgttctacaatgttctagaaattctcactcaggtacacagtgccaacaagtggcttgtgaatgtgttttgttgttttgtgctacaatttttaaaaagaaaaaagttttgttttgttttttggggtttctgggttttttccttttctttttctttcctttcattttttttctttgtaatgcacctgacagaaaaaaaagaaaaatgaatttctctttacttctctccaccttctccatctctctactttaaagatggaagtctgtgcatgaggggaaagagggaaaaagagcctgtttttaacttccttgctatccaccacaaaataagcaattattttctttagaggactttatctattgcacaccacactacatctttgagcaagtgccaaatttgtactgaagtgttgaccaagttcattttttctctttactttttccttttccttcttaagttaggacagtgttaaatcttagacaatcccttgaaaaacctgaaataccagcagctggtgagatttgacttttttttttaatggaaactgtaggtgctgttctcaggtgaaaagagagagagagagagagacataagaaatttagagaaaaatattttctgatcttggatttttgtgtgtatgtatgtatgtgattatggtactaataataggaataacgttggaccattgtgagttaaacccacatctggggatgaaatcccacatcctcccaagtgactggtctagaaataatcttgaccttgactttgcacttcaaatgacaacttaaccaagtatagggctcagaaattatatttttaaatgtctgattattattggatggatcaggtggccctgtgtaatagaggtgtgcatgtataacatggaagctactagcaaactgctcccagatgtcctttctccctggtcagttggttccattaacgtttgctacttagtgatttttgtttttcctgttgatattttgagcaaaacaatcattgttttcattgaatatatttggccattttttcagacaaatagaattagcttatttcttcaacattccatcctttcccgatcaggaaatgaaactgatgattttataaggtatttttcacccctccatgaagtgaggtggaggcctttagcatttcagaagtgtgggccatatgtagttcatgccataaaaagtaggatttaattaaaagtcattgcagcccaataaaatggagcctggctgcacccagggatccttgccactgctcttcccttgctgtcagattaatccactgaagtccaactttggttcaagcagagtatttgcaaagagcaacaactgaatgtgatgggactgcttatgtagattttgccagccaaatgccaaggcagttgtagggcctgtacaaataaatgcaaaatcatttcaagtcaattgccattatttgtattgaagtatcagatagatagtaaatactgcaactagtagcttgatgtgctatagttttcactccagtcatcattttcctatctcaccccccgaaacaccaccctaaagttggatttttacatataaataaaaaaagaatcccttttaaaaaaaaaaaaaaaaaa

SEQ ID NO: 169362 - DNA, 2253 bp, Artificial Sequence
  derived and/or modified sequence
atgagcagcaagagacccgccagcccctacggcgaggccgacggcgaggtggccatggtgaccagcagacagaaggtggaggaggaggagagcgacggcctgcccgccttccacctgcccctgcacgtgagcttccccaacaagccccacagcgaggagttccagcccgtgagcctgctgacccaggagacctgcggccacagaacccccaccagccagcacaacaccatggaggtggacggcaacaaggtgatgagcagcttcgccccccacaacagcagcaccagcccccagaaggccgaggagggcggcagacagagcggcgagagcctgagcagcaccgccctgggcacccccgagagaagaaagggcagcctggccgacgtggtggacaccctgaagcagagaaagatggaggagctgatcaagaacgagcccgaggagacccccagcatcgagaagctgctgagcaaggactggaaggacaagctgctggccatgggcagcggcaacttcggcgagatcaagggcacccccgagagcctggccgagaaggagagacagctgatgggcatgatcaaccagctgaccagcctgagagagcagctgctggccgcccacgacgagcagaagaagctggccgccagccagatcgagaagcagagacagcagatggagctggccaagcagcagcaggagcagatcgccagacagcagcagcagctgctgcagcagcagcacaagatcaacctgctgcagcagcagatccaggtgcagggccagctgccccccctgatgatccccgtgttcccccccgaccagagaaccctggccgccgccgcccagcagggcttcctgctgccccccggcttcagctacaaggccggctgcagcgacccctaccccgtgcagctgatccccaccaccatggccgccgccgccgccgccacccccggcctgggccccctgcagctgcagcagctgtacgccgcccagctggccgccatgcaggtgagccccggcggcaagctgcccggcatcccccagggcaacctgggcgccgccgtgagccccaccagcatccacaccgacaagagcaccaacagccccccccccaagagcaaggacgaggtggcccagcccctgaacctgagcgccaagcccaagaccagcgacggcaagagccccaccagccccaccagcccccacatgcccgccctgagaatcaacagcggcgccggccccctgaaggccagcgtgcccgccgccctggccagccccagcgccagagtgagcaccatcggctacctgaacgaccacgacgccgtgaccaaggccatccaggaggccagacagatgaaggagcagctgagaagagagcagcaggtgctggacggcaaggtggccgtggtgaacagcctgggcctgaacaactgcagaaccgagaaggagaagaccaccctggagagcctgacccagcagctggccgtgaagcagaacgaggagggcaagttcagccacgccatgatggacttcaacctgagcggcgacagcgacggcagcgccggcgtgagcgagagcagaatctacagagagagcagaggcagaggcagcaacgagccccacatcaagagacccatgaacgccttcatggtgtgggccaaggacgagagaagaaagatcctgcaggccttccccgacatgcacaacagcaacatcagcaagatcctgggcagcagatggaaggccatgaccaacctggagaagcagccctactacgaggagcaggccagactgagcaagcagcacctggagaagtaccccgactacaagtacaagcccagacccaagagaacctgcctggtggacggcaagaagctgagaatcggcgagtacaaggccatcatgagaaacagaagacaggagatgagacagtacttcaacgtgggccagcaggcccagatccccatcgccaccgccggcgtggtgtaccccggcgccatcgccatggccggcatgcccagcccccacctgcccagcgagcacagcagcgtgagcagcagccccgagcccggcatgcccgtgatccagagcacctacggcgtgaagggcgaggagccccacatcaaggaggagatccaggccgaggacatcaacggcgagatctacgacgagtacgacgaggaggaggacgaccccgacgtggactacggcagcgacagcgagaaccacatcgccggccaggccaactag

SEQ ID NO: 169363 - DNA, 2292 bp, Artificial Sequence
  derived and/or modified sequence
atgctgaccgaccccgacctgccccaggagttcgagagaatgagcagcaagagacccgccagcccctacggcgaggccgacggcgaggtggccatggtgaccagcagacagaaggtggaggaggaggagagcgacggcctgcccgccttccacctgcccctgcacgtgagcttccccaacaagccccacagcgaggagttccagcccgtgagcctgctgacccaggagacctgcggccacagaacccccaccagccagcacaacaccatggaggtggacggcaacaaggtgatgagcagcttcgccccccacaacagcagcaccagcccccagaaggccgaggagggcggcagacagagcggcgagagcctgagcagcaccgccctgggcacccccgagagaagaaagggcagcctggccgacgtggtggacaccctgaagcagagaaagatggaggagctgatcaagaacgagcccgaggagacccccagcatcgagaagctgctgagcaaggactggaaggacaagctgctggccatgggcagcggcaacttcggcgagatcaagggcacccccgagagcctggccgagaaggagagacagctgatgggcatgatcaaccagctgaccagcctgagagagcagctgctggccgcccacgacgagcagaagaagctggccgccagccagatcgagaagcagagacagcagatggagctggccaagcagcagcaggagcagatcgccagacagcagcagcagctgctgcagcagcagcacaagatcaacctgctgcagcagcagatccaggtgcagggccagctgccccccctgatgatccccgtgttcccccccgaccagagaaccctggccgccgccgcccagcagggcttcctgctgccccccggcttcagctacaaggccggctgcagcgacccctaccccgtgcagctgatccccaccaccatggccgccgccgccgccgccacccccggcctgggccccctgcagctgcagcagctgtacgccgcccagctggccgccatgcaggtgagccccggcggcaagctgcccggcatcccccagggcaacctgggcgccgccgtgagccccaccagcatccacaccgacaagagcaccaacagccccccccccaagagcaaggacgaggtggcccagcccctgaacctgagcgccaagcccaagaccagcgacggcaagagccccaccagccccaccagcccccacatgcccgccctgagaatcaacagcggcgccggccccctgaaggccagcgtgcccgccgccctggccagccccagcgccagagtgagcaccatcggctacctgaacgaccacgacgccgtgaccaaggccatccaggaggccagacagatgaaggagcagctgagaagagagcagcaggtgctggacggcaaggtggccgtggtgaacagcctgggcctgaacaactgcagaaccgagaaggagaagaccaccctggagagcctgacccagcagctggccgtgaagcagaacgaggagggcaagttcagccacgccatgatggacttcaacctgagcggcgacagcgacggcagcgccggcgtgagcgagagcagaatctacagagagagcagaggcagaggcagcaacgagccccacatcaagagacccatgaacgccttcatggtgtgggccaaggacgagagaagaaagatcctgcaggccttccccgacatgcacaacagcaacatcagcaagatcctgggcagcagatggaaggccatgaccaacctggagaagcagccctactacgaggagcaggccagactgagcaagcagcacctggagaagtaccccgactacaagtacaagcccagacccaagagaacctgcctggtggacggcaagaagctgagaatcggcgagtacaaggccatcatgagaaacagaagacaggagatgagacagtacttcaacgtgggccagcaggcccagatccccatcgccaccgccggcgtggtgtaccccggcgccatcgccatggccggcatgcccagcccccacctgcccagcgagcacagcagcgtgagcagcagccccgagcccggcatgcccgtgatccagagcacctacggcgtgaagggcgaggagccccacatcaaggaggagatccaggccgaggacatcaacggcgagatctacgacgagtacgacgaggaggaggacgaccccgacgtggactacggcagcgacagcgagaaccacatcgccggccaggccaactag

SEQ ID NO: 169364 - DNA, 2253 bp, Artificial Sequence
  derived and/or modified sequence
atgagtagcaaaaggcctgcctctccttatggcgaggcagacggggaggtggccatggtgaccagtagacagaaggtggaggaagaagagtccgacgggctcccagcttttcacctccccctgcatgtttcctttcccaacaagccccatagtgaggaattccagccagttagcctgttaacgcaggaaacctgcgggcacaggaccccaaccagccaacacaacacaatggaggtagacggtaacaaggtaatgtcttcatttgcccctcacaactcctccaccagtcctcagaaggcagaggagggcggtaggcaatcgggcgaaagcctttcaagtacagcgctcgggactccggagcgtcgtaaaggcagtctggctgacgtcgtggacacactgaagcagcgcaagatggaggagttaatcaaaaacgaaccagaggagacaccatcgatcgaaaagctcctcagcaaagactggaaggataaactgctggcaatgggatcgggcaacttcggagagataaagggcactccggagtctctcgcagagaaggagcggcagttgatgggtatgatcaaccagctgacaagcctccgagaacagctgctagccgcccatgatgaacagaagaaactggctgcctctcagatcgagaaacagcggcagcagatggagctcgcaaagcaacagcaggagcagattgcgcgacagcagcagcaactattgcagcaacagcacaaaatcaacctgctgcaacagcagatccaagtgcagggtcagttaccaccccttatgatcccggtattccctccagaccagcggacactggccgcagctgcgcaacaaggctttcttctgccaccaggcttttcctataaagccggttgtagcgatccctaccccgttcagctcattccgaccactatggctgctgcggccgcggccacccctggactcggcccgctgcagttgcagcagttgtacgccgcacaactggccgcaatgcaggtctcccctggcggtaagcttcccggcattcctcagggaaatctgggcgccgctgtttccccaaccagcatacatactgataagtccacaaactcaccgccacccaaatctaaagacgaagttgcacagcctctgaatctcagcgcaaaacctaagacaagtgatggcaaaagccccacatcacctaccagtccccatatgcctgccctgcgcatcaatagtggagctggcccactgaaagccagcgtccccgctgccctggctagccccagtgcgcgtgttagcaccatcgggtacctgaacgaccatgacgccgtgaccaaagcaattcaagaggcgcgacaaatgaaggagcaacttcggagggaacagcaggtcctcgatgggaaagttgccgtggtaaactcgctggggttgaacaactgtcgcactgagaaggagaagactacattggagtccctgacccagcaactggcggttaaacaaaatgaggagggaaagtttagtcatgcaatgatggactttaatctgagtggcgattccgatggcagcgccggagtgtcagaatctagaatctatcgagagtccagagggcggggtagcaacgaaccgcatatcaagaggccaatgaacgcctttatggtttgggccaaggacgaacggagaaagatactccaggctttccctgacatgcataattccaatatatcgaagattctggggtcacgctggaaggccatgacgaatttagagaaacagccttactatgaagagcaggccagactgtccaaacagcacttagagaaataccctgattataaatataaaccgcgaccaaagcgcacttgccttgtggacggcaaaaagttgcgcattggagagtataaggctatcatgaggaacaggcggcaggagatgagacaatatttcaatgtgggccagcaggctcagattccaattgccaccgctggcgtggtgtatcccggcgctatagctatggccggcatgccatctccacatcttccctccgagcattcgtcggtatcctcttcccctgaaccaggcatgccagtcattcaatcaacgtacggcgttaagggggaggagccccacatcaaagaggagattcaggctgaagatataaatggcgaaatttacgacgagtatgacgaggaggaagacgatcccgacgtggattatgggtccgattctgagaatcacattgcaggccaggccaattag

SEQ ID NO: 169365 - DNA, 2292 bp, Artificial Sequence
  derived and/or modified sequence
atgcttaccgacccagacctcccccaggaatttgaaaggatgtcatcaaagcggccagcctcaccatatggggaagcagacggagaggtagcgatggtcacatctcgacagaaagtggaggaagaggagtcggatggcttgcccgcctttcatctccctctgcatgtgagctttcccaacaagccacacagtgaggaattccagcccgtgtctctgcttactcaggaaacctgcggccacaggacaccaaccagtcagcacaatactatggaagttgacgggaataaggtaatgtcttcattcgccccacataactctagtacttctccacagaaagctgaagaggggggacgccagtcaggcgagtcactttccagtactgcgctcggcacacccgagcggcgcaaaggttccctggctgacgtggtggatacccttaaacagcgaaagatggaggaattgatcaagaatgaaccagaggagaccccaagcatcgagaaacttctctccaaggattggaaagacaaactcttggcgatggggtccgggaatttcggtgagatcaagggaacccccgagtcactcgccgagaaggagcggcagctcatgggaatgatcaaccaattgactagcttgcgggagcagctgctcgcggcacatgacgagcaaaagaaactggccgccagccaaattgagaagcagaggcagcagatggaactggccaagcagcaacaggaacagatcgctagacagcagcagcagctgctgcagcagcagcacaaaatcaaccttctgcagcaacagatccaggtgcagggccagctgccccccctaatgatccccgtgttccctccagaccagcggactctagcagctgcagcacagcaaggattcctgctgccccctgggttttcctacaaggccggatgttccgatccctacccggtccagctgattcctacaacaatggccgccgcagccgccgccacccccgggctcggacctctacagctccaacagctgtacgcagcccagcttgctgcaatgcaagtctctcccggaggcaagctgccgggaatcccccaggggaacctcggggctgctgtgtcccccacctccatccacaccgataagagtacaaacagtccgcctcctaaaagcaaagacgaggtggctcagccccttaatttgtctgctaagccaaagacatcagacggcaagtcccctaccagtccaaccagtccacacatgcctgcactaagaattaactctggggcagggcctcttaaggccagtgtccccgctgctttagcctcacccagtgcacgggtctctactattgggtatcttaatgatcatgacgctgtgacaaaagccattcaagaggcacggcagatgaaggagcagcttaggagggagcaacaggtcctcgacggcaaggtcgccgtcgtcaacagtttgggactcaataattgtagaacagaaaaggagaaaacaaccctcgaaagcctgacacaacagctcgcagtgaagcagaatgaggaggggaaattcagtcatgcgatgatggactttaacctaagtggcgattcggacggctcagccggcgtctctgaaagcaggatctacagagaaagtaggggacgcggctctaacgagccccatatcaagcggccaatgaatgctttcatggtttgggctaaagacgagagaagaaaaatcctccaggccttcccagatatgcataattccaacatcagtaagatcttagggtcaagatggaaagctatgacaaaccttgaaaagcagccctactacgaagagcaggccaggttgtcaaaacagcatcttgagaagtaccctgattacaagtataagccgcggcccaaaagaacatgcctcgtggatggtaagaagctgcggatcggagagtacaaggcaataatgcggaaccgacgccaggagatgcggcaatacttcaatgttggccagcaggcccaaatcccaatcgcgactgccggagtggtgtatcctggcgccatcgccatggccgggatgccatcacctcacctgccttcagaacatagttcagtctcatcttctccggaaccagggatgccagtcattcagtcaacttacggagtcaagggagaggagccccacatcaaagaggaaattcaagcagaggatataaatggggaaatctacgacgagtacgatgaagaagaagatgatcctgacgtagactatggcagcgattcagagaatcacattgctggtcaggcgaattag

SEQ ID NO: 169366 - DNA, 2253 bp, Artificial Sequence
  derived and/or modified sequence
atgtcttcaaagagacctgcgagtccatacggagaggctgacggggaagttgcaatggtgacatccaggcagaaggtcgaggaggaagagagcgacgggctgcctgccttccatctgccattgcatgtcagctttcccaacaagccgcattccgaagagttccagccagtctctctgctgacccaggagacctgcggtcacaggacccctacctcgcaacataacacaatggaggtcgatggcaataaagttatgtcatccttcgcaccgcataactcttctacttctcctcaaaaggctgaagaaggtggccggcaatccggtgagtcactatcatccactgcactgggtacaccagaaaggcggaagggcagtctagccgacgtggtcgacaccctgaagcagcgtaaaatggaagagctgattaagaacgaacctgaggagactccttcaatcgagaagctcctaagcaaagactggaaagacaagctcttagcaatgggctcaggaaatttcggcgaaatcaagggtactcctgagagccttgcagagaaggaacggcagctgatggggatgattaaccagctcacgtctcttagagagcagttgctcgcagcgcacgatgagcagaaaaagctcgccgcctctcagatcgaaaagcaacgacaacagatggaactcgctaagcagcagcaggagcagatcgcgagacagcaacagcagctcctgcagcaacagcataaaatcaatctgctgcaacagcagatccaggtgcaaggccagctacctcctctgatgatccctgtttttcccccagaccaaagaactctcgctgcggcagcacagcaaggattcctccttccgccaggcttttcttataaggcagggtgcagtgacccataccctgtgcagcttattccgacaaccatggcagcagccgcagctgccacacccggcctaggtcccctgcagttgcaacagctttacgctgcccagctagctgcaatgcaggtgtcaccaggaggcaagttgcctgggattccacagggaaatctcggcgcagctgtgtcaccgacttcaatacacaccgacaaatctactaattcgccaccccccaagagcaaggatgaggtcgcccaacccctaaacttgagcgccaaacccaaaacatctgacggtaagagtcccacctcaccaacttcaccccacatgcctgccctgcgcattaactctggagccggccctttgaaggcttctgtgcctgccgccttggcttccccttctgcccgggttagcacaatagggtacctgaacgaccatgacgctgtgactaaagccattcaggaggcgagacagatgaaggagcagttgcggcgggagcaacaggtgttagacgggaaagtagcagtggtcaacagcctgggactgaacaattgcaggaccgagaaggagaagacgactctcgaatcgctcactcagcagctggctgtgaagcagaacgaagaaggcaagttttcccatgccatgatggatttcaacctcagcggcgatagcgacggatctgccggggtttctgaaagcaggatctatagagaatcaagaggtcgcgggtcaaacgaacctcacattaagcgcccgatgaatgcgtttatggtatgggcgaaggacgagcgtcgcaagatcttgcaagcgtttcccgacatgcacaattcaaatatttccaagatcctgggcagccgctggaaggctatgacaaatctagagaagcagccctactatgaagaacaagcacgcttatctaagcagcacttagagaagtaccccgattataagtacaagcccaggcctaaacggacatgcctggtagatggtaagaaactccggattggcgagtacaaggctattatgcgcaataggcgccaggaaatgagacaatattttaatgtgggccagcaagctcagattcctatcgccaccgcaggcgtggtgtatcctggcgccatagccatggcgggcatgccaagtcctcatctcccgtcggagcacagctcagtatcctcatcccctgagcccgggatgcccgtgatccagtccacatacggtgttaagggtgaagagccacatataaaggaagagatccaggccgaggacatcaatggcgaaatctacgacgagtatgacgaggaagaggacgaccccgatgtggactatggttcagatagcgaaaatcatatcgctggtcaagccaattag

SEQ ID NO: 169367 - DNA, 2253 bp, Artificial Sequence
  derived and/or modified sequence
atgagcagcaagaggcctgccagcccctacggggaggctgatggagaggtggccatggtgaccagccggcagaaggtggaggaggaggagagtgatggcctgcctgccttccacctgcccctgcacgtgtccttccccaacaagccccacagcgaggagttccagcctgtgtccctgctgacccaggagacctgtggccacaggacccccaccagccagcacaacaccatggaggtggatggcaacaaggtgatgagcagctttgccccccacaacagcagcaccagcccccagaaggccgaggagggcggccggcagagcggggagagcctgagcagcacagccctgggcaccccagagaggaggaagggcagcctggctgatgtggtggacaccctgaagcagaggaagatggaggagctgatcaagaatgaacctgaggagacccccagcattgagaagctgctgagcaaggactggaaggacaagctgctggccatgggcagcggcaactttggagagatcaagggcaccccagagagcctggccgagaaggagcggcagctgatgggcatgatcaaccagctgaccagcctgcgggagcagctgctggccgcccatgatgagcagaagaagctggccgccagccagatcgagaagcagaggcagcagatggagctggccaagcagcagcaggagcagatcgcccggcagcagcagcagctgctgcagcagcagcacaagatcaacctgctgcagcagcagatccaggtgcagggccagctgccccccctgatgatccctgtgtttcctccagaccagaggaccctggccgccgccgcccagcagggcttcctgctgcccccaggcttctcctacaaggccggctgcagcgacccctaccctgtgcagctgatccccaccaccatggctgctgctgctgctgccaccccaggcctgggccccctgcagctgcagcagctgtatgctgcccagctggccgccatgcaggtgtcccctgggggcaagctgcccggcatcccccagggcaacctgggcgctgctgtgagccccaccagcatccacacagacaagagcaccaacagccccccacccaagagcaaggatgaggtggcccagcccctgaacctgagcgccaagcccaagaccagtgatggcaagagccccaccagccccaccagcccccacatgcctgccctgcgcatcaacagcggggccggccccctgaaggcctctgtgcctgctgccctggccagccccagcgcccgggtgtccaccatcggctacctgaatgaccatgatgctgtgaccaaggccatccaggaggcccggcagatgaaggagcagctgcggcgggagcagcaggtgctggatggcaaggtggccgtggtgaacagcctgggcctgaacaactgcaggacagagaaggagaagaccaccctggagagcctgacccagcagctggccgtgaagcagaatgaggagggcaagttcagccacgccatgatggacttcaacctgagcggggacagtgatggcagcgctggggtgtctgagagccgcatctaccgggagagccggggccggggcagcaatgagccccacatcaagaggcccatgaatgccttcatggtgtgggccaaggatgagaggaggaagatcctgcaggccttcccagacatgcacaacagcaacatcagcaagatcctgggcagccgctggaaggccatgaccaacctggagaagcagccctactatgaggagcaggcccggctgagcaagcagcacctggagaagtacccagactacaagtacaagccccggcccaagaggacctgcctggtggatggcaagaagctgagaattggagagtacaaggccatcatgaggaacagacggcaggagatgaggcagtacttcaacgtgggccagcaggcccagatccccatcgccacagctggggtggtgtacccaggggccatcgccatggccggcatgcccagcccccacctgcccagcgagcacagctctgtgagcagcagccctgagcccggcatgcctgtgatccagagcacctacggcgtgaagggggaggagccccacatcaaggaggagatccaggccgaggacatcaatggagagatctatgatgaatatgatgaggaggaggatgatcctgatgtggactatggcagtgacagcgagaaccacatcgccggccaggccaactag

SEQ ID NO: 169368 - DNA, 2292 bp, Artificial Sequence
  derived and/or modified sequence
atgctgacagatcctgacctgccccaggagtttgagaggatgagcagcaagaggcctgccagcccctatggagaggctgatggagaggtggccatggtgaccagccggcagaaggtggaggaggaggagagtgatggcctgcctgccttccacctgcccctgcacgtgtccttccccaacaagccccacagcgaggagttccagcctgtgtccctgctgacccaggagacctgtggccacaggacccccaccagccagcacaacaccatggaggtggatggcaacaaggtgatgagcagctttgccccccacaacagcagcaccagcccccagaaggccgaggagggcggccggcagagcggggagagcctgagcagcacagccctgggcaccccagagaggaggaagggcagcctggctgatgtggtggacaccctgaagcagaggaagatggaggagctgatcaagaatgaacctgaggagacccccagcattgagaagctgctgagcaaggactggaaggacaagctgctggccatgggcagcggcaactttggagagatcaagggcaccccagagagcctggccgagaaggagcggcagctgatgggcatgatcaaccagctgaccagcctgcgggagcagctgctggccgcccatgatgagcagaagaagctggccgccagccagatcgagaagcagaggcagcagatggagctggccaagcagcagcaggagcagatcgcccggcagcagcagcagctgctgcagcagcagcacaagatcaacctgctgcagcagcagatccaggtgcagggccagctgccccccctgatgatccctgtgttccccccagaccagaggaccctggccgctgctgcccagcagggcttcctgctgcccccaggcttctcctacaaggccggctgcagcgacccctaccctgtgcagctgatccccaccaccatggctgctgctgctgctgccaccccaggcctgggccccctgcagctgcagcagctgtatgctgcccagctggccgccatgcaggtgtccccaggcggcaagctgcccggcatcccccagggcaacctgggcgctgctgtgagccccaccagcatccacacagacaagagcaccaacagccccccacccaagagcaaggatgaggtggcccagcccctgaacctgagcgccaagcccaagaccagtgatggcaagagccccaccagccccaccagcccccacatgcctgccctgcgcatcaacagcggggccggccccctgaaggcctctgtgcctgctgccctggccagccccagcgcccgggtgtccaccatcggctacctgaatgaccatgatgctgtgaccaaggccatccaggaggcccggcagatgaaggagcagctgcggcgggagcagcaggtgctggatggcaaggtggccgtggtgaacagcctgggcctgaacaactgcaggacagagaaggagaagaccaccctggagagcctgacccagcagctggccgtgaagcagaatgaggagggcaagttcagccacgccatgatggacttcaacctgagcggggacagtgatggcagcgctggggtgtctgagagccgcatctaccgggagagccggggccggggcagcaatgagccccacatcaagaggcccatgaatgccttcatggtgtgggccaaggatgaaagaaggaagatcctgcaggccttcccagacatgcacaacagcaacatcagcaagatcctgggcagccgctggaaggccatgaccaacctggagaagcagccctactatgaggagcaggcccggctgagcaagcagcacctggagaagtacccagactacaagtacaagccccggcccaagaggacctgcctggtggatggcaagaagctgcgcatcggggagtacaaggccatcatgaggaacagacggcaggagatgaggcagtacttcaacgtgggccagcaggcccagatccccatcgccacagctggggtggtgtacccaggggccatcgccatggccggcatgcccagcccccacctgcccagcgagcacagctctgtgagcagcagccctgagcccggcatgcctgtgatccagagcacctatggagtgaagggggaggagccccacatcaaggaggagatccaggccgaggacatcaacggggagatctatgatgaatatgatgaggaggaggatgatcctgatgtggactatggcagtgacagcgagaaccacatcgccggccaggccaactag

SEQ ID NO: 169369 - DNA, 2253 bp, Artificial Sequence
  derived and/or modified sequence
atgagcagcaagcggcccgccagcccctacggcgaggccgacggcgaggtcgcgatggttacatcaagacagaaggtcgaagaggaggagagtgatggattacctgccttccatcttcccttacatgtgagttttcccaataagccccattctgaggaattccagcctgtttctctcctcacacaagagacatgcggtcacagaacgcctacttctcagcataacactatggaagtagatggtaacaaggttatgtctagcttcgcaccgcacaatagctcaacctctccccaaaaggccgaggaaggcggcaggcagtctggggaatccctgtcctccaccgctttagggacccctgagaggaggaaaggatcccttgctgatgtcgttgacaccctcaagcagaggaaaatggaggaactaattaaaaatgaaccagaagagaccccctccattgagaaacttctaagcaaggattggaaggataagcttctagcaatgggaagtggcaacttcggagaaatcaaaggaacccccgagtctctggccgaaaaggaaagacagctcatgggcatgattaaccaattgacttctttacgagaacagcttctcgccgctcatgacgaacaaaaaaagcttgctgcatctcaaattgagaagcagcggcaacaaatggagctggccaaacagcagcaggagcaaattgctcgtcagcagcagcagctgttacagcaacagcataaaattaacctgttacagcagcagatccaagtgcaaggacagctcccccccctgatgatcccagtcttcccgccagaccagaggacactggctgcagccgcgcagcagggattccttctgccccccggcttctcctataaggccggttgcagtgacccatatcccgtccagctgatccctaccaccatggctgcagccgccgctgcaacccctggactgggccccctccagctgcagcagttgtacgctgcccagttagctgctatgcaggtaagccccgggggtaaactccccggtatcccccagggcaatctgggagctgcagtgtctcccacttctattcacacagacaaatcaaccaactctccacccccgaagagcaaggatgaggtagcccaaccactgaatctgtcagcaaagccaaagacaagtgacggaaagtcaccaacgtcaccaacaagtcctcatatgcccgctctgaggatcaattcgggggcgggccctctgaaagcttcggttcctgctgcgctagcatctcccagcgctcgggtgagcaccatcggctacttaaacgaccatgatgccgtcactaaagccattcaggaggctcgccaaatgaaggagcaactgcgacgggagcaacaggtgctcgacggcaaggtagccgtcgttaatagtttgggccttaacaattgcaggacggaaaaagaaaagacaacgctggagtcccttacacagcagctggccgtgaaacaaaacgaagaaggcaagttctcccatgctatgatggatttcaatctatctggcgatagcgacgggagtgcgggcgtgagtgagtcccgtatctatcgggagagccggggacggggatcgaacgaaccccacatcaagaggccaatgaacgcctttatggtctgggccaaagacgagagacgaaaaatactgcaagccttcccggacatgcacaactccaatatctccaaaatcttgggctcaagatggaaggccatgacaaatctggagaaacagccctattacgaagaacaggccagactgtcaaagcagcatctcgaaaagtaccccgattacaaatacaagcctcgccccaagcggacctgcctcgtggacggcaaaaagcttagaattggagagtacaaggcaatcatgcgcaaccggcgacaggagatgcggcagtacttcaacgtcgggcagcaggcccagattcctatagccacggctggggtagtctatcccggcgctatagctatggccgggatgccttccccacatttaccctccgagcactcttctgtctcatctagcccggagccagggatgccggttattcaaagcacatacggagtcaagggagaggagccacacatcaaagaggagatacaggccgaagacatcaatggagagatctacgatgagtacgacgaagaggaggatgatcctgatgtcgattatgggagcgattctgaaaaccacatagcaggtcaagccaactag

SEQ ID NO: 169370 - DNA, 2292 bp, Artificial Sequence
  derived and/or modified sequence
atgctgaccgaccccgacctgccccaggagttcgagcggatgagcagcaaacgccccgccagtccttacggcgaagccgatggcgaagtagccatggtcacgtctagacagaaggtagaggaagaggaaagcgacgggctccccgcatttcatttgcctctgcacgtgagctttcccaacaagccacactctgaggagttccaacctgtgtcactgctgactcaggagacttgtggccaccgcactccgaccagccagcataacactatggaagtcgacgggaataaggtcatgtcctcatttgcacctcataattcgtccacctccccacagaaggcggaggaaggcggaagacagtccggtgagagcctgagttccacagctctgggcacccctgagaggaggaaaggatccctggctgacgttgtcgatacacttaaacagaggaaaatggaggaactcataaagaatgagcctgaggaaactccctcaattgaaaagcttctcagtaaggattggaaggataaactgctcgccatggggagcgggaatttcggggagatcaagggaactccagagtcacttgcagagaaggagcggcagctgatgggtatgatcaatcagctcacctccctacgcgagcagctattggcggcccatgatgagcagaagaagctggcagcctcccagattgaaaagcagaggcagcagatggaattggcgaagcagcagcaggaacagatcgctcgtcagcagcagcaactgttgcagcagcagcataaaatcaatctcctgcaacagcagatccaggtgcaaggccagctgcctcctctgatgatccctgtgttcccccccgaccagaggaccctggctgccgcagctcagcaggggtttctactgcctcccggcttctcttataaggccgggtgttctgacccatatcccgtgcagctgatccctacaaccatggcggcggctgctgccgctaccccaggccttggtccactgcagttgcagcagctgtatgccgcccagctagcagccatgcaagtctcgcctggcggcaaactgcccggcataccacagggcaatctgggagcggcggtctccccaacatcaattcacaccgacaagagcaccaattccccccctcctaaaagtaaggacgaagtggcccagccacttaatttgagtgccaagccaaaaacctctgacggtaaaagcccaaccagtcccactagtcctcatatgccggctctccggattaactcaggcgctggccctcttaaggccagcgttccagctgcactggcatctcctagtgcgagagtctccactatcgggtatctgaacgaccatgatgcagtgacaaaggccattcaagaagctagacagatgaaggaacagctgagaagggaacagcaggtccttgacgggaaggttgctgtggtgaactccctgggcctgaacaattgcagaacagagaaagagaagacaacgcttgaatctctgacgcagcaactagctgtgaaacaaaatgaggagggtaagttttcccatgccatgatggacttcaacctatccggagactccgatggctcagcgggcgtatctgaatcgaggatttacagagaatcacgcggtagaggctctaatgagcctcacatcaagcggcccatgaacgccttcatggtatgggcaaaggatgaaaggcgcaaaattcttcaggcgttccctgacatgcataattccaatatcagcaagatactcggcagccgctggaaggcgatgacaaacttggagaagcagccctactatgaagaacaggcaaggctgagcaagcagcacctggaaaaatatcccgattataagtacaagccaagaccaaagaggacttgtttggttgatgggaagaagctaagaattggcgaatacaaggcaatcatgagaaataggagacaagaaatgagacagtattttaatgtgggacagcaggcccagatccccattgcgaccgccggtgttgtataccctggagccatcgcgatggccgggatgcctagcccacaccttccctcggagcattcttccgtgtcttctagtcctgagccaggcatgccggtcatccaatccacctacggcgtcaagggcgaagagccccacattaaggaggaaatccaggccgaagatatcaatggagagatatatgatgaatacgatgaggaagaggacgacccagatgttgactacggctcggatagcgagaatcatatagccggacaggccaattag

SEQ ID NO: 169371 - DNA, 2253 bp, Artificial Sequence
  derived and/or modified sequence
atgagcagcaagcggcccgccagcccctacggcgaggccgacggcgaggtggcaatggtgacctccaggcagaaagtggaggaggaagagtccgatggcctgccggcttttcacctgcccttacatgtctcctttcctaacaaaccccattccgaggagtttcaacctgtgagtctgttgactcaagaaacctgcggccatcgaacaccaacctctcaacataacaccatggaagtcgacgggaataaggtcatgtctagctttgccccacacaacagctcgacaagtccacaaaaagccgaagagggaggacgccagtctggtgaatctctgagcagtaccgccctgggcacccctgagaggcgaaaaggttcactggctgatgtggtggatacactgaaacagcgcaaaatggaggaactgatcaaaaatgagccagaagagacaccaagcatcgaaaagctgctgagtaaggattggaaggacaagctcctggccatgggctcaggcaacttcggagagattaagggaactcctgaaagtctggccgagaaggagaggcagcttatggggatgatcaaccagctgaccagcctgagagagcagttgctggctgcccacgacgagcagaaaaagctggccgcatcacagatcgagaagcaaagacagcaaatggagctcgcaaagcaacaacaagagcagattgcaagacagcagcagcaactcctgcagcaacagcataagatcaacttactgcaacagcagatacaggtgcagggacagttgcctccccttatgatccctgtattcccacctgatcagagaactttggccgctgctgctcagcaggggttccttcttcctccgggcttttcatacaaggccgggtgttcggatccttaccctgtgcagctcatcccaacaaccatggctgcagcagccgctgccactccaggtctgggacctctgcagctccagcaattgtacgctgcccagctggcggccatgcaggtgtcacctggcgggaagctgcctggcatcccgcagggcaacctgggtgccgcagtttctccaacctcaattcatacggataaatcaaccaattcaccacccccaaagtccaaggacgaagttgctcagcctctcaatctgtccgcgaagcccaaaactagtgatggaaagtcacctactagtccgacctctccccacatgccagctctgcggattaactccggagccgggccgctgaaagcctccgtccccgccgcccttgcctccccaagtgcccgcgtcagtaccatcgggtacctgaacgatcatgatgcggtcactaaggcaattcaggaggctagacagatgaaggaacagctccgtagagagcaacaagtgctagacggtaaggtggctgtggtgaactcccttggactgaacaattgcaggactgaaaaggagaagacaacattagaatcactcacccaacagctggccgtgaaacagaatgaggagggcaagttttcacacgctatgatggactttaacctgtctggtgactcggacgggtccgcaggagtgagcgagtctcgaatctaccgggagtccagaggccggggctccaacgaaccccatataaaacggcctatgaacgcgttcatggtctgggctaaagacgagcgcaggaaaatcttacaggccttccctgacatgcataacagcaatatcagtaagattttgggatctcgctggaaagcaatgaccaatctcgagaaacagccttactacgaagagcaggcccgtctgtccaaacagcatctggagaaatatcccgactacaagtataagcctaggcccaagcggacatgcctggttgacgggaaaaaacttaggattggggagtataaagctatcatgagaaatcgcagacaggaaatgcggcagtacttcaatgtgggtcagcaagcccagattccaatagctaccgcaggtgtcgtctaccccggcgcgatagccatggcgggtatgcccagcccacacttgccgagtgaacacagttccgtaagcagcagcccagagcctggtatgccagtgatccagtcaacttatggcgtgaagggcgaagagccccacattaaagaagaaatccaagcagaggatattaacggcgaaatatacgatgagtatgacgaggaggaagacgaccccgatgttgactatggaagtgatagcgagaatcatattgccggtcaggccaactag

SEQ ID NO: 169372 - DNA, 2253 bp, Artificial Sequence
  derived and/or modified sequence
atgtccagcaagaggcccgcttctccctatggcgaggcagacggcgaggtggccatggtaacctcgagacagaaggtggaggaagaggagtccgatggactgccagcatttcacctgcctttacacgtgtcctttcccaacaaaccacattcagaggaattccagcctgttagtctactgacacaggaaacttgcggccatcgcacacctacttcccagcataatactatggaggtcgacggaaacaaggtcatgagtagctttgcccctcacaattccagtacttcacctcagaaagcagaagagggtggacgccaaagcggcgagagtctgtcatctacagctttgggtaccccagaacgcagaaaaggcagtctggctgacgtcgtggataccctcaagcagcggaagatggaggagctcattaagaatgaaccagaagaaacgccatccattgaaaaactgctgtcaaaggactggaaggacaagcttctcgccatgggatcaggcaatttcggtgagataaagggaacaccagagtccctggctgagaaagagcgccagcttatggggatgatcaatcagctgaccagtctgagggaacagttattagcagcgcacgacgaacaaaaaaagctggccgcaagccaaatcgagaagcaaagacagcagatggagctggcgaagcaacagcaggaacagattgccagacagcagcaacaactccttcagcagcagcacaaaatcaatctgctgcagcagcagatccaggtgcaagggcagctcccccctttaatgatccccgtgttccctccagatcagcgcacactggcagctgcggctcagcagggcttcctgttgccgcctggctttagctataaagcaggctgttctgacccttatcccgtgcagctcattcccaccactatggccgctgctgcagctgcgacacctggcctcggacccttgcaactacagcagctgtacgctgcccagctcgcagctatgcaagtttcacccggaggcaagctcccgggtataccacagggcaatcttggagctgctgttagcccaacgtccatacatactgataagtcaaccaacagtcccccacccaagagcaaggacgaagtggctcagccactgaatctgtccgccaagccaaagactagcgatggtaaatctccaacctccccgacatccccccacatgcccgcactgaggattaactctggcgcaggacccctgaaagcatccgtgccagccgcactcgccagcccttccgcaagggtctctactatcggttaccttaatgaccatgatgccgtgaccaaagccatccaagaggcaagacagatgaaagagcagctgcggagagagcagcaggttctagacggaaaagtggctgtagtcaacagtctgggactgaacaactgccgcactgaaaaggaaaagacaacattggagtcattaactcaacagctcgccgtcaagcaaaatgaggagggcaagttcagccacgcgatgatggatttcaatctttctggcgacagtgatggtagtgccggagtaagtgaaagccgaatatatagggagagtagaggaaggggctcaaatgagccccatattaagaggcccatgaacgcctttatggtgtgggcaaaggatgagcgaagaaagattctgcaggcttttcctgacatgcataacagtaacataagtaagattctgggatcacgttggaaggccatgactaacctggagaaacagccctattatgaagagcaagccagactatccaaacagcacctagaaaagtacccagactataaatataagccacggcctaagcggacgtgtttagtagacgggaaaaagctgagaattggagaatacaaggcaatcatgaggaatcgacgacaggaaatgcgccaatactttaatgtgggccagcaagcccaaatccctatcgcgaccgccggtgtggtttaccctggcgctatcgcgatggccggaatgcccagcccccatttgccgtctgagcactcgtctgtgtcaagttcccctgagcccggaatgccagtcatacagagcacctatggtgtgaagggagaggagccacatatcaaagaagagattcaggcggaggacattaacggggagatctacgacgaatacgatgaggaagaagatgaccccgatgtggactacggttcagacagcgagaatcacattgcgggacaggcgaactag

SEQ ID NO: 169373 - DNA, 2292 bp, Artificial Sequence
  derived and/or modified sequence
atgctgacggaccctgatctgccccaggaatttgaaaggatgtccagcaagagacccgctagcccctacggcgaagccgatggcgaagtggccatggttacaagcaggcagaaagtagaagaggaagagagtgatgggctcccagcctttcatctgccattgcacgtgtcctttcccaataaaccgcattctgaggaattccagcctgttagtctgctgacccaggagacatgtggccatagaacccctacgtcgcagcacaataccatggaagtggacggtaacaaggtgatgtcatctttcgcaccccacaattcgtctacttcaccccagaaggcagaagaagggggaagacagtctggcgaaagtctatcctcaaccgcattgggcacccccgaacggagaaagggctcacttgcggacgtcgttgacactctcaaacagcgaaagatggaggaactcatcaagaacgagcctgaggagaccccttccatcgaaaaattactctctaaagattggaaggacaaactcctggccatgggcagcgggaacttcggggagataaaagggacacctgagtctctggccgagaaggagcgacaactgatggggatgattaatcagctgactagcctgagagagcagttgttggccgcacatgacgaacagaagaagctcgcggcaagtcaaatcgaaaaacagcgacaacagatggagctggcgaagcagcagcaggaacagatcgccagacagcaacagcagctgctgcagcagcagcacaagataaacttactgcaacaacagatccaggtgcaaggccaactgcctcctctgatgattccagtcttcccgccagatcagcgcaccctagccgctgccgctcagcaaggttttttgcttcccccaggcttctcttacaaggccggttgctctgacccttaccctgtgcagctgatcccaacgacaatggctgccgctgctgctgccacgcctggactgggccctctgcagttacagcagttgtacgccgctcagcttgccgctatgcaggtgagtccaggaggaaaactacccggaatcccacagggcaacctgggagcggctgtgtctccaacgtccatccacacggataaaagcaccaattcaccacctcccaaatcaaaggacgaagtagctcagccgcttaatctcagtgcgaagccaaagacttctgacgggaaaagcccaacttccccaacctcaccccatatgccagccctgagaatcaattccggcgctggacccctgaaggcttcagtacctgctgcactcgcatcacctagtgcccgtgtgagcacaatcgggtacctcaacgaccatgatgcggtgacaaaggccatacaggaagccaggcagatgaaggaacagttgcgacgcgagcagcaggtactggacgggaaggtagctgtcgtaaattcgctggggctcaataactgccgcactgaaaaagagaagactaccttagaatcacttacccagcaactggccgtgaagcagaatgaggagggcaaattttctcacgcaatgatggatttcaatctgtcaggagactccgatggaagcgctggagtcagtgaaagtcgaatctatagggagagcagggggagaggtagcaacgagccgcacatcaaacggccaatgaacgctttcatggtttgggctaaagatgagagacgcaagatcctgcaggcatttccggatatgcataattcaaatatcagtaagatacttggctccagatggaaggctatgacaaacctggagaaacagccctactacgaggagcaggccagactcagtaaacagcacctcgagaagtatcctgactacaaatataagcctcgcccaaagcgcacgtgtctggtggatggaaaaaaactgcgcatcggagaatacaaggcgatcatgaggaaccggcgtcaggagatgcgacagtacttcaatgttggccagcaggcacagatccctatcgccacagctggggtggtttacccaggcgctattgcgatggctggaatgccaagtccacacttgccctccgaacattcctcggtttccagctccccagaacctggtatgccagtaatacagtcgacctacggtgtgaaaggggaagaaccacacattaaagaggagatccaggccgaggacataaatggagaaatctatgatgaatacgacgaggaggaagacgaccctgacgtcgattacgggagtgactcagagaaccacatagccggacaggctaactag

SEQ ID NO: 169374 - DNA, 2253 bp, Artificial Sequence
  derived and/or modified sequence
atgtccagtaagcggcctgcctcaccatacggagaagccgacggtgaggtggcaatggttacaagtcgccagaaagtcgaggaagaagagagtgacggacttccagcctttcatttgcccttgcacgtgtcatttcctaataaaccccacagcgaagaattccagcccgtgtctttgcttactcaggaaacctgcgggcaccggacacccacctcacagcacaacactatggaagtagatggaaataaagtcatgtcaagtttcgccccacataactccagcacatcgcctcaaaaggcagaagaggggggaagacaaagcggcgaatccctcagcagcacagctctgggaacccccgagcgtagaaagggatccttggcagacgtggtcgacacccttaaacagagaaagatggaggagttgataaagaacgagcctgaggaaaccccaagcatcgagaagctgctgtcgaaggactggaaagataagctgctggccatgggcagtgggaacttcggcgagattaagggaaccccagagtctctggcagagaaggaaagacaacttatgggtatgataaaccagctcacaagcctccgcgagcaactgttggccgctcatgatgagcagaaaaagctcgccgcatcgcaaatcgaaaaacagcgtcagcagatggagctggcaaagcagcagcaggagcagatcgcccgtcaacagcagcaactgctgcagcagcagcataagatcaatcttctgcagcaacagatccaggttcaggggcagctgccgccactaatgattcccgtattccccccagaccagcggaccctcgccgcagcggctcagcaggggtttctgttgccgcctggtttcagttataaggcgggatgttcagatccataccccgtgcagcttatccccacgaccatggccgctgcagccgcagctactcctggattgggacccctacaattgcagcaactttacgcggcacaacttgccgctatgcaagttagtccgggaggcaagttacccggaatccctcaggggaacttaggtgcggctgtgagccctacatctatccacaccgacaagtcaacaaacagtcctccccctaagtccaaggatgaagtggcacaaccacttaacctgagcgccaagccaaagactagtgatggcaaatcacctacttctcctacaagtccccacatgcctgcactgagaataaacagcggagctggtccactgaaggcatctgtgccagcggctcttgcaagcccatccgcaagagtgtctaccattggatacctgaatgatcatgacgccgtcactaaggcgatccaagaagccagacaaatgaaagagcaattacggagagagcagcaggtgttggacggcaaggtagctgtggtcaacagtttggggctaaataattgccgcacagagaaagaaaagacgactttggagagcctgactcaacagctcgcagtgaagcagaacgaggagggtaagttttcccacgccatgatggactttaatctctcgggggattccgacggatcagcgggagtctccgaatcaagaatttaccgggaaagtaggggcagaggatctaacgaaccccatatcaagcgacctatgaacgctttcatggtatgggcgaaggacgagcgtcgaaaaatcctgcaggcttttcctgatatgcataacagcaacatatccaaaatacttggctccagatggaaagcaatgactaacctcgaaaagcagccatactacgaggagcaggcccgtctgtcaaagcaacatctggaaaagtacccagactacaaatataaacccaggccaaaacggacttgcctggttgatggcaaaaagctgaggataggtgagtacaaggctattatgagaaaccggcgacaggaaatgcggcagtacttcaatgttgggcagcaggcccaaattccaatcgccactgcaggagtcgtgtatcctggcgcaatagccatggcgggtatgcctagcccccatctgccaagtgagcattcgtcagtgtcaagcagtccggaaccaggcatgcctgttattcagtcaacttacggtgtgaaaggggaagaaccacacatcaaggaagagatacaagccgaagacatcaacggtgagatctatgacgaatacgatgaggaagaggacgatcccgacgttgattatggctcagacagcgaaaaccacattgctggacaggcgaattag

SEQ ID NO: 169375 - DNA, 4315 bp, Artificial Sequence
  derived and/or modified sequence
gagaaaatcaattggtttagaaggtttggactcacttgacaggttcagttggagacgatcataggtggctgctgtgacaaagggaaattgtgcttttccagcatgcttactgaccctgatttacctcaggagtttgaaaggatgtcttccaagcgaccagcctctccgtatggggaagcagatggagaggtagccatggtgacaagcagacagaaagtggaagaagaggagagtgacgggctcccagcctttcaccttcccttgcatgtgagttttcccaacaagcctcactctgaggaatttcagccagtttctctgctgacgcaagagacttgtggccataggactcccacttctcagcacaatacaatggaagttgatggcaataaagttatgtcttcatttgccccacacaactcatctacctcacctcagaaggcagaagaaggtgggcgacagagtggcgagtccttgtctagtacagccctgggaactcctgaacggcgcaagggcagtttagctgatgttgttgacaccttgaagcagaggaaaatggaagagctcatcaaaaacgagccggaagaaacccccagtattgaaaaactactctcaaaggactggaaagacaagcttcttgcaatgggatcggggaactttggcgaaataaaagggactcccgagagcttagctgagaaagaaaggcaactcatgggtatgatcaaccagctgaccagcctccgagagcagctgttggctgcccacgatgagcagaagaaactagctgcctctcagattgagaaacagcgtcagcaaatggagctggccaagcagcaacaagaacaaattgcaagacagcagcagcagcttctacagcaacaacacaaaatcaatttgctccagcaacagatccaggttcaaggtcagctgccgccattaatgattcccgtattccctcctgatcaacggacactggctgcagctgcccagcaaggattcctcctccctccaggcttcagctataaggctggatgtagtgacccttaccctgttcagctgatcccaactaccatggcagctgctgccgcagcaacaccaggcttaggcccactccaactgcagcagttatatgctgcccagctagctgcaatgcaggtatctccaggagggaagctgccaggcataccccaaggcaaccttggtgctgctgtatctcctaccagcattcacacagacaagagcacaaacagcccaccacccaaaagcaaggatgaagtggcacagccactgaacctatcagctaaacccaagacctctgatggcaaatcacccacatcacccacctctccccatatgccagctctgagaataaacagtggggcaggccccctcaaagcctctgtcccagcagcgttagctagtccttcagccagagttagcacaataggttacttaaatgaccatgatgctgtcaccaaggcaatccaagaagctcggcaaatgaaggagcaactccgacgggaacaacaggtgcttgatgggaaggtggctgttgtgaatagtctgggtctcaataactgccgaacagaaaaggaaaaaacaacactggagagtctgactcagcaactggcagttaaacagaatgaagaaggaaaatttagccatgcaatgatggatttcaatctgagtggagattctgatggaagtgctggagtctcagagtcaagaatttatagggaatcccgagggcgtggtagcaatgaaccccacataaagcgtccaatgaatgccttcatggtgtgggctaaagatgaacggagaaagatccttcaagcctttcctgacatgcacaactccaacatcagcaagatattgggatctcgctggaaagctatgacaaacctagagaaacagccatattatgaggagcaagcccgtctcagcaagcagcacctggagaagtaccctgactataagtacaagcccaggccaaagcgcacctgcctggtggatggcaaaaagctgcgcattggtgaatacaaggcaatcatgcgcaacaggcggcaggaaatgcggcagtacttcaatgttgggcaacaagcacagatccccattgccactgctggtgttgtgtaccctggagccatcgccatggctgggatgccctcccctcacctgccctcggagcactcaagcgtgtctagcagcccagagcctgggatgcctgttatccagagcacttacggtgtgaaaggagaggagccacatatcaaagaagagatacaggccgaggacatcaatggagaaatttatgatgagtacgacgaggaagaggatgatccagatgtagattatgggagtgacagtgaaaaccatattgcaggacaagccaactgataagggtcaaaagattgttgtgaccttaggacttaaagaagccctaactggttcatccttaccagtggccaagcacattaactttctcatacactgactgttactttaactgttagtcttaaatagttgggacatcagctgactaatagacctcagcctcaaaaggcttggaaagaaaaaacaaatacaacaagcaaacaacaatatcaacaacaagagattgaaataagctatgggtaaaataatgccagtaattcagctgctacatccaagcactgaagtcttacccgtcaacttttttttttttttaaataaactttatggctgtttgttctacaatgttctagaaattctcactcaggtacacagtgccaacaagtggcttgtgaatgtgttttgttgttttgtgctacaatttttaaaaagaaaaaagttttgttttgttttttggggtttctgggttttttccttttctttttctttcctttcattttttttctttgtaatgcacctgacagaaaaaaaagaaaaatgaatttctctttacttctctccaccttctccatctctctactttaaagatggaagtctgtgcatgaggggaaagagggaaaaagagcctgtttttaacttccttgctatccaccacaaaataagcaattattttctttagaggactttatctattgcacaccacactacatctttgagcaagtgccaaatttgtactgaagtgttgaccaagttcattttttctctttactttttccttttccttcttaagttaggacagtgttaaatcttagacaatcccttgaaaaacctgaaataccagcagctggtgagatttgacttttttttttaatggaaactgtaggtgctgttctcaggtgaaaagagagagagagagagagacataagaaatttagagaaaaatattttctgatcttggatttttgtgtgtatgtatgtatgtgattatggtactaataataggaataacgttggaccattgtgagttaaacccacatctggggatgaaatcccacatcctcccaagtgactggtctagaaataatcttgaccttgactttgcacttcaaatgacaacttaaccaagtatagggctcagaaattatatttttaaatgtctgattattattggatggatcaggtggccctgtgtaatagaggtgtgcatgtataacatggaagctactagcaaactgctcccagatgtcctttctccctggtcagttggttccattaacgtttgctacttagtgatttttgtttttcctgttgatattttgagcaaaacaatcattgttttcattgaatatatttggccattttttcagacaaatagaattagcttatttcttcaacattccatcctttcccgatcaggaaatgaaactgatgattttataaggtatttttcacccctccatgaagtgaggtggaggcctttagcatttcagaagtgtgggccatatgtagttcatgccataaaaagtaggatttaattaaaagtcattgcagcccaataaaatggagcctggctgcacccagggatccttgccactgctcttcccttgctgtcagattaatccactgaagtccaactttggttcaagcagagtatttgcaaagagcaacaactgaatgtgatgggactgcttatgtagattttgccagccaaatgccaaggcagttgtagggcctgtacaaataaatgcaaaatcatttcaagtcaattgccattatttgtattgaagtatcagatagatagtaaatactgcaactagtagcttgatgtgctatagttttcactccagtcatcattttcctatctcaccccccgaaacaccaccctaaagttggatttttacatataaataaaaaaagaatccctttt

SEQ ID NO: 169376 - DNA, 4261 bp, Artificial Sequence
  derived and/or modified sequence
gagaaaatcaattggtttagaaggtttggactcacttgacaggttcagttggagacgatcataggtggctgctgtgacaaagggaaattgtgcttttccagcatgcttactgaccctgatttacctcaggagtttgaaaggatgtcttccaagcgaccagcctctccgtatggggaagcagatggagaggtagccatggtgacaagcagacagaaagtggaagaagaggagagtgacgggctcccagcctttcaccttcccttgcatgtgagttttcccaacaagcctcactctgaggaatttcagccagtttctctgctgacgcaagagacttgtggccataggactcccacttctcagcacaatacaatggaagttgatggcaataaagttatgtcttcatttgccccacacaactcatctacctcacctcagaaggcagaagaaggtgggcgacagagtggcgagtccttgtctagtacagccctgggaactcctgaacggcgcaagggcagtttagctgatgttgttgacaccttgaagcagaggaaaatggaagagctcatcaaaaacgagccggaagaaacccccagtattgaaaaactactctcaaaggactggaaagacaagcttcttgcaatgggatcggggaactttggcgaaataaaagggactcccgagagcttagctgagaaagaaaggcaactcatgggtatgatcaaccagctgaccagcctccgagagcagctgttggctgcccacgatgagcagaagaaactagctgcctctcagattgagaaacagcgtcagcaaatggagctggccaagcagcaacaagaacaaattgcaagacagcagcagcagcttctacagcaacaacacaaaatcaatttgctccagcaacagatccaggttcaaggtcagctgccgccattaatgattcccgtattccctcctgatcaacggacactggctgcagctgcccagcaaggattcctcctccctccaggcttcagctataaggctggatgtagtgacccttaccctgttcagctgatcccaactaccatggcagctgctgccgcagcaacaccaggcttaggcccactccaactgcagcagttatatgctgcccagctagctgcaatgcaggtatctccaggagggaagctgccaggcataccccaaggcaaccttggtgctgctgtatctcctaccagcattcacacagacaagagcacaaacagcccaccacccaaaagcaaggatgaagtggcacagccactgaacctatcagctaaacccaagacctctgatggcaaatcacccacatcacccacctctccccatatgccagctctgagaataaacagtggggcaggccccctcaaagcctctgtcccagcagcgttagctagtccttcagccagagttagcacaataggttacttaaatgaccatgatgctgtcaccaaggcaatccaagaagctcggcaaatgaaggagcaactccgacgggaacaacaggtgcttgatgggaaggtggctgttgtgaatagtctgggtctcaataactgccgaacagaaaaggaaaaaacaacactggagagtctgactcagcaactggcagttaaacagaatgaagaaggaaaatttagccatgcaatgatggatttcaatctgagtggagattctgatggaagtgctggagtctcagagtcaagaatttatagggaatcccgagggcgtggtagcaatgaaccccacataaagcgtccaatgaatgccttcatggtgtgggctaaagatgaacggagaaagatccttcaagcctttcctgacatgcacaactccaacatcagcaagatattgggatctcgctggaaagctatgacaaacctagagaaacagccatattatgaggagcaagcccgtctcagcaagcagcacctggagaagtaccctgactataagtacaagcccaggccaaagcgcacctgcctggtggatggcaaaaagctgcgcattggtgaatacaaggcaatcatgcgcaacaggcggcaggaaatgcggcagtacttcaatgttgggcaacaagcacagatccccattgccactgctggtgttgtgtaccctggagccatcgccatggctgggatgccctcccctcacctgccctcggagcactcaagcgtgtctagcagcccagagcctgggatgcctgttatccagagcacttacggtgtgaaaggagaggagccacatatcaaagaagagatacaggccgaggacatcaatggagaaatttatgatgagtacgacgaggaagaggatgatccagatgtagattatgggagtgacagtgaaaaccatattgcaggacaagccaactgataagggtcaaaagattgttgtgaccttaggacttaaagaagccctaactggttcatccttaccagtggccaagcacattaactttctcatacactgactgttactttaactgttagtcttaaatagttgggacatcagctgactaatagacctcagcctcaaaaggcttggaaagaaaaaacaaatacaacaagcaaacaacaatatcaacaacaagagattgaaataagctatgggtaaaataatgccagtaattcagctgctacatccaagcactgaagtcttacccgtcaacttttttttttttttaaataaactttatggctgtttgttctacaatgttctagaaattctcactcaggtacacagtgccaacaagtggcttgtgaatgtgttttgttgttttgtgctacaatttttaaaaagaaaaaagttttgttttgttttttggggtttctgggttttttccttttctttttctttcctttcattttttttctttgtaatgcacctgacagaaaaaaaagaaaaatgaatttctctttacttctctccaccttctccatctctctactttaaagatggaagtctgtgcatgaggggaaagagggaaaaagagcctgtttttaacttccttgctatccaccacaaaataagcaattattttctttagaggactttatctattgcacaccacactacatctttgagcaagtgccaaatttgtactgaagtgttgaccaagttcattttttctctttactttttccttttccttcttaagttaggacagtgttaaatcttagacaatcccttgaaaaacctgaaataccagcagctggtgagatttgacttttttttttaatggaaactgtaggtgctgttctcaggtgaaaagagagagagagagagagacataagaaatttagagaaaaatattttctgatcttggatttttgtgtgtatgtatgtatgtgattatggtactaataataggaataacgttggaccattgtgagttaaacccacatctggggatgaaatcccacatcctcccaagtgactggtctagaaataatcttgaccttgactttgcacttcaaatgacaacttaaccaagtatagggctcagaaattatatttttaaatgtctgattattattggatggatcaggtggccctgtgtaatagaggtgtgcatgtataacatggaagctactagcaaactgctcccagatgtcctttctccctggtcagttggttccattaacgtttgctacttagtgatttttgtttttcctgttgatattttgagcaaaacaatcattgttttcattgaatatatttggccattttttcagacaaatagaattagcttatttcttcaacattccatcctttcccgatcaggaaatgaaactgatgattttataaggtatttttcacccctccatgaagtgaggtggaggcctttagcatttcagaagtgtgggccatatgtagttcatgccataaaaagtaggatttaattaaaagtcattgcagcccaataaaatggagcctggctgcacccagggatccttgccactgctcttcccttgctgtcagattaatccactgaagtccaactttggttcaagcagagtatttgcaaagagcaacaactgaatgtgatgggactgcttatgtagattttgccagccaaatgccaaggcagttgtagggcctgtacaaataaatgcaaaatcatttcaagtcaattgccattatttgtattgaagtatcagatagatagtaaatactgcaactagtagcttgatgtgctatagttttcactccagtcatcattttcctatctcaccccccg

SEQ ID NO: 169377 - DNA, 6969 bp, Artificial Sequence
  derived and/or modified sequence
aggatgtcttccaagcgaccagcctctccgtatggggaagcagatggagaggtagccatggtgacaagcagacagaaagtggaagaagaggagagtgacgggctcccagcctttcaccttcccttgcatgtgagttttcccaacaagcctcactctgaggaatttcagccagtttctctgctgacgcaagagacttgtggccataggactcccacttctcagcacaatacaatggaagttgatggcaataaagttatgtcttcatttgccccacacaactcatctacctcacctcagaaggcagaagaaggtgggcgacagagtggcgagtccttgtctagtacagccctgggaactcctgaacggcgcaagggcagtttagctgatgttgttgacaccttgaagcagaggaaaatggaagagctcatcaaaaacgagccggaagaaacccccagtattgaaaaactactctcaaaggactggaaagacaagcttcttgcaatgggatcggggaactttggcgaaataaaagggactcccgagagcttagctgagaaagaaaggcaactcatgggtatgatcaaccagctgaccagcctccgagagcagctgttggctgcccacgatgagcagaagaaactagctgcctctcagattgagaaacagcgtcagcaaatggagctggccaagcagcaacaagaacaaattgcaagacagcagcagcagcttctacagcaacaacacaaaatcaatttgctccagcaacagatccaggttcaaggtcagctgccgccattaatgattcccgtattccctcctgatcaacggacactggctgcagctgcccagcaaggattcctcctccctccaggcttcagctataaggctggatgtagtgacccttaccctgttcagctgatcccaactaccatggcagctgctgccgcagcaacaccaggcttaggcccactccaactgcagcagttatatgctgcccagctagctgcaatgcaggtatctccaggagggaagctgccaggcataccccaaggcaaccttggtgctgctgtatctcctaccagcattcacacagacaagagcacaaacagcccaccacccaaaagcaaggatgaagtggcacagccactgaacctatcagctaaacccaagacctctgatggcaaatcacccacatcacccacctctccccatatgccagctctgagaataaacagtggggcaggccccctcaaagcctctgtcccagcagcgttagctagtccttcagccagagttagcacaataggttacttaaatgaccatgatgctgtcaccaaggcaatccaagaagctcggcaaatgaaggagcaactccgacgggaacaacaggtgcttgatgggaaggtggctgttgtgaatagtctgggtctcaataactgccgaacagaaaaggaaaaaacaacactggagagtctgactcagcaactggcagttaaacagaatgaagaaggaaaatttagccatgcaatgatggatttcaatctgagtggagattctgatggaagtgctggagtctcagagtcaagaatttatagggaatcccgagggcgtggtagcaatgaaccccacataaagcgtccaatgaatgccttcatggtgtgggctaaagatgaacggagaaagatccttcaagcctttcctgacatgcacaactccaacatcagcaagatattgggatctcgctggaaagctatgacaaacctagagaaacagccatattatgaggagcaagcccgtctcagcaagcagcacctggagaagtaccctgactataagtacaagcccaggccaaagcgcacctgcctggtggatggcaaaaagctgcgcattggtgaatacaaggcaatcatgcgcaacaggcggcaggaaatgcggcagtacttcaatgttgggcaacaagcacagatccccattgccactgctggtgttgtgtaccctggagccatcgccatggctgggatgccctcccctcacctgccctcggagcactcaagcgtgtctagcagcccagagcctgggatgcctgttatccagagcacttacggtgtgaaaggagaggagccacatatcaaagaagagatacaggccgaggacatcaatggagaaatttatgatgagtacgacgaggaagaggatgatccagatgtagattatgggagtgacagtgaaaaccatattgcaggacaagccaactgataagggtcaaaagattgttgtgaccttaggacttaaagaagccctaactggttcatccttaccagtggccaagcacattaactttctcatacactgactgttactttaactgttagtcttaaatagttgggacatcagctgactaatagacctcagcctcaaaaggcttggaaagaaaaaacaaatacaacaagcaaacaacaatatcaacaacaagagattgaaataagctatgggtaaaataatgccagtaattcagctgctacatccaagcactgaagtcttacccgtcaacttttttttttttttaaataaactttatggctgtttgttctacaatgttctagaaattctcactcaggtacacagtgccaacaagtggcttgtgaatgtgttttgttgttttgtgctacaatttttaaaaagaaaaaagttttgttttgttttttggggtttctgggttttttccttttctttttctttcctttcattttttttctttgtaatgcacctgacagaaaaaaaagaaaaatgaatttctctttacttctctccaccttctccatctctctactttaaagatggaagtctgtgcatgaggggaaagagggaaaaagagcctgtttttaacttccttgctatccaccacaaaataagcaattattttctttagaggactttatctattgcacaccacactacatctttgagcaagtgccaaatttgtactgaagtgttgaccaagttcattttttctctttactttttccttttccttcttaagttaggacagtgttaaatcttagacaatcccttgaaaaacctgaaataccagcagctggtgagatttgacttttttttttaatggaaactgtaggtgctgttctcaggtgaaaagagagagagagagagagacataagaaatttagagaaaaatattttctgatcttggatttttgtgtgtatgtatgtatgtgattatggtactaataataggaataacgttggaccattgtgagttaaacccacatctggggatgaaatcccacatcctcccaagtgactggtctagaaataatcttgaccttgactttgcacttcaaatgacaacttaaccaagtatagggctcagaaattatatttttaaatgtctgattattattggatggatcaggtggccctgtgtaatagaggtgtgcatgtataacatggaagctactagcaaactgctcccagatgtcctttctccctggtcagttggttccattaacgtttgctacttagtgatttttgtttttcctgttgatattttgagcaaaacaatcattgttttcattgaatatatttggccattttttcagacaaatagaattagcttatttcttcaacattccatcctttcccgatcaggaaatgaaactgatgattttataaggtatttttcacccctccatgaagtgaggtggaggcctttagcatttcagaagtgtgggccatatgtagttcatgccataaaaagtaggatttaattaaaagtcattgcagcccaataaaatggagcctggctgcacccagggatccttgccactgctcttcccttgctgtcagattaatccactgaagtccaactttggttcaagcagagtatttgcaaagagcaacaactgaatgtgatgggactgcttatgtagattttgccagccaaatgccaaggcagttgtagggcctgtacaaataaatgcaaaatcatttcaagtcaattgccattatttgtattgaagtatcagatagatagtaaatactgcaactagtagcttgatgtgctatagttttcactccagtcatcattttcctatctcaccccccgaaacaccaccctaaagttggatttttacatataaataaaaaaagaatcccttttatttttctctctctcagaagacttgctctggggttttgcttggaggagctgatcatatcctgcatgtcagagatttcattttgtttgtttttctgtttgtttgtttttgatgactttatttacatttgaactgcctctttttgctagtgttgtaatgatgatgatgataaaataataataataatagtaataataataataatggtcagctgttcccagattagtaagttatgtataatttattttatttctccctttctattttattctgctctgatttggaagtgcagccaataagctgttagatatttaaaacaaatttccatctccaactcatatatgtatgtatatgtatatatatatatacatatatatacacacatatacacacacacacacacatttacccacaattttacttctctttccgtaagttttctcttttttaagaattttggccccaacaatatcagttctgatgtttaaaacaaaggagtgaattaataggagggtcgtgttcaatcttaattaacttatgctctcatcactcattttagttatttaattgccacagtcatctagagccaatttttttttgtttttgtttgttttgtttttaagcactctggataaggaaaaaatagacacttgtttttatatcatttttatgtacaatgtgaaaacagatttttaaaaaatttgttctctgtctttgttaacaaattccttccgatttatgtgggttcacctctcacgtttgctggatacttactttacaccatgttatgaaagatgctttgttttcatttcatgagtttgggctacaagaatactttgttttagctccaggtagatgccattgaaggcattcatggctgaaatcaattctaacacacttaccgatgaattgacaacactttggtgtttggtcttttttttgttatattttgttttatttgaaggggaaaacaaaattgttaatggtgacttttaactgctgaaattcaaaatttgattttagttaggtttatgtccgagactaaactgtgcatgaaccgaaacaaaaagcaagttcataccgctgcattctgttctcttgttctgacggttaattcactggacatcaaattttctttgccctagttttccccaaaagaaaacaaaagcaaaaatagttatattaatgttgaaagtgctttgaagtcacttgataaaaggtgctatgaatagcaacttactgtgttactacattgcctttttggcattggttgatttataattttggtaaaggatcctaaaaccctgtattctttttctgtgccccataatgaccaaaaaagataaagaaaatgagagtaagatcaaaagatcaaactaaaacataaacagtctccttcctgtctgctttcttacctatctgttcacactttatctctttccctttctctctctctctcacatgcgcgcgcgcgcgcgcgcacacacacacacacacacacttgccccaacactgagaaataatcttgccagaattctggtttttatagttgttgtagtccgtttctctaaaaatagtcctgttttcatatgaatctaagagaacattaccggagaaaataaagttactcatttatagttactaataataagttagtgattaacttaccacaattggataaaatataaaactattcttcagcacatttatacctaaattagtgaagtccatttgtgaagttcatttggcatctgcagttaagagttaaccatgtataaaatccctcccaaagaacataatcatcgttagaaccaaatcctcttataaagaacaaatataaaaaagttttctgtggtgaagctattttatagatttgatttccggagtagaattttaccttaattcacttaaagaaaattaaccattttttggtccaacttcagatattttcttaatccagaagctgtgactgttcccagaagaaacctcttatatcacatttaaaacataaaaaataattacactttcactcattctaatgggtaaattgttgaattgtaataaacaactgtatatttacaaacaggtttataaggtatttgtctatcaaattaataataaaataaaacttacggggtctgcaaggaaaactatgaaggccacttaaagtggttcaggtatccctttgtcttgtagggcatagctgttggtttagccaggcttttacagtatttaattttaaagtatcctataactatcaacttcccaggttgaagacgatgtgttgagtttcctactgattgattgattcctgtcctccccagtgtttccgtcactggttcactaaaacagtatttatatagctccactggctctaaagctcttagtccttctaatattttggattttacaagtaaaaatggaaaaaaaatagaaaagagacaatcaaatgcctggagcttaaaacaaagtatgtgcaacctaccatctcacttgaaatttaataaaataataagtaattatgtaaatataacatagagttatagatttatattttgttcataacacatagtgtaatataagttgtatattttcatgtttttggttttatgttatcattcatgccacaataaaaataaaacaggagtttatgtgctcttaaaaaaaagatgtgggttgccaccaacctgtttttcgtttttgttttttgtttattttattttatttttttgcattctcctttttcagtattactgccatgcaaggcaccaataaaaacagcaaatgtgttctt

SEQ ID NO: 169378 - protein, 466 aa, Artificial Sequence
  derived and/or modified sequence
MAEEQDLSEVELSPVGSEEPRCLSPGSAPSLGPDGGGGGSGLRASPGPGELGKVKKEQQDGEADDDKFPVCIREAVSQVLSGYDWTLVPMPVRVNGASKSKPHVKRPMNAFMVWAQAARRKLADQYPHLHNAELSKTLGKLWRLLNESDKRPFIEEAERLRMQHKKDHPDYKYQPRRRKNGKAAQGEAECPGGEAEQGGTAAIQAHYKSAHLDHRHPGEGSPMSDGNPEHPSGQSHGPPTPPTTPKTELQSGKADPKRDGRSMGEGGKPHIDFGNVDIGEISHEVMSNMETFDVAELDQYLPPNGHPGHVSSYSAAGYGLGSALAVASGHSAWISKPPGVALPTVSPPGVDAKAQVKTETAGPQGPPHYTDQPSTSQIAYTSLSLPHYGSAFPSISRPQFDYSDHQPSGPYYGHSGQASGLYSAFSYMGPSQRPLYTAISDPSPSGPQSHSPTHWEQPVYTTLSRP

SEQ ID NO: 169379 - protein, 286 aa, Artificial Sequence
  derived and/or modified sequence
MAEEQDLSEVELSPVGSEEPRCLSPGSAPSLGPDGGGGGSGLRASPGPGELGKVKKEQQDGEADDDKFPVCIREAVSQVLSGYDWTLVPMPVRVNGASKSKPHVKRPMNAFMVWAQAARRKLADQYPHLHNAELSKTLGKLWRLLNESDKRPFIEEAERLRMQHKKDHPDYKYQPRRRKNGKAAQGEAECPGGEAEQGGTAAIQAHYKSAHLDHRHPGEGSPMSDGNPEHPSGQSHGPPTPPTTPKTELQSGKADPKRDGRPSPSGPQSHSPTHWEQPVYTTLSRP

SEQ ID NO: 169380 - protein, 213 aa, Artificial Sequence
  derived and/or modified sequence
MAEEQDLSEVELSPVGSEEPRCLSPGSAPSLGPDGGGGGSGLRASPGPGELGKVKKEQQDGEADDDKFPVCIREAVSQVLSGYDWTLVPMPVRVNGASKSKPHVKRPMNAFMVWAQAARRKLADQYPHLHNAELSKTLGKLWRLLNESDKRPFIEEAERLRMQHKKDHPDYKYQPRRRKNGKAAQGEAECPGGEAEQGGTAAIQAHYKSAHLD

SEQ ID NO: 169381 - DNA, 2882 bp, Artificial Sequence
  derived and/or modified sequence
gtccggccagggtggttggtggtaaggattcaggctccgtcctaacgaggccgtggcctgaggctcagggccccccgcccctccctcccagcccaccagcgtcacctcccagccccgagctggaccgcacaccttgggacacggttttccacttcctaaggacgagccccagactggaggagaggtccgaggaggtgggcgttggactctttgcgaggaccccggcggctggcccgggggaggcggccgaggcggcggcggcggcggccgggggcgacatggcggaggagcaggacctatcggaggtggagctgagccccgtgggctcggaggagccccgctgcctgtccccggggagcgcgccctcgctagggcccgacggcggcggcggcggatcgggcctgcgagccagcccggggccaggcgagctgggcaaggtcaagaaggagcagcaggacggcgaggcggacgatgacaagttccccgtgtgcatccgcgaggccgtcagccaggtgctcagcggctacgactggacgctggtgcccatgcccgtgcgcgtcaacggcgccagcaaaagcaagccgcacgtcaagcggcccatgaacgccttcatggtgtgggctcaggcagcgcgcaggaagctcgcggaccagtacccgcacctgcacaacgctgagctcagcaagacgctgggcaagctctggaggctgctgaacgaaagtgacaagcgccccttcatcgaggaggctgagcggctccgtatgcagcacaagaaagaccacccggactacaagtaccagcccaggcggcggaagaacgggaaggccgcccagggcgaggcggagtgccccggtggggaggccgagcaaggtgggaccgccgccatccaggcccactacaagagcgcccacttggaccaccggcacccaggagagggctcccccatgtcagatgggaaccccgagcacccctcaggccagagccatggcccacccacccctccaaccaccccgaagacagagctgcagtcgggcaaggcagacccgaagcgggacgggcgctccatgggggagggcgggaagcctcacatcgacttcggcaacgtggacattggtgagatcagccacgaggtaatgtccaacatggagacctttgatgtggctgagttggaccagtacctgccgcccaatgggcacccaggccatgtgagcagctactcagcagccggctatgggctgggcagtgccctggccgtggccagtggacactccgcctggatctccaagccaccaggcgtggctctgcccacggtctcaccacctggtgtggatgccaaagcccaggtgaagacagagaccgcggggccccaggggcccccacactacaccgaccagccatccacctcacagatcgcctacacctccctcagcctgccccactatggctcagccttcccctccatctcccgcccccagtttgactactctgaccatcagccctcaggaccctattatggccactcgggccaggcctctggcctctactcggccttctcctatatggggccctcgcagcggcccctctacacggccatctctgaccccagcccctcagggccccagtcccacagccccacacactgggagcagccagtatatacgacactgtcccggccctaaagggggccctgtcgccaccaccccccgcccagcccctgcccccagcctgtgtgccctgttccttgcccacctcaggcctggtggtggcagtggaggaggctgaggaggctgaagaggctgacaggtcggggggctttctgtctggctcactgccctgatgacccacccgccccatccaggctccagcagcaaagccccaggagaacaggctggacagaggagaaggaggttgactgttgcacccacactgaaagatgaggggctgcaccttcccccaggaatgaccctctatcccaggacctgagaagggcctgctcaccctcctcggggaggggaagcaccagggttggtggcatcggaggccttaccactcctatgactcctgttttctctctcacagatagtgagggtctgacatgcccatgccacctatgccacagtgcctaagggctaggccacccagagactgtgcccggagctggccgtgtctcccactcaggggctgagagtagctttgaggagcctcattggggagtggggggttcgagggacttagtggagttctcatcccttcaatgccccctccctttctgaaggcaggaaggagttggcacagaggccccctgatccaattctgtgccaataacctcattctttgtctgagaaacagcccccagtcctcctccactacaacctccatgaccttgagacgcatcccaggaggtgacgaggcaggggctccaggaaaggaatcagagacaattcacagagcctccctccctgggctccttgccagctccctcttcccttactaggctctatggcccctgctcagtcagccccactccctgggcttcccagagagtgacagctgctcaggccctaacccttggctccaggagacacagggcccagcacccaggttgctgtcggcaggctgaagacactagaatcctgacctgtacattctgcccttgcctcttaccccttgcctcccagtggtatttgaataaagtatgtagctatatctgcccctattttcctgttctgcagccccccaaatccacatgtaactcattactgtctcctgttatttatctcagtagtcccctctcctagccactctagcccctattaactctgcattaagcattccacataataaaattaaaggttccggttaaaaaaaaaaaaaaaaaaaaa

SEQ ID NO: 169382 - DNA, 1401 bp, Artificial Sequence
  derived and/or modified sequence
atggccgaggagcaggacctgagcgaggtggagctgagccccgtgggcagcgaggagcccagatgcctgagccccggcagcgcccccagcctgggccccgacggcggcggcggcggcagcggcctgagagccagccccggccccggcgagctgggcaaggtgaagaaggagcagcaggacggcgaggccgacgacgacaagttccccgtgtgcatcagagaggccgtgagccaggtgctgagcggctacgactggaccctggtgcccatgcccgtgagagtgaacggcgccagcaagagcaagccccacgtgaagagacccatgaacgccttcatggtgtgggcccaggccgccagaagaaagctggccgaccagtacccccacctgcacaacgccgagctgagcaagaccctgggcaagctgtggagactgctgaacgagagcgacaagagacccttcatcgaggaggccgagagactgagaatgcagcacaagaaggaccaccccgactacaagtaccagcccagaagaagaaagaacggcaaggccgcccagggcgaggccgagtgccccggcggcgaggccgagcagggcggcaccgccgccatccaggcccactacaagagcgcccacctggaccacagacaccccggcgagggcagccccatgagcgacggcaaccccgagcaccccagcggccagagccacggcccccccaccccccccaccacccccaagaccgagctgcagagcggcaaggccgaccccaagagagacggcagaagcatgggcgagggcggcaagccccacatcgacttcggcaacgtggacatcggcgagatcagccacgaggtgatgagcaacatggagaccttcgacgtggccgagctggaccagtacctgccccccaacggccaccccggccacgtgagcagctacagcgccgccggctacggcctgggcagcgccctggccgtggccagcggccacagcgcctggatcagcaagccccccggcgtggccctgcccaccgtgagcccccccggcgtggacgccaaggcccaggtgaagaccgagaccgccggcccccagggccccccccactacaccgaccagcccagcaccagccagatcgcctacaccagcctgagcctgccccactacggcagcgccttccccagcatcagcagaccccagttcgactacagcgaccaccagcccagcggcccctactacggccacagcggccaggccagcggcctgtacagcgccttcagctacatgggccccagccagagacccctgtacaccgccatcagcgaccccagccccagcggcccccagagccacagccccacccactgggagcagcccgtgtacaccaccctgagcagaccctag

SEQ ID NO: 169383 - DNA, 861 bp, Artificial Sequence
  derived and/or modified sequence
atggccgaggagcaggacctgagcgaggtggagctgagccccgtgggcagcgaggagcccagatgcctgagccccggcagcgcccccagcctgggccccgacggcggcggcggcggcagcggcctgagagccagccccggccccggcgagctgggcaaggtgaagaaggagcagcaggacggcgaggccgacgacgacaagttccccgtgtgcatcagagaggccgtgagccaggtgctgagcggctacgactggaccctggtgcccatgcccgtgagagtgaacggcgccagcaagagcaagccccacgtgaagagacccatgaacgccttcatggtgtgggcccaggccgccagaagaaagctggccgaccagtacccccacctgcacaacgccgagctgagcaagaccctgggcaagctgtggagactgctgaacgagagcgacaagagacccttcatcgaggaggccgagagactgagaatgcagcacaagaaggaccaccccgactacaagtaccagcccagaagaagaaagaacggcaaggccgcccagggcgaggccgagtgccccggcggcgaggccgagcagggcggcaccgccgccatccaggcccactacaagagcgcccacctggaccacagacaccccggcgagggcagccccatgagcgacggcaaccccgagcaccccagcggccagagccacggcccccccaccccccccaccacccccaagaccgagctgcagagcggcaaggccgaccccaagagagacggcagacccagccccagcggcccccagagccacagccccacccactgggagcagcccgtgtacaccaccctgagcagaccctag

SEQ ID NO: 169384 - DNA, 642 bp, Artificial Sequence
  derived and/or modified sequence
atggccgaggagcaggacctgagcgaggtggagctgagccccgtgggcagcgaggagcccagatgcctgagccccggcagcgcccccagcctgggccccgacggcggcggcggcggcagcggcctgagagccagccccggccccggcgagctgggcaaggtgaagaaggagcagcaggacggcgaggccgacgacgacaagttccccgtgtgcatcagagaggccgtgagccaggtgctgagcggctacgactggaccctggtgcccatgcccgtgagagtgaacggcgccagcaagagcaagccccacgtgaagagacccatgaacgccttcatggtgtgggcccaggccgccagaagaaagctggccgaccagtacccccacctgcacaacgccgagctgagcaagaccctgggcaagctgtggagactgctgaacgagagcgacaagagacccttcatcgaggaggccgagagactgagaatgcagcacaagaaggaccaccccgactacaagtaccagcccagaagaagaaagaacggcaaggccgcccagggcgaggccgagtgccccggcggcgaggccgagcagggcggcaccgccgccatccaggcccactacaagagcgcccacctggactag

SEQ ID NO: 169385 - DNA, 1401 bp, Artificial Sequence
  derived and/or modified sequence
atggcggaggaacaggacttgtcagaggttgaacttagtcctgtgggcagcgaagagccacggtgcctttcacccggctctgctccgagcctcgggcccgacgggggagggggtggaagcggccttcgggcctccccagggcctggtgagctgggcaaagtcaagaaagaacagcaggacggtgaagccgatgacgataaatttcccgtgtgcattcgggaggcagtctctcaggtcctgtccggttacgactggactctggtaccgatgcccgtccgagtgaacggagcctctaagagcaagcctcacgtaaagagacctatgaatgctttcatggtctgggcgcaggctgctagacggaagcttgcagaccagtacccccacctgcataacgccgaactatctaaaacccttggaaagctgtggcgattgcttaatgaatctgataaaaggccattcatagaagaggccgaacggctgcgaatgcagcataagaaagatcaccccgactataaataccagcctcggcgacgcaagaacggcaaggccgcacagggcgaggccgagtgccccggaggggaggccgagcaaggcgggactgcagcaattcaagcacattacaaatccgcacacctcgatcacagacatcctggtgaagggtccccaatgtcggacgggaaccccgagcacccgtcagggcagtcccacgggcctccaacaccccctacgactcccaagactgaactccaaagtggtaaggcagaccctaagcgcgatggccgctccatgggcgaagggggaaagcctcacatcgattttggaaacgtcgacattggagaaattagccatgaagttatgtctaatatggaaactttcgatgtggcggagttggatcaataccttccgcccaacggtcatccaggtcacgtgtctagctattctgccgccgggtatggactaggatcggctctcgccgtcgcctctggtcactctgcctggatctctaagcctccaggagtggctttgcctaccgtgtccccgccaggtgtggatgcgaaagcacaggttaaaaccgagactgcgggaccccaagggcctcctcattatacagaccaaccaagcaccagtcagatcgcttacacatccctgagcctcccccactatggctcagcatttccgagcatcagtcggcctcagttcgactactcggaccaccagccatccggaccatactacgggcattctggacaggcctcagggctgtactcagctttctcctacatggggcctagccagagacccctgtacacagcaatatctgaccccagcccaagcggaccccagtcccacagtcccactcattgggaacaaccggtgtacaccactctgtctaggccatag

SEQ ID NO: 169386 - DNA, 1401 bp, Artificial Sequence
  derived and/or modified sequence
atggccgaagagcaagatctgtccgaggtagagctctctcccgtgggttccgaggagcctcggtgcctgtcacctggatctgcaccctcacttggcccagatgggggcggagggggctctggcttgagagccagtcccgggccgggagaactcggcaaggtgaaaaaggagcaacaagacggagaggctgatgacgacaaattccctgtgtgcatccgtgaggccgtatctcaggtgctgtcaggttacgactggacattagtcccaatgcctgtacgagtgaatggtgcatccaaaagtaagccccatgtcaaaagaccaatgaatgcatttatggtgtgggcacaagcagcccgaagaaaactagccgaccaatatccccatctacataatgccgaactgagcaaaactctgggtaagttgtggaggcttcttaacgagtcagacaagcgaccgtttatagaagaagctgaacgactccggatgcagcacaaaaaggaccacccagattacaagtatcagcctagaagacggaaaaatgggaaagcggcacagggagaagctgaatgccccggaggggaagccgagcagggagggactgctgctatccaggcacactataagagcgctcacctcgaccacagacaccccggggaggggagcccaatgtctgatggaaaccccgagcacccctcgggacagagccacggtccacctaccccccctactactccaaaaactgaactgcaaagtggtaaggctgacccaaagcgcgacgggcgttccatgggtgaaggaggaaaaccacacatcgatttcggaaacgtcgacattggagagataagccatgaagtcatgagtaatatggagaccttcgatgtggccgagctcgaccagtacctaccacctaatggtcatcccggccacgtctccagctactcagcggctggatacggcctcggaagtgccctggccgtcgcaagcgggcacagtgcctggatttcaaagccaccaggcgtcgctctacccacagtctcccccccaggggtagatgcaaaggctcaagtaaaaacggagactgccggtccacagggaccaccccattataccgaccagcctagcacatctcagattgcatataccagcctgagtctaccccactatggctccgcatttcctagcattagtaggccacaatttgattacagcgaccaccaaccgtccggcccgtactatggccacagcggacaggcatcggggctctatagcgccttttcatatatgggaccctctcaacggcctctatacaccgcaatctctgacccaagccctagcggaccgcaaagtcactctcccactcattgggaacagcctgtctataccacgctgtcacgcccttag

SEQ ID NO: 169387 - DNA, 861 bp, Artificial Sequence
  derived and/or modified sequence
atggccgaagagcaggacttgtctgaggtcgagctcagcccagtgggatcggaagaacctaggtgcctttcaccaggatctgcacctagcctggggcccgacggcggcggcgggggaagcggactgagagccagtcccggcccgggtgaactcgggaaagtgaaaaaggagcagcaggatggagaagccgacgatgataaatttcctgtgtgtatcagagaggccgtatcacaggtgctctcagggtacgattggacactcgtacccatgcccgtgcgcgtgaacggggcaagtaagtccaagccccacgtgaagcgacctatgaatgcatttatggtttgggcgcaagctgcccgtcgcaagctcgctgaccagtacccccatctacataatgcagagctatcaaagaccctaggcaagctctggcggctgctgaacgaatccgacaaacgccccttcatagaagaggcggagcggctacggatgcaacataagaaagaccacccagactataagtatcaaccgcgccgccggaaaaatggtaaggcagcacaaggcgaagccgaatgtccaggcggggaggctgagcaagggggtactgcagccatccaggcacactataaatctgcccacctcgatcatagacaccccggggagggaagccccatgtcagacggtaacccagagcacccgtcaggccagtcgcacggaccgccgaccccccctactactccaaaaactgaactacagagcgggaaagctgaccccaagcgtgacggtagaccttcaccttccggcccccagtcgcactcgcccactcactgggagcagcctgtctataccaccctcagtcggccctag

SEQ ID NO: 169388 - DNA, 642 bp, Artificial Sequence
  derived and/or modified sequence
atggccgaagaacaggatctaagcgaagttgagttaagccccgttggatctgaggaaccgcgttgtctctcgcccggatccgcgccatcactcggtccagatggtggcggcggggggtccggtttgcgtgcctctccaggccctggagagctgggtaaggtgaaaaaagagcaacaagatggcgaagcagacgacgacaagttccctgtttgcataagagaagctgtctcgcaggtgctctctggatatgattggaccctggtcccgatgcccgtccgagtcaatggggcctcaaagtctaagccacatgtcaaaagacccatgaacgcattcatggtgtgggcccaagcggcacgtaggaagctcgccgatcagtacccacaccttcataacgcagagctcagtaagactctgggaaagctttggcggttacttaatgaatccgataagagaccttttatcgaggaggccgagcggctccgcatgcagcataagaaggaccatccggactacaagtatcaaccccgaaggcgaaagaacggtaaagcagctcagggggaggctgaatgtccaggaggtgaggccgagcaaggaggaaccgccgcaattcaagctcattacaaatcggcgcatcttgactag

SEQ ID NO: 169389 - DNA, 1401 bp, Artificial Sequence
  derived and/or modified sequence
atggccgaggagcaggacctgtctgaggtggagctgagccctgtgggcagcgaggagccccgctgcctgagccctggcagcgcccccagcctgggcccagatggcggcggcggcggcagcggcctgcgggccagccctggccctggagagctgggcaaggtgaagaaggagcagcaggatggagaggctgatgatgacaagtttcctgtgtgcatccgggaggccgtgtcccaggtgctgagcggctatgactggaccctggtgcccatgcctgtgcgggtgaatggagccagcaagagcaagccccacgtgaagaggcccatgaatgccttcatggtgtgggcccaggccgcccggaggaagctggccgaccagtacccccacctgcacaatgctgagctgagcaagaccctgggcaagctgtggaggctgctgaatgaaagtgacaagaggcccttcatcgaggaggccgagcggctgaggatgcagcacaagaaggaccacccagactacaagtaccagcccaggaggaggaagaatggcaaggccgcccagggcgaggctgaatgtcctggaggagaggccgagcagggcggcacagctgccatccaggcccactacaagagcgcccacctggaccaccgccaccctggagagggcagccccatgtctgatggcaaccctgagcaccccagcggccagagccacggcccccccaccccacccaccacccccaagacagagctgcagagcggcaaggctgaccccaagagagatggccgctccatgggagagggcggcaagccccacatcgactttggaaatgtggacatcggggagatcagccatgaggtgatgagcaacatggagacctttgatgtggccgagctggaccagtacctgccccccaacggccaccctggccacgtgagcagctacagcgctgctggctacggcctgggcagcgccctggccgtggccagcggccacagcgcctggatcagcaagcccccaggagtggccctgcccaccgtgtccccacctggggtggatgccaaggcccaggtgaagacagaaacagctggcccccagggccccccccactacacagaccagcccagcaccagccagatcgcctacaccagcctgagcctgccccactacggcagcgccttccccagcatcagccggccccagtttgactacagcgaccaccagcccagcggcccctactacggccacagcggccaggccagcggcctgtacagcgccttctcctacatgggccccagccagaggcccctgtacacagccatcagtgaccccagccccagcggcccccagagccacagccccacccactgggagcagcctgtgtacaccaccctgagccggccctag

SEQ ID NO: 169390 - DNA, 861 bp, Artificial Sequence
  derived and/or modified sequence
atggccgaggagcaggacctgtctgaggtggagctgagccctgtgggcagcgaggagccccgctgcctgagccctggcagcgcccccagcctgggcccagatggcggcggcggcggcagcggcctgcgggccagccctggccctggagagctgggcaaggtgaagaaggagcagcaggatggagaggctgatgatgacaagtttcctgtgtgcatccgggaggccgtgtcccaggtgctgagcggctatgactggaccctggtgcccatgcctgtgcgggtgaatggagccagcaagagcaagccccacgtgaagaggcccatgaatgccttcatggtgtgggcccaggccgcccggaggaagctggccgaccagtacccccacctgcacaatgctgagctgagcaagaccctgggcaagctgtggaggctgctgaatgaaagtgacaagaggcccttcatcgaggaggccgagcggctgaggatgcagcacaagaaggaccacccagactacaagtaccagcccaggaggaggaagaatggcaaggccgcccagggcgaggctgaatgtcctggaggagaggccgagcagggcggcacagctgccatccaggcccactacaagagcgcccacctggaccaccgccaccctggagagggcagccccatgtctgatggcaaccctgagcaccccagcggccagagccacggcccccccaccccacccaccacccccaagacagagctgcagagcggcaaggctgaccccaagagagatggccggcccagccccagcggcccccagagccacagccccacccactgggagcagcctgtgtacaccaccctgagccggccctag

SEQ ID NO: 169391 - DNA, 642 bp, Artificial Sequence
  derived and/or modified sequence
atggccgaggagcaggacctgtctgaggtggagctgagccctgtgggcagcgaggagccccgctgcctgagccctggcagcgcccccagcctgggcccagatggcggcggcggcggcagcggcctgcgggccagccctggccctggagagctgggcaaggtgaagaaggagcagcaggatggagaggctgatgatgacaagtttcctgtgtgcatccgggaggccgtgtcccaggtgctgagcggctatgactggaccctggtgcccatgcctgtgcgggtgaatggagccagcaagagcaagccccacgtgaagaggcccatgaatgccttcatggtgtgggcccaggccgcccggaggaagctggccgaccagtacccccacctgcacaatgctgagctgagcaagaccctgggcaagctgtggaggctgctgaatgaaagtgacaagaggcccttcatcgaggaggccgagcggctgaggatgcagcacaagaaggaccacccagactacaagtaccagcccaggaggaggaagaatggcaaggccgcccagggcgaggctgaatgtcctggaggagaggccgagcagggcggcacagctgccatccaggcccactacaagagcgcccacctggactag

SEQ ID NO: 169392 - DNA, 1401 bp, Artificial Sequence
  derived and/or modified sequence
atggccgaggagcaggacctgagcgaggtggagctgagccccgtggggtctgaggaaccgaggtgcctcagcccaggctccgctcctagtctggggccagatggcggagggggaggttctgggctgcgggcttcacccgggcccggtgaattgggaaaggttaagaaagagcagcaggatggggaggccgatgacgataagtttcctgtgtgcattcgcgaagcggttagccaagtcctcagtgggtacgattggactctagtgccaatgcccgtgagggtcaatggcgccagtaaaagcaagcctcacgtgaaacggccgatgaacgcattcatggtctgggctcaggcagccaggagaaaactcgctgatcagtacccccacctacacaacgcggagctcagcaagacccttgggaaactgtggcgattgctaaacgaatccgacaagagaccatttatcgaggaggcggaacgcctacggatgcagcacaaaaaggaccaccccgactataaataccagccccgtcgccgcaaaaacgggaaagcagcccagggggaggcagaatgtcctggaggagaagctgagcagggcggcaccgcagcaattcaggcccattacaaatccgcacacttagatcaccgccatccaggggagggctctccaatgagtgacggaaaccccgagcaccccagcggacagtcgcacggtcctccgacacctccgacaacaccaaaaaccgaactacaatcaggtaaagcagatccaaagcgagatggccgaagcatgggggagggcggaaaacctcatattgattttggcaatgttgatatcggggagattagccacgaagtgatgagcaacatggagacttttgacgtggcagagctggaccagtacttacctccaaacggccatcccggacacgtgtcctcttactcagccgctggctatgggctgggcagcgccctggctgtcgcatcggggcacagtgcttggatttctaaaccacccggtgtcgctttacccactgtgtcccccccgggagttgacgcgaaggcacaggtgaagaccgagacagccggtccccaggggccaccacactatacagatcaaccaagcacaagtcagatcgcctatacaagtctgtccttgccgcactatgggtccgcctttccaagtatcagtcgccctcagtttgactacagcgatcatcagcctagcggtccttattatgggcatagtggccaggcctcgggtctgtacagcgcattcagttatatggggccttctcagagaccactgtacaccgcaatctctgatccctcaccaagtggccctcagtctcacagcccaacccattgggaacagccagtctacacgacactcagtcgaccttag

SEQ ID NO: 169393 - DNA, 1401 bp, Artificial Sequence
  derived and/or modified sequence
atggccgaggagcaggacctgagcgaggtggagctgagccccgtggggtcggaggagccacggtgtctcagcccaggttctgccccatccttggggcctgatgggggcggcggtggaagcgggttaagagcttcaccaggacctggtgagttgggcaaggtcaaaaaagagcagcaggacggtgaggctgatgacgacaagttcccggtttgcatacgcgaggccgtgtcacaggttctatctggatatgactggacccttgtacccatgcccgtgcgcgttaacggcgcctctaaatctaaaccccacgtgaaacgacctatgaacgctttcatggtctgggcacaagctgcaagaaggaaactggccgaccagtacccacaccttcataatgccgaactcagcaagactctgggtaagctgtggcgacttctcaatgagagcgacaaaaggcctttcatagaagaagcagaaaggctgcgaatgcagcataaaaaagaccaccccgactacaaataccagccaaggcggcgcaaaaacggaaaagccgcgcagggcgaagctgagtgtcccggcggggaggccgagcaaggtggtaccgcagccatacaagcacactataaatcggcccacctcgatcatcggcatcccggagagggcagtcctatgagcgatggtaatcccgagcacccatccgggcagtctcatggaccccccacacccccgacgacacctaagacggagcttcagagtggcaaagcggatcccaaacgagacggtcgaagcatgggggagggcggcaagcctcatatcgattttggcaacgtcgatattggcgagatcagtcacgaggtaatgagtaacatggagacgtttgacgtggcagagctagaccagtacctgcctcccaacggccatccaggacatgtcagctcttactccgctgctggttacggattgggtagcgcactagcagtggcatccggacactccgcatggattagcaaacccccaggagttgccctccctacagtatcaccccccggcgtcgatgccaaagcccaagtgaagactgagacagccggtccccagggcccacctcactacaccgatcaaccgtctaccagccagatcgcctatacctctctgagtctgccccattacggatcagctttcccatctatctcccggccccaattcgattactccgaccaccagccttccgggccatactacggccatagtggccaagcttccggcctgtacagtgcattctcatacatgggccctagccaaagaccgctctacacagctatttctgacccctctccttctgggccacagtctcactctcccacacactgggaacagcctgtgtatactaccctttccaggccctag

SEQ ID NO: 169394 - DNA, 861 bp, Artificial Sequence
  derived and/or modified sequence
atggccgaggagcaggacctgagcgaggtggagctgagccccgtgggatccgaagagccaagatgtctgtcacctggttcagctccaagcctggggccggatggcggtgggggcggctctggcctgcgagcctcacctggacctggggagctggggaaggttaagaaggaacagcaggacggggaggccgacgatgataaattcccagtttgtattcgagaggcagtgtcacaggtcttgagcggctatgactggaccctggtcccaatgcctgtcagagttaatggtgcctctaaatctaagccacacgttaagcgcccaatgaatgcttttatggtttgggcgcaggccgcacggcgaaaactggcggatcagtatcctcacctgcataatgctgagctctccaagacacttggtaaactgtggagattgctgaacgaatccgacaagagaccctttattgaggaagcggagagacttcgaatgcagcacaaaaaggatcaccccgactataagtatcagccgagacggcggaagaatgggaaagctgcacagggtgaagcagagtgtcctggtggcgaggccgagcaagggggaactgcggcaatccaggcacattataaaagtgcccacctcgatcatcggcacccaggggagggttccccaatgtccgatggcaatcccgaacaccctagcgggcagtcccatggacctcctacccctcctaccacaccaaagacagagctccagtcagggaaggctgacccaaagagggacggcaggcccagcccctcaggtccgcaaagccactctcccactcattgggaacagcctgtatataccacactgtcccggccctag

SEQ ID NO: 169395 - DNA, 642 bp, Artificial Sequence
  derived and/or modified sequence
atggccgaggagcaggacctgagcgaggtggagctgagccccgtgggctccgaagagccacgttgtctttctcccggctccgccccgtctctggggcccgatggcggtgggggagggtcaggcttgcgggcctcccccggccccggagagcttggcaaagtaaaaaaagagcagcaggatggtgaggcagacgatgacaaattccccgtttgcattcgcgaagcagtgagccaagtcctgtcaggctatgattggaccctagtgcccatgccggtgcgggttaatggagcaagcaagagcaagccgcacgtgaaacgacccatgaatgcctttatggtctgggcccaagccgcccgcaggaaacttgccgatcaatatccccacctccacaacgccgagttatctaagaccctggggaaactgtggcgcctccttaatgagtctgacaaacgacctttcatcgaggaggctgagaggctaaggatgcaacacaagaaagatcaccctgactacaaataccagcctcgcaggcgcaaaaatgggaaggcggcccagggggaggccgagtgtcctgggggtgaagccgagcagggcggcactgccgctatacaggcgcactataagagtgcccatttggactag

SEQ ID NO: 169396 - DNA, 1401 bp, Artificial Sequence
  derived and/or modified sequence
atggcagaagagcaagacctgtctgaggtagagctaagccctgtgggttccgaagagccaagatgccttagccctggctccgcaccatccctcggtcccgacggagggggaggcggttccggtctacgagcctcccctggccctggggagctgggcaaggttaagaaagagcagcaagacggtgaagcggatgatgataagtttccagtttgtatccgtgaggctgtgtcacaagttctttcggggtatgactggaccctcgttcccatgccagtgagagtaaatggagcgtcaaaaagtaaaccacacgtgaagcggcctatgaatgcgttcatggtgtgggctcaggctgccagacgtaagttagcagaccagtaccctcacctgcacaacgccgagctgagcaagaccctcggcaaactgtggcgtcttctcaacgaatcagataagcgcccatttattgaggaggcggagcggttacggatgcaacataaaaaggatcatccggactataagtaccagccgagacgtcggaagaacggtaaagccgctcagggcgaggccgagtgtcccggaggagaggccgagcagggtggtactgctgctatccaagcacactacaagtcggcacatttagaccatagacacccaggagagggtagccctatgtccgacggcaacccggaacacccatccgggcaaagtcacgggcctccaacgccacctacgactccgaaaacagaattgcagagcggtaaggctgaccctaaaagagacggcagatcaatgggtgaaggtgggaaaccacacatcgacttcgggaacgtggacatcggcgagatctcccacgaggtcatgagcaatatggaaacttttgatgtagccgagctcgatcaatacctgccaccaaatgggcatcccggacacgtttcctcttattccgctgcagggtatgggctcggctcagcgcttgctgtcgcgtctggccacagcgcttggatttccaagccgccaggcgtggcactacccacggtttccccccctggcgtggatgccaaggcccaggtcaagaccgagacagctgggcctcaaggccctcctcactacactgaccagccgagcacttctcagattgcctacaccagcctgagcctccctcattacggaagcgcctttccgtcgatttctcggcctcaattcgattactccgatcatcagccttccggcccttattatggtcatagtggccaagcatcaggcctgtattccgcatttagttacatggggcctagccagcggccactctacacggccatcagtgatccctcaccctcaggtccacagtcccacagtcctacacattgggagcagccagtgtacactacactctcaagaccttag

SEQ ID NO: 169397 - DNA, 1401 bp, Artificial Sequence
  derived and/or modified sequence
atggccgaagagcaagatctttctgaggtggaactatccccagttgggtccgaggagcctagatgtcttagcccagggtcggcgccaagcctgggacccgacgggggtgggggtggtagcggactgcgcgctagccctggcccaggggaactgggcaaggtcaagaaggagcaacaggatggcgaagcagatgacgacaagtttccagtatgcatcagggaagccgttagccaggtgctaagcggctacgattggaccctggtcccaatgccggtcagggtaaatggcgcaagtaaatccaagccacacgtaaagagacctatgaatgcttttatggtctgggcccaagcagctagacggaagctggccgaccaatatccccatttgcacaacgccgaattgagcaagacactgggcaagctttggcgcctgctgaatgaaagtgacaagaggcctttcatcgaggaggccgaacgtcttcgtatgcaacataagaaggatcatccagattataagtatcagcccagaaggcggaagaacggtaaagcggctcaaggggaggctgaatgtccagggggtgaggcagagcaggggggaaccgcagctatccaggcgcattacaagagcgcacacttagaccatagacaccccggagaaggatctcctatgtcggatgggaaccctgagcatccctcagggcagtcccacggcccacctacccctccaacaactccgaagacagaattgcagtctggcaaagcggatcctaaaagggacggaagatccatgggggaagggggaaaaccccacatcgattttggaaacgttgatatcggagaaattagccatgaagtgatgagcaatatggaaaccttcgacgtggcggaactggatcaatacctgccacctaatggacatccaggtcacgttagcagctatagcgccgctgggtatggtctaggctctgctctggctgtcgcctcaggccacagcgcgtggatcagcaagcctccaggcgttgccttgccaaccgtgagcccacctggcgtggacgctaaagctcaagtgaagactgagacagccggacctcagggccctccacattatacagatcaaccatctacgtcccaaatagcttacactagtctctccctgccccattatggatcagcctttccttcaatatcccgaccccaattcgactacagtgaccatcagccctctgggccttactacggccatagcggtcaagcttcaggactctatagcgcttttagttatatgggccctagccaacggcctctgtacacagccatttctgatccaagcccgtcaggaccacagtcccactccccaacgcactgggagcagccagtctacaccaccctttcacgaccttag

SEQ ID NO: 169398 - DNA, 861 bp, Artificial Sequence
  derived and/or modified sequence
atggccgaagaacaggacttgagcgaagttgagctctctccagtaggatccgaggagccaagatgcctatcccccggttccgcaccgtcactaggccctgatggaggtggaggtgggtcgggactacgcgctagtccgggacccggtgagctgggcaaggtgaaaaaggaacagcaggatggtgaggcagatgatgacaagtttccggtgtgcattcgggaagccgtctcccaggtgttatccgggtacgactggaccctcgtccccatgcccgtgagagtgaatggagcctctaaatctaaaccacacgtgaagcgcccaatgaatgcttttatggtatgggctcaggctgctcgcagaaaactggcggaccaatatccgcatctccacaatgcggaactgtccaaaactctgggcaagttgtggcgcttactgaatgagtcagacaaacgacccttcatcgaggaggccgaacgcctgagaatgcagcacaagaaagaccatcccgattacaaataccaacctagaagacgcaagaacgggaaggccgctcaaggtgaggccgagtgtccaggtggcgaggctgaacagggagggaccgctgccattcaagctcactacaaaagcgcccacctagatcatcgacaccccggagaagggagccctatgagcgacggcaatcctgagcacccctctggccagtcacacggcccaccaacacctccaacaactccaaagacagagttacagagtggcaaagctgaccccaagcgcgacggaaggccgtcacctagcgggcctcagagccatagccccactcattgggaacaacctgtatatacgacactgagccggccttag

SEQ ID NO: 169399 - DNA, 642 bp, Artificial Sequence
  derived and/or modified sequence
atggccgaagagcaagatcttagcgaggtggaattatcccccgtaggctcggaggagccaagatgtctgagtcccggatctgcaccttctctggggccagacggagggggtggaggctctggactgagagcctcacccggtccaggcgagctcggcaaagttaagaaggagcagcaagatggggaggctgatgatgataaattccctgtctgcataagagaagccgtgagccaggtgctctccggctatgactggactctggtcccgatgccagtacgtgtgaatggggcaagtaaatctaaaccacatgttaagcggcctatgaatgccttcatggtgtgggctcaagccgcacgccgtaaactcgcggaccagtatccccatttgcacaatgccgaacttagtaagactctgggtaagctgtggcgcttgcttaacgaatccgacaaaagaccctttatagaggaggcagagagattgaggatgcagcataagaaggatcacccagattataagtatcagcccaggcgcagaaagaacggcaaggccgctcaaggggaggctgaatgtccgggaggcgaggccgagcaaggtggaaccgccgcaattcaggcacactacaagagcgcccacttggactag

SEQ ID NO: 169400 - DNA, 2861 bp, Artificial Sequence
  derived and/or modified sequence
ggggggtgaagggtcactgctgaccggaggcagctctgccaggcagtgtcatcagtgggcttcacgtttgactgacagcccaccagcgtcacctcccagccccgagctggaccgcacaccttgggacacggttttccacttcctaaggacgagccccagactggaggagaggtccgaggaggtgggcgttggactctttgcgaggaccccggcggctggcccgggggaggcggccgaggcggcggcggcggcggccgggggcgacatggcggaggagcaggacctatcggaggtggagctgagccccgtgggctcggaggagccccgctgcctgtccccggggagcgcgccctcgctagggcccgacggcggcggcggcggatcgggcctgcgagccagcccggggccaggcgagctgggcaaggtcaagaaggagcagcaggacggcgaggcggacgatgacaagttccccgtgtgcatccgcgaggccgtcagccaggtgctcagcggctacgactggacgctggtgcccatgcccgtgcgcgtcaacggcgccagcaaaagcaagccgcacgtcaagcggcccatgaacgccttcatggtgtgggctcaggcagcgcgcaggaagctcgcggaccagtacccgcacctgcacaacgctgagctcagcaagacgctgggcaagctctggaggctgctgaacgaaagtgacaagcgccccttcatcgaggaggctgagcggctccgtatgcagcacaagaaagaccacccggactacaagtaccagcccaggcggcggaagaacgggaaggccgcccagggcgaggcggagtgccccggtggggaggccgagcaaggtgggaccgccgccatccaggcccactacaagagcgcccacttggaccaccggcacccaggagagggctcccccatgtcagatgggaaccccgagcacccctcaggccagagccatggcccacccacccctccaaccaccccgaagacagagctgcagtcgggcaaggcagacccgaagcgggacgggcgctccatgggggagggcgggaagcctcacatcgacttcggcaacgtggacattggtgagatcagccacgaggtaatgtccaacatggagacctttgatgtggctgagttggaccagtacctgccgcccaatgggcacccaggccatgtgagcagctactcagcagccggctatgggctgggcagtgccctggccgtggccagtggacactccgcctggatctccaagccaccaggcgtggctctgcccacggtctcaccacctggtgtggatgccaaagcccaggtgaagacagagaccgcggggccccaggggcccccacactacaccgaccagccatccacctcacagatcgcctacacctccctcagcctgccccactatggctcagccttcccctccatctcccgcccccagtttgactactctgaccatcagccctcaggaccctattatggccactcgggccaggcctctggcctctactcggccttctcctatatggggccctcgcagcggcccctctacacggccatctctgaccccagcccctcagggccccagtcccacagccccacacactgggagcagccagtatatacgacactgtcccggccctaaagggggccctgtcgccaccaccccccgcccagcccctgcccccagcctgtgtgccctgttccttgcccacctcaggcctggtggtggcagtggaggaggctgaggaggctgaagaggctgacaggtcggggggctttctgtctggctcactgccctgatgacccacccgccccatccaggctccagcagcaaagccccaggagaacaggctggacagaggagaaggaggttgactgttgcacccacactgaaagatgaggggctgcaccttcccccaggaatgaccctctatcccaggacctgagaagggcctgctcaccctcctcggggaggggaagcaccagggttggtggcatcggaggccttaccactcctatgactcctgttttctctctcacagatagtgagggtctgacatgcccatgccacctatgccacagtgcctaagggctaggccacccagagactgtgcccggagctggccgtgtctcccactcaggggctgagagtagctttgaggagcctcattggggagtggggggttcgagggacttagtggagttctcatcccttcaatgccccctccctttctgaaggcaggaaggagttggcacagaggccccctgatccaattctgtgccaataacctcattctttgtctgagaaacagcccccagtcctcctccactacaacctccatgaccttgagacgcatcccaggaggtgacgaggcaggggctccaggaaaggaatcagagacaattcacagagcctccctccctgggctccttgccagctccctcttcccttactaggctctatggcccctgctcagtcagccccactccctgggcttcccagagagtgacagctgctcaggccctaacccttggctccaggagacacagggcccagcacccaggttgctgtcggcaggctgaagacactagaatcctgacctgtacattctgcccttgcctcttaccccttgcctcccagtggtatttgaataaagtatgtagctatatctgcccctattttcctgttctgcagccccccaaatccacatgtaactcattactgtctcctgttatttatctcagtagtcccctctcctagccactctagcccctattaactctgcattaagcattccacataataaaattaaaggttccggttacctgcttggtga

SEQ ID NO: 169401 - DNA, 2879 bp, Artificial Sequence
  derived and/or modified sequence
gggctgtccggccagggtggttggtggtaaggattcaggctccgtcctaacgaggccgtggcctgaggctcagggccccccgcccctccctcccagcccaccagcgtcacctcccagccccgagctggaccgcacaccttgggacacggttttccacttcctaaggacgagccccagactggaggagaggtccgaggaggtgggcgttggactctttgcgaggaccccggcggctggcccgggggaggcggccgaggcggcggcggcggcggccgggggcgacatggcggaggagcaggacctatcggaggtggagctgagccccgtgggctcggaggagccccgctgcctgtccccggggagcgcgccctcgctagggcccgacggcggcggcggcggatcgggcctgcgagccagcccggggccaggcgagctgggcaaggtcaagaaggagcagcaggacggcgaggcggacgatgacaagttccccgtgtgcatccgcgaggccgtcagccaggtgctcagcggctacgactggacgctggtgcccatgcccgtgcgcgtcaacggcgccagcaaaagcaagccgcacgtcaagcggcccatgaacgccttcatggtgtgggctcaggcagcgcgcaggaagctcgcggaccagtacccgcacctgcacaacgctgagctcagcaagacgctgggcaagctctggaggctgctgaacgaaagtgacaagcgccccttcatcgaggaggctgagcggctccgtatgcagcacaagaaagaccacccggactacaagtaccagcccaggcggcggaagaacgggaaggccgcccagggcgaggcggagtgccccggtggggaggccgagcaaggtgggaccgccgccatccaggcccactacaagagcgcccacttggaccaccggcacccaggagagggctcccccatgtcagatgggaaccccgagcacccctcaggccagagccatggcccacccacccctccaaccaccccgaagacagagctgcagtcgggcaaggcagacccgaagcgggacgggcgctccatgggggagggcgggaagcctcacatcgacttcggcaacgtggacattggtgagatcagccacgaggtaatgtccaacatggagacctttgatgtggctgagttggaccagtacctgccgcccaatgggcacccaggccatgtgagcagctactcagcagccggctatgggctgggcagtgccctggccgtggccagtggacactccgcctggatctccaagccaccaggcgtggctctgcccacggtctcaccacctggtgtggatgccaaagcccaggtgaagacagagaccgcggggccccaggggcccccacactacaccgaccagccatccacctcacagatcgcctacacctccctcagcctgccccactatggctcagccttcccctccatctcccgcccccagtttgactactctgaccatcagccctcaggaccctattatggccactcgggccaggcctctggcctctactcggccttctcctatatggggccctcgcagcggcccctctacacggccatctctgaccccagcccctcagggccccagtcccacagccccacacactgggagcagccagtatatacgacactgtcccggccctaaagggggccctgtcgccaccaccccccgcccagcccctgcccccagcctgtgtgccctgttccttgcccacctcaggcctggtggtggcagtggaggaggctgaggaggctgaagaggctgacaggtcggggggctttctgtctggctcactgccctgatgacccacccgccccatccaggctccagcagcaaagccccaggagaacaggctggacagaggagaaggaggttgactgttgcacccacactgaaagatgaggggctgcaccttcccccaggaatgaccctctatcccaggacctgagaagggcctgctcaccctcctcggggaggggaagcaccagggttggtggcatcggaggccttaccactcctatgactcctgttttctctctcacagatagtgagggtctgacatgcccatgccacctatgccacagtgcctaagggctaggccacccagagactgtgcccggagctggccgtgtctcccactcaggggctgagagtagctttgaggagcctcattggggagtggggggttcgagggacttagtggagttctcatcccttcaatgccccctccctttctgaaggcaggaaggagttggcacagaggccccctgatccaattctgtgccaataacctcattctttgtctgagaaacagcccccagtcctcctccactacaacctccatgaccttgagacgcatcccaggaggtgacgaggcaggggctccaggaaaggaatcagagacaattcacagagcctccctccctgggctccttgccagctccctcttcccttactaggctctatggcccctgctcagtcagccccactccctgggcttcccagagagtgacagctgctcaggccctaacccttggctccaggagacacagggcccagcacccaggttgctgtcggcaggctgaagacactagaatcctgacctgtacattctgcccttgcctcttaccccttgcctcccagtggtatttgaataaagtatgtagctatatctgcccctattttcctgttctgcagccccccaaatccacatgtaactcattactgtctcctgttatttatctcagtagtcccctctcctagccactctagcccctattaactctgcattaagcattccacataataaaattaaaggttccggttacctgcttggtga

SEQ ID NO: 169402 - DNA, 1139 bp, Artificial Sequence
  derived and/or modified sequence
gtccggccagggtggttggtggtaaggattcaggctccgtcctaacgaggccgtggcctgaggctcagggccccccgcccctccctcccagcccaccagcgtcacctcccagccccgagctggaccgcacaccttgggacacggttttccacttcctaaggacgagccccagactggaggagaggtccgaggaggtgggcgttggactctttgcgaggaccccggcggctggcccgggggaggcggccgaggcggcggcggcggcggccgggggcgacatggcggaggagcaggacctatcggaggtggagctgagccccgtgggctcggaggagccccgctgcctgtccccggggagcgcgccctcgctagggcccgacggcggcggcggcggatcgggcctgcgagccagcccggggccaggcgagctgggcaaggtcaagaaggagcagcaggacggcgaggcggacgatgacaagttccccgtgtgcatccgcgaggccgtcagccaggtgctcagcggctacgactggacgctggtgcccatgcccgtgcgcgtcaacggcgccagcaaaagcaagccgcacgtcaagcggcccatgaacgccttcatggtgtgggctcaggcagcgcgcaggaagctcgcggaccagtacccgcacctgcacaacgctgagctcagcaagacgctgggcaagctctggaggctgctgaacgaaagtgacaagcgccccttcatcgaggaggctgagcggctccgtatgcagcacaagaaagaccacccggactacaagtaccagcccaggcggcggaagaacgggaaggccgcccagggcgaggcggagtgccccggtggggaggccgagcaaggtgggaccgccgccatccaggcccactacaagagcgcccacttggaccaccggcacccaggagagggctcccccatgtcagatgggaaccccgagcacccctcaggccagagccatggcccacccacccctccaaccaccccgaagacagagctgcagtcgggcaaggcagacccgaagcgggacgggcgccccagcccctcagggccccagtcccacagccccacacactgggagcagccagtatatacgacactgtcccggccctaa

SEQ ID NO: 169403 - DNA, 873 bp, Artificial Sequence
  derived and/or modified sequence
ccgaggaggtgagtgcgcagcctgctcctccctggcccgcccaggcctgggaccctgctgtgaggtggagagaggcgacaccccgcccttgccccccacctggctctcctctaaaccccgttggggcaggctgagggaagaaggaaaggtgggcgttggactctttgcgaggaccccggcggctggcccgggggaggcggccgaggcggcggcggcggcggccgggggcgacatggcggaggagcaggacctatcggaggtggagctgagccccgtgggctcggaggagccccgctgcctgtccccggggagcgcgccctcgctagggcccgacggcggcggcggcggatcgggcctgcgagccagcccggggccaggcgagctgggcaaggtcaagaaggagcagcaggacggcgaggcggacgatgacaagttccccgtgtgcatccgcgaggccgtcagccaggtgctcagcggctacgactggacgctggtgcccatgcccgtgcgcgtcaacggcgccagcaaaagcaagccgcacgtcaagcggcccatgaacgccttcatggtgtgggctcaggcagcgcgcaggaagctcgcggaccagtacccgcacctgcacaacgctgagctcagcaagacgctgggcaagctctggaggctgctgaacgaaagtgacaagcgccccttcatcgaggaggctgagcggctccgtatgcagcacaagaaagaccacccggactacaagtaccagcccaggcggcggaagaacgggaaggccgcccagggcgaggcggagtgccccggtggggaggccgagcaaggtgggaccgccgccatccaggcccactacaagagcgcccacttggacca

SEQ ID NO: 169404 - DNA, 132 bp, Artificial Sequence
  derived and/or modified sequence
atgacacatgacaagtcttggcgccgctgctctataagcggctcaacaaagtgtaggtgtggctccagaattgccggacccaacgccctcgggagcggaggctcacggtcctcctcatcaagctcaaggtag

SEQ ID NO: 169405 - protein, 233 aa, Artificial Sequence [sequence omitted]

SEQ ID NO: 169406 - DNA, 702 bp, Artificial Sequence
  derived and/or modified sequence
atggccctgcccggcagcagccaggaccaggcctggagcctggagccccccgccgccaccgccgccgccagcagcagcagcggcccccaggagagagagggcgccggcagccccgccgcccccggcaccctgcccctggagaaggtgaagagacccatgaacgccttcatggtgtggagcagcgcccagagaagacagatggcccagcagaaccccaagatgcacaacagcgagatcagcaagagactgggcgcccagtggaagctgctggacgaggacgagaagagacccttcgtggaggaggccaagagactgagagccagacacctgagagactaccccgactacaagtacagacccagaagaaaggccaagagcagcggcgccggccccagcagatgcggccagggcagaggcaacctggccagcggcggccccctgtggggccccggctacgccaccacccagcccagcagaggcttcggctacagaccccccagctacagcaccgcctacctgcccggcagctacggcagcagccactgcaagctggaggcccccagcccctgcagcctgccccagagcgaccccagactgcagggcgagctgctgcccacctacacccactacctgccccccggcagccccaccccctacaacccccccctggccggcgcccccatgcccctgacccacctgtag

SEQ ID NO: 169407 - DNA, 702 bp, Artificial Sequence
  derived and/or modified sequence
atggcacttccagggtccagccaggaccaagcatggtctctcgaaccgcctgcagccactgccgccgccagttcatcaagcggcccgcaagagcgtgaaggagctggatcccccgccgctcctggcaccttgccgctcgaaaaagtcaagaggccaatgaacgcctttatggtgtggtcttcagcccaaagacggcaaatggcccagcagaatcctaagatgcataactctgagatttccaagaggctgggcgcgcaatggaaactcctagatgaggacgaaaaaagaccgtttgtagaggaagctaaacggctgagagccaggcatctaagggattacccagactataagtaccgccccaggcgcaaggcaaaaagctcaggagccggaccttcccgatgcggccagggcagagggaacctggctagcggcggacctctgtggggcccaggctatgctactacgcagccgagtcgggggttcggataccggcctcccagttattcaactgcgtacttgccggggtcctatggctcaagtcactgtaaactagaagcacctagtccgtgctcgctgcctcagagcgatcccagactgcagggtgaattgctgccaacctatacccattatctcccacctggcagcccaacaccatacaaccctcccctcgccggcgcacctatgcctcttacacacttatag

SEQ ID NO: 169408 - DNA, 702 bp, Artificial Sequence
  derived and/or modified sequence
atggctttaccaggctcctcgcaggaccaggcttggtccctcgaacccccagccgcaacagccgccgcaagcagtagctccggacctcaggagcgagagggcgccggatcacccgctgcaccgggaacattgccactagaaaaggtgaaaaggccaatgaacgcctttatggtctggagttccgctcagcgtaggcaaatggcccagcagaatcctaagatgcacaacagtgagatcagcaaaagattgggcgcacagtggaaattgttggatgaggatgaaaagcggccttttgtggaggaagcgaagcgcctgagggcgaggcatctgagagactatcctgactataagtaccgacctcggcgtaaagccaaatcatccggggccggtcccagtaggtgtgggcagggaaggggtaatctggccagcggcggacccctatgggggccaggatatgcaacaacccagccaagccgcggctttggttaccggcctccatcctatagcacagcatacctaccagggtcttacggcagttcccattgcaaactcgaagctccctctccatgcagcctgcctcaaagcgaccctaggcttcagggggaattgctgccaacatacacccattatctgcctcccggatctcctacgccatacaaccctcctctggcgggcgcccccatgcccctgactcacctctag

SEQ ID NO: 169409 - DNA, 1790 bp, Artificial Sequence
  derived and/or modified sequence
agctagctttgcaatatggcggccgaggcggacggaccgcttaaacggctgctcgtgccgattcttttacctgagaaatgctacgaccaacttttcgttcagtgggacttgcttcacgtcccctgcctcaagattctcctcagcaaaggcctggggctgggcattgtggctggctcacttctagtaaagctgccccaggtgtttaaaatcctgggagccaagagtgctgctggattaaaaaaggaggatgaggcccgtcccgtgaggtctgcgtccatgagggttagaggtgggttaggggcatgggggcaccagcaaggggagggttgtatggagtgggagagccagggggcaggtagtgggtataggtgggcagcagttccccctggagcctagggtcactctgagggagggagcacggtgagggggcttccagtttgcagtgggaagagctgcagagagaaacaagaggttagagggcacttccctgggttggaggtgagtctggccagttctgggcagacagggtagagcgtgccacccacccagccctggctacccagcccgctgggcgcagcaggcatggaagccgaccccgggatggagagcccgcggccctgttggggcacgctcgggagcgggcttgcgtgctgcacggctgttttcctcttggggagtcaggccaggaaagggcagaatgagctcggcctctccttgccctgggggctgggagaggaagctgggtcacacacaggccagaagcaggggggaaacggggcatctaactaggacacagtcgcatccaggggtcagtcacctgaccctacagggcccaccaccttcagactgagatggaaacgccctctgggagaaccctgatccgccccaccctacacaggccccggaggtactgggcctgcgcccgccacaccttggccgcgagtggcctctgcttgggtgggctcccgtcctccggcatccgcccccaccaaggctccagaagaggggcgcatgggcctccgtcttcggcccgcttcccaggcactcacccatagctgccaggcaggtaggctgtcgagtagctggggggtctgtacccaaagcctctgctcggttgggtggtcgcgtaccccggcccccagagcgggccgccgctggccaggttgcctcttccctgtccgcagcgggaaggtccggcgcccgagctcttggccttgcgccgaggccggtacttgtagtcggggtagtcgcgcaggtgtcgggcgcggagccgcttggcctcctccacgaagggccgcttctcgtcctcgtccagcagcttccactgcgcgcccaggcgcttggagatctcggagttgtgcatcttggggttctgctgcgccatctggcggcgctgagcggagctccacaccatgaacgcgttcatcggccgcttcaccttctccaggggcagcgtcccggaccaccaccccaacccctttcctggtgcctgttgctcctcaaatcccagaactgcccctggggcaagaaaggccgaggagggagaccatttttgtttcctgagtcattccagcagaagtaagaccatctttgggacaagagacaatgaagagaagtcagatgtggaggaacagaaaacaagagccaggggccagggcaggtcagtcctagagaaacaaatggaccaaactggggacaaagaaggcacaggagccagacagccatttggatttttttattctctttttaaatactgtacagtgaaaaataaatacgccttctcatccacc

SEQ ID NO: 169410 - DNA, 702 bp, Artificial Sequence
  derived and/or modified sequence
atggccctgcccggcagcagccaggaccaggcctggagcctggagcccccagctgccacagctgctgccagcagcagcagcggcccccaggagcgggagggcgccggcagccctgctgcccctggcaccctgcccctggagaaggtgaagaggcccatgaatgccttcatggtgtggagcagcgcccagaggcggcagatggcccagcagaaccccaagatgcacaacagcgagatcagcaagaggctgggcgcccagtggaagctgctggatgaagatgagaagaggccctttgtggaggaggccaagaggctgcgggcccggcacctgcgggactacccagactacaagtaccggcccaggaggaaggccaagagcagtggagctggccccagccgctgtggccagggccggggcaacctggccagcggcggccccctgtggggccctggctacgccaccacccagcccagccggggcttcggctacagacctccttcctacagcacagcctacctgcccggcagctatggcagcagccactgcaagctggaggcccccagcccctgcagcctgccccagagcgacccccggctgcagggcgagctgctgcccacctacacccactacctgcccccaggcagccccaccccctacaacccccccctggccggggcccccatgcccctgacccacctgtag

SEQ ID NO: 169411 - DNA, 702 bp, Artificial Sequence
  derived and/or modified sequence
atggccctgcccggcagcagccaggaccaggcctggagcctggagccccctgccgcaacagccgcagcgagtagtagctccggcccacaggaacgtgaaggcgctggtagtcccgccgcacctggtactctcccactggaaaaagtcaagagaccgatgaacgcttttatggtttggagcagtgcccagaggagacagatggcgcagcagaatccgaaaatgcacaactctgagattagcaagcgtctgggtgcgcagtggaaactgctagatgaggatgaaaagcgcccctttgtagaggaggcgaaaaggctgcgggcgaggcatctgcgtgactatccggactacaaataccgccctcgacgcaaagccaaatcctccggggcagggccgtccaggtgcggccagggtcggggtaacctggcctccggagggccactctgggggccaggatacgccactactcagccctcacgaggcttcggttaccgccctccatcatattctactgcgtacttgcccggaagctatggcagtagccactgtaagctcgaagctccatccccttgtagcctgccccaaagcgatcctcgcttacagggggagctactcccgacttatacgcactacctgcctcctggtagtcccaccccttacaatccccctctcgcaggcgcccctatgcccctcacacacctctag

SEQ ID NO: 169412 - DNA, 702 bp, Artificial Sequence
  derived and/or modified sequence
atggccctgcccggcagcagccaggaccaggcctggagcctggagcctccagccgccacagctgccgcttcctcttcttcagggccccaagaaagggagggggccggctcacctgctgccccaggcacactaccccttgaaaaagtcaaaagacctatgaatgctttcatggtttggtcctcagcccagcggaggcagatggcacaacagaatcccaagatgcataattcggaaattagcaaaaggctgggagcacaatggaagttgctggacgaggacgagaagaggccgtttgtagaggaggctaagcggctcagagccagacaccttagagactaccccgactacaagtatagaccacgccgcaaagccaaatcttcaggggccggtccctcccgttgcggccagggcaggggcaacctagcatcagggggcccattgtggggcccaggatacgcaaccacacagccatctaggggatttggatataggccacccagctactccacagcctacctcccaggctcctatggctcgtcccactgcaaattggaagcacctagtccatgtagtcttccgcaatctgaccctcggctccaaggtgagctgctgcccacatatactcactatctgccccccgggagtcccaccccttacaatcctccccttgctggagcaccaatgcctctgacacacttatag

SEQ ID NO: 169413 - DNA, 702 bp, Artificial Sequence
  derived and/or modified sequence
atggcccttccaggcagcagccaggatcaggcttggtccttagagccgccagctgcgacagctgccgcatcttcatcctctggccctcaagaaagggagggagccggatcccccgctgcccctggaaccctccctttggaaaaagtgaagagaccaatgaatgccttcatggtctggagtagcgcacagcgcaggcagatggctcaacagaaccctaagatgcacaacagcgaaatcagcaagaggctgggcgcacagtggaagctgcttgacgaggatgaaaaacggcctttcgtagaggaggcaaaacgactccgcgcacggcacctacgcgattatcccgattataaataccgccctcgcaggaaagctaagagcagtggcgcaggtccatcaaggtgcgggcagggaaggggcaacctggcttccggaggcccactctggggccctggctacgccaccacacaaccatcccgtggttttgggtatcgtcctccatcctatagtaccgcatatctacctggtagttacgggagcagccactgtaagctggaggctccaagcccatgcagcctcccgcaaagcgatccacggcttcaaggggagctgctccctacctacacgcattacttaccccctgggtcaccaaccccgtataatcctcctctcgccggagccccaatgccgctgactcacctttag

SEQ ID NO: 169414 - DNA, 702 bp, Artificial Sequence
  derived and/or modified sequence
atggcgctgcctggatcaagccaggaccaggcttggagtctggagccccctgcggctacagctgccgctagttcatcctccgggccacaagagcgggagggcgctggaagccctgccgctcccggaactcttcctctcgagaaggtaaagcgcccaatgaacgcttttatggtctggtcttccgcgcaaaggcgacagatggcccagcagaaccccaagatgcacaattcagaaatttccaagcgactgggcgcacagtggaaactactcgacgaggacgaaaagcggcctttcgttgaggaagcgaagcgtcttcgggcacggcacctccgcgactaccccgactacaagtataggccacgcaggaaagccaagtcgagcggcgcaggcccatcacggtgcggccagggtcggggtaacctggcttctggtggaccactatgggggccagggtatgccacaacccagccctcccggggttttggctataggcctcccagttactctaccgcctacctgccgggatcctacgggtccagccattgcaaactcgaggctccaagcccttgctctctccctcagtccgatcctagattacagggcgagctacttcccacatacacacactatctgccaccgggaagccccacgccgtacaacccaccactcgcaggggcacctatgcccctgacccatttatag

SEQ ID NO: 169415 - DNA, 1394 bp, Artificial Sequence
  derived and/or modified sequence
ttaaggaggtgcagtcttatgggagggacaggggcggagtcagtctttaaaagctgttcccaggtctggcccgcctgccacaaacgctgagcccaggtgggagaggtctggcctatccgcgcctggcagctgtcggaactccggagaccacaaaggggtttatggtttaccccctccacggaaggtcggtctgatcgcagctgcgggtcggggagagggaccgggggtcccccagtcagtaggcctcagaacacctcttcagtgccggggcaccagacagcggattttgcattcgactctccccaaagtgtgccgaacaggttggaagcaaaggctccggtttaagctctgggcttggggataaaatacactttttaaggacccaagttcctcggcaacgactccagactgggaagacctttccattttcaggatcgacgcttcacgttgaggggagggcattcaggacgccctcttaaggcttctcccaacccatggcgctaccaggctcctcacaggaccaggcctggagcctggagcctccggctgccacggctgctgcctcctcatcttcgggaccccaggagcgggagggcgctgggagccccgcggcccccgggacgctgcccctggagaaggtgaagcggccgatgaacgcgttcatggtgtggagctccgctcagcgccgccagatggcgcagcagaaccccaagatgcacaactccgagatctccaagcgcctgggcgcgcagtggaagctgctggacgaggacgagaagcggcccttcgtggaggaggccaagcggctccgcgcccgacacctgcgcgactaccccgactacaagtaccggcctcggcgcaaggccaagagctcgggcgccggaccttcccgctgcggacagggaagaggcaacctggccagcggcggcccgctctgggggccggggtacgcgaccacccaaccgagcagaggctttgggtacagaccccccagctactcgacagcctacctgcctggcagctatggctcttcccactgcaaactggaagccccctcaccgtgctccctccctcagagtgaccctaggctccagggggaactgctgcccacctatacccactacctgccccctggctctcccactccatacaaccctccccttgctggtgcccccatgcccctaacccacctctaaccctcatggacgcagacctcacgggacgggcctcatcctccttttttaatccagcagcatcccctaccccaggctgtcaaccctttctcctgttggactacagttcagaggcagcctgcagtcctcccatgatagccagggagagccgcacaacatacaattatatttttggtagtattaaacagttttgtattattc

SEQ ID NO: 169416 - DNA, 1048 bp, Artificial Sequence
  derived and/or modified sequence
gggagaggtctggcctatccgcgcctggcagctgtcggaactccggagaccacaaaggggtttatggtttaccccctccacggaaggatcgacgcttcacgttgaggggagggcattcaggacgccctcttaaggcttctcccaacccatggcgctaccaggctcctcacaggaccaggcctggagcctggagcctccggctgccacggctgctgcctcctcatcttcgggaccccaggagcgggagggcgctgggagccccgcggcccccgggacgctgcccctggagaaggtgaagcggccgatgaacgcgttcatggtgtggagctccgctcagcgccgccagatggcgcagcagaaccccaagatgcacaactccgagatctccaagcgcctgggcgcgcagtggaagctgctggacgaggacgagaagcggcccttcgtggaggaggccaagcggctccgcgcccgacacctgcgcgactaccccgactacaagtaccggcctcggcgcaaggccaagagctcgggcgccggaccttcccgctgcggacagggaagaggcaacctggccagcggcggcccgctctgggggccggggtacgcgaccacccaaccgagcagaggctttgggtacagaccccccagctactcgacagcctacctgcctggcagctatggctcttcccactgcaaactggaagccccctcaccgtgctccctccctcagagtgaccctaggctccagggggaactgctgcccacctatacccactacctgccccctggctctcccactccatacaaccctccccttgctggtgcccccatgcccctaacccacctctaaccctcatggacgcagacctcacgggacgggcctcatcctccttttttaatccagcagcatcccctaccccaggctgtcaaccctttctcctgttggactacagttcagaggcagcctgcagtcctcccatgatagccagggagagccgcacaacatacaattatatttttggtagtattaaacagttttgtattattc

SEQ ID NO: 169417 - protein, 315 aa, Artificial Sequence
  derived and/or modified sequence
MVQQRGARAKRDGGPPPPGPGPAEEGAREPGWCKTPSGHIKRPMNAFMVWSQHERRKIMDQWPDMHNAEISKRLGRRWQLLQDSEKIPFVREAERLRLKHMADYPDYKYRPRKKSKGAPAKARPRPPGGSGGGSRLKPGPQLPGRGGRRAAGGPLGGGAAAPEDDDEDDDEELLEVRLVETPGRELWRMVPAGRAARGQAERAQGPSGEGAAAAAAASPTPSEDEEPEEEEEEAAAAEEGEEETVASGEESLGFLSRLPPGPAGLDCSALDRDPDLQPPSGTSHFEFPDYCTPEVTEMIAGDWRPSSIADLVFTY

SEQ ID NO: 169418 - DNA, 555 bp, Artificial Sequence
  derived and/or modified sequence
atggcctggatcagccggctgcgggagcacctgggcgccacagctgagagccaggtgtgtgcctacccccaggccgtgccccagggcctgaggaagggggccgccccagctgcccctcctgtgaaggaccccccagcccctggccccaagctgggccagctgcctggagctgagggccaggccgagcccggctgccccagcaccagcgccaccccagctgctgctgctgccatgacagcccagatcgtgtggtaccgccgggtgtctgacatgaccagcgccagcagcgccaggatgatgggcgtggccggggccagcgccccctggaggagatttgccaggacagccagctcctggagcacctgggagaggagcctgccccagaggcggcagagcggcggggcccggagcaccaccgtgcgggccccacccaccagcctgacctggaccacctggaggacctgcaccccctggatgccacccaccatggccaccagccccaccctgagcaccaccgtggtgacccccacctgccgctgcaccaccagcagctag

SEQ ID NO: 169419 - DNA, 948 bp, Artificial Sequence
  derived and/or modified sequence
atggtgcagcagagaggcgccagagccaagagagacggcggcccccccccccccggccccggccccgccgaggagggcgccagagagcccggctggtgcaagacccccagcggccacatcaagagacccatgaacgccttcatggtgtggagccagcacgagagaagaaagatcatggaccagtggcccgacatgcacaacgccgagatcagcaagagactgggcagaagatggcagctgctgcaggacagcgagaagatccccttcgtgagagaggccgagagactgagactgaagcacatggccgactaccccgactacaagtacagacccagaaagaagagcaagggcgcccccgccaaggccagacccagaccccccggcggcagcggcggcggcagcagactgaagcccggcccccagctgcccggcagaggcggcagaagagccgccggcggccccctgggcggcggcgccgccgcccccgaggacgacgacgaggacgacgacgaggagctgctggaggtgagactggtggagacccccggcagagagctgtggagaatggtgcccgccggcagagccgccagaggccaggccgagagagcccagggccccagcggcgagggcgccgccgccgccgccgccgccagccccacccccagcgaggacgaggagcccgaggaggaggaggaggaggccgccgccgccgaggagggcgaggaggagaccgtggccagcggcgaggagagcctgggcttcctgagcagactgccccccggccccgccggcctggactgcagcgccctggacagagaccccgacctgcagccccccagcggcaccagccacttcgagttccccgactactgcacccccgaggtgaccgagatgatcgccggcgactggagacccagcagcatcgccgacctggtgttcacctactag

SEQ ID NO: 169420 - DNA, 948 bp, Artificial Sequence
  derived and/or modified sequence
atggtacaacagcgcggtgcccgcgccaagagggatggcggtccacctccaccagggccagggccagccgaagagggtgctagagaacccggatggtgtaaaactccctccggccatattaaacggccaatgaacgcttttatggtatggtcccagcatgaaagacgaaagattatggatcagtggcccgatatgcacaacgcagaaattagtaagagactaggacgacgttggcagctgctgcaagactcggaaaaaattccattcgtaagagaggctgaaagactgagactgaagcatatggcggattatcccgattataagtaccggccccggaagaaaagtaagggtgcaccagcaaaggcccggcctagaccaccaggaggcagcggcggaggatcccggctcaaacccgggccacagttgcccgggagaggcgggcgccgggctgccgggggacccttaggaggaggagctgcagcgcctgaggatgatgatgaagacgacgatgaggaactgctggaggttcgcttggtagagacaccaggcagggaactctggcgcatggttcccgccggccgagccgcccgcgggcaggcagaacgtgcccagggccctagcggagagggagctgccgctgcagcagcagctagcccgaccccctcagaggacgaggaacctgaagaggaggaggaggaagcagccgctgctgaagagggggaggaggagaccgtcgcttccggagaggagtcattaggcttcctttccaggctccccccggggcctgctggtttagactgctccgctcttgaccgggaccctgacctgcaaccccctagtggaacatctcacttcgagttcccagactattgtacccctgaagtgactgaaatgatcgccggcgactggcggcccagtagtattgcagatcttgtgtttacctactag

SEQ ID NO: 169421 - DNA, 948 bp, Artificial Sequence
  derived and/or modified sequence
atggtgcaacagaggggagcccgtgcaaaaagagatggcgggcccccaccaccaggacctggtcccgcagaggaaggcgcccgggagcctggttggtgcaagactccaagtggtcacatcaagcgcccaatgaatgctttcatggtttggtctcaacatgagagacgcaagatcatggaccagtggcctgacatgcacaacgctgaaatctcgaaacggttaggtcgccggtggcagctgttgcaggattcagagaagatcccattcgttagagaggctgagcgactgcgacttaaacacatggctgattatccagactacaaataccgccctcggaagaaatcaaaaggcgcccccgctaaagcccgaccacgcccccccggaggaagcggcggggggtcacggttgaagccgggaccccaactacctggccgggggggtcggagggccgcaggcgggcccctgggaggaggtgctgctgcgcccgaggatgacgacgaagacgatgacgaagagttactggaagtgcgtcttgtcgagactcctggtagagagctctggcggatggtgcctgctgggcgagcagcgaggggacaggccgaaagggctcagggccccagtggtgaaggtgcagccgcagctgctgccgcgagccccactcctagcgaagatgaggagcccgaagaagaggaggaagaagctgcggctgccgaagagggtgaagaggagacagtggcgagcggagaggagtccctcggttttctgagcagacttccgcccggcccggccggtcttgactgtagcgcgctagaccgcgatcccgacctgcagcctccaagcggcacttcacactttgagtttcccgattattgcaccccagaggtgactgaaatgattgcaggagattggcgaccctcttcaattgcagacttggtgttcacatattag

SEQ ID NO: 169422 - DNA, 948 bp, Artificial Sequence
  derived and/or modified sequence
atggtgcagcagagaggagcccgggccaagagagatggcggccccccacctcctggccctggccctgctgaggagggcgcccgggagcccggctggtgcaagaccccatctggccacatcaagaggcccatgaatgccttcatggtgtggagccagcatgaaagaaggaagatcatggaccagtggccagacatgcacaatgctgagatcagcaagaggctgggccgccgctggcagctgctgcaggacagcgagaagatcccctttgtgcgggaggccgagcggctgcggctgaagcacatggctgactacccagactacaagtaccggcccaggaagaagagcaagggggccccagccaaggcccggccccggcccccaggcggcagcggcggcggcagccggctgaagccaggcccccagctgcccggccggggcggccggcgggctgctgggggccccctgggcggcggggccgccgccccagaagatgatgatgaagatgatgatgaggagctgctggaggtgcggctggtggagaccccaggccgggagctgtggaggatggtgcctgctggccgggccgcccggggccaggccgagcgggcccagggccccagcggggagggcgctgctgctgctgctgctgccagccccacccccagtgaagatgaggagcctgaggaggaggaggaggaggccgctgctgctgaggagggggaggaggagaccgtggccagcggggaggagagcctgggcttcctgagccggctgcccccaggccctgctggcctggactgcagcgccctggaccgggaccctgacctgcagccccccagcggcaccagccactttgagttcccagactactgcaccccagaggtgacagagatgattgctggggactggaggcccagcagcattgctgacctggtgttcacctactag

SEQ ID NO: 169423 - DNA, 948 bp, Artificial Sequence
  derived and/or modified sequence
atggtgcagcagcggggcgcccgggccaagcgggacggcggccccccaccgcccggccctggaccggccgaagaaggagcccgggagcctgggtggtgtaaaacacctagtggccatatcaaaagacctatgaatgcattcatggtgtggtcccagcacgaacgacgaaagatcatggatcaatggccagacatgcacaacgctgaaatctccaaacgcttaggaagaagatggcagctcctccaggacagcgagaagattccattcgtgcgcgaggcggagaggttgagattaaagcatatggctgactatccagattacaagtacagacccaggaagaagagcaagggcgcaccagcgaaagcacggccgagaccccctggaggcagtggcgggggatcgagactgaagccaggaccacagctgcccggacggggagggcgcagagcggccggcgggcctctcggaggcggagcagcagccccagaggacgacgatgaggatgacgacgaggagctgctagaggtgagattggtagaaacaccggggagagagctgtggcgcatggtccctgccggcagggccgcaagaggccaggccgaacgagcccagggaccgtcaggggagggggctgctgccgcagctgcagcttcacccactcctagcgaggacgaggagcctgaggaagaggaagaagaagccgccgccgccgaggaaggggaagaagagaccgtagcttcaggcgaggagtccctaggcttcctctcgaggctcccccccgggccagcaggtttggattgctctgctctggatagagacccggacctgcagcccccctccggaacatcccacttcgagttccctgactattgtacacccgaagtgacggagatgatcgcaggtgattggaggccctcttctatagccgatctggtattcacatactag

SEQ ID NO: 169424 - DNA, 948 bp, Artificial Sequence
  derived and/or modified sequence
atggtgcagcagcggggcgcccgggccaagcgggacggcggccccccacctccggggcccggaccagccgaggaaggggctcgcgagccaggctggtgcaagaccccatctggccacatcaaacggcctatgaacgcttttatggtgtggtctcagcacgagagaaggaagattatggaccagtggcctgacatgcacaacgctgagatctccaagaggcttggcaggcgctggcaactgcttcaggattccgaaaagattcctttcgtcagagaagccgagcggctccgacttaagcatatggccgattatcccgactataaatacagacctcgcaagaagtctaaaggagccccagccaaagcaagaccacgcccacctggaggtagcggcggcggctcgcgactgaaacccggacctcagttgccagggagaggtggccgacgggctgccggaggtcccctgggggggggtgcagccgcccctgaggacgacgatgaggatgacgacgaggaactcctggaagtgagactggttgaaacaccaggccgtgaactgtggcgtatggtgccagctggtagagctgccagaggtcaggccgagagagcccagggaccaagcggagagggcgcagcagccgctgcagcagcatctcccactccatctgaggacgaggagcccgaagaagaggaagaggaagcagccgccgcagaagaaggcgaggaggaaaccgtcgctagtggtgaagagtcacttggcttcctaagtaggctgccaccgggcccagcaggactggattgctcagctctcgatagggatcccgacctacagccaccttccggcactagccactttgaatttcccgattattgcaccccagaggtgaccgaaatgatcgccggtgactggagaccatcctcaattgcagatctcgtgtttacatactag

SEQ ID NO: 169425 - DNA, 948 bp, Artificial Sequence
  derived and/or modified sequence
atggttcagcagcgaggagccagagccaagcgagatgggggtcccccacctccaggacccggacctgcagaggaaggagccagggaacctggctggtgcaaaactccttctgggcatattaaacgcccaatgaacgcatttatggtatggagccaacacgaacgccgtaagattatggatcaatggcctgacatgcacaacgccgagatcagcaaacgactgggcagacgctggcagctgcttcaggattccgagaagattcccttcgtccgggaggctgagcggctgcggctgaaacacatggcggactatcctgactataagtataggccacgcaagaagagcaaaggcgctcccgcaaaagcgagaccccgtcctccaggagggtctggtggcggaagtcggcttaagccaggtcctcagctgcctggacgtggaggcaggagggcagcgggaggccctcttggtggaggggcagctgctcccgaggatgacgatgaggacgatgatgaggagctgctggaggtcaggcttgttgagacacccggacgcgaactttggaggatggtccctgcagggcgagcagccaggggccaggccgaacgggctcagggtccttccggggagggcgctgctgccgctgcagcagcgtcacccacaccgtctgaggacgaagaaccagaggaggaggaagaggaggcggcagcagcggaagagggtgaggaagaaactgtggcatcaggcgaagagtctcttggatttctatcaaggcttccacctggtcccgctgggctcgactgtagtgcactggatcgcgacccagatctgcagcctccgagcggcacttcacactttgaatttccagattactgcacgcctgaagtcacagaaatgattgcaggtgactggagaccctcctctatcgccgatctggttttcacgtactag

SEQ ID NO: 169426 - DNA, 948 bp, Artificial Sequence
  derived and/or modified sequence
atggtccagcagcggggagccagggcaaaacgagacgggggaccccctccccctggacctggacctgctgaggagggcgctcgggagcctggatggtgtaaaacccctagcggccacataaaacgcccaatgaatgcattcatggtgtggagccagcacgagaggcgaaaaataatggatcagtggcccgacatgcacaatgccgaaataagtaagcgtcttgggaggcggtggcaactccttcaggactccgagaagattcccttcgtcagagaggctgagcgcctccgcctcaaacacatggcagactatcctgattataaatacaggcctaggaaaaaaagcaaaggagcgccagccaaggcgcgaccccgtccaccaggcggaagtggtgggggatctagactgaagcctggccctcaactgcctggtagagggggtagaagagccgcaggtggcccactggggggtggcgctgccgctccagaggatgatgacgaagacgacgacgaagagctcctggaagtgcgccttgtggagactcctggccgagaactatggcgcatggtccctgccggtcgggcagcgagagggcaggccgagagggcccagggacccagcggcgaaggagctgccgcagctgcggcagccagtcctacccctagtgaggacgaggaacccgaggaggaggaagaggaagcagccgcagctgaggagggcgaagaagaaaccgtcgctagtggcgaggaatccctcgggttcctgtctcggctgcctccgggacctgccggtctggattgctcggctctggatagagatcccgatttacagcccccatcagggacatcgcatttcgaattcccagattattgtacacctgaggtcacggagatgatcgcgggagattggcgtccatcttctattgccgacctggttttcacctattag

SEQ ID NO: 169427 - DNA, 4627 bp, Artificial Sequence
  derived and/or modified sequence
ccgcggcggagccagaggctgcaggaagagcccgcgggggcccggagggtgcgattcctcggcccccgcaaaacaatgtgtgttgtgagccaggacgcaacttgccggaggcggcgggggcgcgccgagcccgcctgagaccgcgctgaccttctccccccgccgtccgttgggcccgagcgcccagctcctcgctccccagttcgcgggggccgggccgagccgcggggcggggccgcccctccgtcgccgctgcctcctcccccacccccagccgcggaggatgcggacggcccccggcggcgtctagcggccccgggcccaggcgcgatggtgcagcagcggggcgcgagggccaagcgggacggcgggccgccgcccccgggacccgggccggccgaggagggggcgcgcgagcccggctggtgcaagaccccgagcggccacatcaagaggccgatgaacgcattcatggtgtggtcgcagcacgaacggcggaagatcatggaccagtggcccgacatgcacaacgccgagatctccaagcgcctgggccgccgctggcagctgctgcaggactcggagaagatcccgttcgtgcgggaggcggagcggctgcggctcaagcacatggcggattacccggactacaagtaccggccgcgcaaaaagagcaagggggcgcccgccaaggcgcggccccgcccccccggtggtagcggtggcggcagccggctcaagcccgggccgcagctgcctggccgcgggggccgccgagcagcgggagggcctttggggggcggggcggcggcgcccgaggacgacgatgaagacgacgacgaggagctgctggaagtgcgcctggtcgagaccccggggcgggagctgtggaggatggtcccggcgggacgggccgctcggggacaagcggagcgcgcccaagggccgtcgggcgagggggcggccgccgccgccgccgcctccccgacaccgtcggaggacgaggagccggaggaagaggaggaggaggcggcagcggctgaggaaggtgaagaggagacggtggcgtcgggggaggagtcgctgggctttctgtccaggctgccccctggcccggccggcctggactgcagcgccctggatcgcgacccggacctgcagcctccctcgggcacgtcgcacttcgagttcccggactactgcacccccgaggttaccgagatgatcgcgggggactggcgcccgtctagcatcgcagacctggttttcacctactgagcccaccgtcagcggggcgcgcacgcccccaaaccagctgtttacatacaggaatcaggtattggggcccctcggaggccgaggctggcaccccatctcccgcgcagcctgccccctcctggacgtgcccatcccccctcagatccagacatgcccctcccccgcagacacaccccaaggcagcccaacccccaccccttccccgacacccaagcccctccccacgtcgccccctcctgcacagccaccagcagccagccccctccgatacacctcccgtcctctcctacagacctgcacccctccccccttttgcacacgcccctcctcgtggccggaggacccgccccctcctttgctccggaatctctcctccctcgcccggcccgccttctctgggttaggggggcgatgcggccgggtggcaacgcacgcgcctcctgcgcccctcccttccctggggggaggggcgcaccccttttatccccggagcgctagggcccgcccctccgctggggcccacccccttcgtgcgcatgcttaatgcttctggggaggagggggctggtcccagcggagccgcactcttcgcccgctccgggcaaaagcgggggcgagtgtagagcgatcctgggaaatcctttgatccgggagccctaggtttcctctccagccaacggggcgtcgctgccttaatgggaggagcactcggaagggttggtttgggcctgaaactctcccaagtggcatagccccttttccggtatggggtctcctacacccacgcgcaccacctctccggtcgcgtggctgcctctacagcctacctatacgtccctttttccccccaactgggaattgagaggtaaggtctttctctggaaatccagcagtagaggaagggaccacccaagaaaactaaaaaccaaggcaccttaccagtctgtctggggacaggatccctgctgcaccttccccaccccctcctgggaagtgccccctcacctcagggcacccgcaacctgggctcctccctgagcgcaccggcccttcctgtcacccaggtccaccctcagtactcaagctgcagtatacagcgggaaaaactgaggcactttggtgctaggggtttgggactgaggcgtggagagcagatgtgatggcaggaagactctcgcttttaaacatctggtttgggagagaccatcgacttggccagtgagactgagaatggattccgagtagtgatgggccgtttgcacctcggtttttccacgtgagaaatggggagaacgctgctgttaggaggaagttgtgtccagttcagggtgccctcgggagccctgtccctgttgctgtggcccctctcacgccgccatctctctgccccgccccgcccctccggcctccccacaccccccttgccctcactacctgtatctcaccggcgtgtgttcaccctcccgggtggctcacacactctcattcacacacacaaatctcaggaacaaacggtcccagagtcctccggacccctgcccagggtctctgcaggtctctgccccacgcgttcccgtcgctgacaaagccaccagctgcctcctttaagcttggtgctccggctctgggcctttcttgcgctctattttttttttttttttttttaagaaaaacaacaacaacaaaaaaagacaatgaaaaaaaaaacgtcatgtgagtgaagagatgtcactgtctgtggtcttggagaactagtctcgtagctgaggggtggggtccctctgtctggggcactggcacccacagcaggactccgccagtctgatgccaggactgaataaagtgtatttgccccgaccttgccctgtggttctgcatgtctgtgctcttcctcaaccctccctaaacagtttgccagattcaagtccgtgtgatttgggcccgagctgggtgtcccagggcaagccaccttgcctgtctaggcctctatgtcaggactccctggccttcatgaagaatagcaaactcatccctgtagggaccaggcaggtaacatagacgagtgactctgggtggacagtggtgtcatgacccacttcaaggggcctacctcctgccagttgtgaccctgtgggaatgcagtccacagtggccaggtggccagatttttcaagaaaagctggatggatgtttctgagtcatcttaatttcaaaatgagactcatattttaaaatttctgtgggccaaatgaaacaagtatgcaggcaggtctggtccgagggggctggcttggccatgcctttctgtgcctttaatgaggactaagaagcaagattgggccacactgtctggactcaaagcccagctccaccactgagcacccgtgtgactctttccatatgtataacgtggggataataataatagctgcttcacaggatgaaatgaagtttgaggtgagaagcattcaccatggtgcccatcgtgttactccattgtcagaggaggaaacggggtcaggcaggaaagcaacttaaaggagggcctgcaagcagccagggtcagagacagggcttggttctgcttcctggtgaagcatggcttcggggtgctgcctctccctccctgtttgaatctgcagattgtgttaggcccccagctgagggcctggagtggtgggattggtcccagtgcctggcgcacattggcctgcagagtagattaactgaatgaccaaagagcaacagaagtctagtgattcttgtctttgaggttctgactggtgttttacaactgagtccaaggcttttccctcctttgtccctctgacacccctccccctaattctcatctgtcagatccagtgtattcctaagctgggacaaagcctctgttttcccagtaggagccagggctgagtgtggaaattacagtgactgcttcttctcagcttctctggttgaaagcaagctggcgaagtaagaggaggtagagttgagaaggtgtggaagatagggacagctgcccccagaactcccttcaagggaggacttccccagctatgggaagtgccatcagggtggccgcagctgcagagagccacttcacctgagaccacgcccttcctggggcagcctgtatctggtgtctgagtgaggcatggtataaacacctggtcatttcaatccaacatgggacggacactgacagacagtactcccagcaggcccaggccagccagggcttcgtcaggcctgcagcacaatttgacttcctatgcccaggcctgcttcctcttcttcctcttcttttcacaggtgcttattcctaataaacatcttgcaaccc

SEQ ID NO: 169428 - DNA, 2868 bp, Artificial Sequence
  derived and/or modified sequence
tcggcggccgggcggggagcggcgcgcgcgggccgcggcggagccagaggctgcaggaagagcccgcgggggcccggagggtgcgattcctcggcccccgcaaaacaatgtgtgttgtgagccaggacgcaacttgccggaggcggcgggggcgcgccgagcccgcctgagaccgcgctgcctcctcccccacccccagccgcggaggatgcggacggcccccggcggcgtctagcggccccgggcccaggcgcgatggtgcagcagcggggcgcgagggccaagcgggacggcgggccgccgcccccgggacccgggccggccgaggagggggcgcgcgagcccggctggtgcaagaccccgagcggccacatcaagaggccgatgaacgcattcatggtgtggtcgcagcacgaacggcggaagatcatggaccagtggcccgacatgcacaacgccgagatctccaagcgcctgggccgccgctggcagctgctgcaggactcggagaagatcccgttcgtgcgggaggcggagcggctgcggctcaagcacatggcggattacccggactacaagtaccggccgcgcaaaaagagcaagggggcgcccgccaaggcgcggccccgcccccccggtggtagcggtggcggcagccggctcaagcccgggccgcagctgcctggccgcgggggccgccgagcagcgggagggcctttggggggcggggcggcggcgcccgaggacgacgatgaagacgacgacgaggagctgctggaagtgcgcctggtcgagaccccggggcgggagctgtggaggatggtcccggcgggacgggccgctcggggacaagcggagcgcgcccaagggccgtcgggcgagggggcggccgccgccgccgccgcctccccgacaccgtcggaggacgaggagccggaggaagaggaggaggaggcggcagcggctgaggaaggtgaagaggagacggtggcgtcgggggaggagtcgctgggctttctgtccaggctgccccctggcccggccggcctggactgcagcgccctggatcgcgacccggacctgcagcctccctcgggcacgtcgcacttcgagttcccggactactgcacccccgaggttaccgagatgatcgcgggggactggcgcccgtctagcatcgcagacctggttttcacctactgagcccaccgtcagcggggcgcgcacgcccccaaaccagctgtttacatacaggaatcaggtattggggcccctcggaggccgaggctggcaccccatctcccgcgcagcctgccccctcctggacgtgcccatcccccctcagatccagacatgcccctcccccgcagacacaccccaaggcagcccaacccccaccccttccccgacacccaagcccctccccacgtcgccccctcctgcacagccaccagcagccagccccctccgatacacctcccgtcctctcctacagacctgcacccctccccccttttgcacacgcccctcctcgtggccggaggacccgccccctcctttgctccggaatctctcctccctcgcccggcccgccttctctgggttaggggggcgatgcggccgggtggcaacgcacgcgcctcctgcgcccctcccttccctggggggaggggcgcaccccttttatccccggagcgctagggcccgcccctccgctggggcccacccccttcgtgcgcatgcttaatgcttctggggaggagggggctggtcccagcggagccgcactcttcgcccgctccgggcaaaagcgggggcgagtgtagagcgatcctgggaaatcctttgatccgggagccctaggtttcctctccagccaacggggcgtcgctgccttaatgggaggagcactcggaagggttggtttgggcctgaaactctcccaagtggcatagccccttttccggtatggggtctcctacacccacgcgcaccacctctccggtcgcgtggctgcctctacagcctacctatacgtccctttttccccccaactgggaattgagaggtaaggtctttctctggaaatccagcagtagaggaagggaccacccaagaaaactaaaaaccaaggcaccttaccagtctgtctggggacaggatccctgctgcaccttccccaccccctcctgggaagtgccccctcacctcagggcacccgcaacctgggctcctccctgagcgcaccggcccttcctgtcacccaggtccaccctcagtactcaagctgcagtatacagcgggaaaaactgaggcactttggtgctaggggtttgggactgaggcgtggagagcagatgtgatggcaggaagactctcgcttttaaacatctggtttgggagagaccatcgacttggccagtgagactgagaatggattccgagtagtgatgggccgtttgcacctcggtttttccacgtgagaaatggggagaacgctgctgttaggaggaagttgtgtccagttcagggtgccctcgggagccctgtccctgttgctgtggcccctctcacgccgccatctctctgccccgccccgcccctccggcctccccacaccccccttgccctcactacctgtatctcaccggcgtgtgttcaccctcccgggtggctcacacactctcattcacacacacaaatctcaggaacaaacggtcccagagtcctccggacccctgcccagggtctctgcaggtctctgccccacgcgttcccgtcgctgacaaagccaccagctgcctcctttaagcttggtgctccggctctgggcctttcttgcgctctatttttttttttttttttttt

SEQ ID NO: 169429 - protein, 211 aa, Artificial Sequence
  derived and/or modified sequence
MISRMEKMTMMMKILIMFALGMNYWSCSGFPVYDYDPSSLRDALSASVVKVNSQSLSPYLFRAFRSSLKRVEVLDENNLVMNLEFSIRETTCRKDSGEDPATCAFQRDYYVSTAVCRSTVKVSAQQVQGVHARCSWSSSTSESYSSEEMIFGDMLGSHKWRNNYLFGLISDESISEQFYDRSLGIMRRVLPPGNRRYPNHRHRARINTDFE

SEQ ID NO: 169430 - DNA, 636 bp, Artificial Sequence
  derived and/or modified sequence
atgatcagcagaatggaaaaaatgaccatgatgatgaagattctcattatgttcgccttgggcatgaactattggtcatgttcaggattccccgtctatgattacgacccatcttccttaagagacgccctctctgcctcagttgtgaaggtgaacagccagagcctgagcccctacctgtttagggcattccgctctagcttgaagcgcgtggaagtgctggatgagaacaacctagtcatgaacctggaatttagcattagagagaccacctgtagaaaggactccggcgaagatcctgccacatgtgcatttcagagagactactacgtctccactgccgtttgcagaagtacagtcaaagtgtccgcccaacaggtgcagggcgtgcacgccaggtgctcttggtcatcttctacatccgagtcatacagctccgaggagatgattttcggggacatgctcggcagccacaagtggcgaaacaactatctgttcggcttgattagtgatgaatccatctccgaacagttctatgaccgaagtctgggcattatgcggcgggtccttccacccggtaataggcggtaccctaaccataggcacagagctcgcatcaacactgattttgaatag

SEQ ID NO: 169431 - DNA, 636 bp, Artificial Sequence
  derived and/or modified sequence
atgatctctagaatggaaaaaatgactatgatgatgaaaatacttatcatgtttgccctgggaatgaactactggagctgctctgggtttcccgtatatgattatgatccatccagcctgagggatgccttgtctgctagcgtggttaaagtaaactcccagagtctgtccccttatctattccgcgcattccgatctagcctgaagcgcgtcgaagtgctcgatgaaaataacctggtaatgaacctggagttcagtatccgagagactacctgtaggaaggactccggcgaagaccccgccacttgcgctttccagagagactactatgtgtctaccgccgtgtgcaggagtacagtgaaagtcagtgcccagcaggttcagggcgtccacgcaaggtgtagttggtcatctagtaccagtgaaagttatagttccgaagaaatgatcttcggagacatgctgggcagccacaagtggagaaacaactaccttttcggcttgatctccgacgaatctatttctgagcagttctatgatcggtcactgggcattatgaggcgagtgttgcctccaggcaacaggcgataccccaaccatcgacatagagcgcgaattaacaccgactttgaatag

SEQ ID NO: 169432 - DNA, 636 bp, Artificial Sequence
  derived and/or modified sequence
atgatcagcaggatggagaagatgaccatgatgatgaagatcctgatcatgtttgccctgggcatgaactactggagctgcagcggcttccctgtgtatgactatgaccccagcagcctgagagatgccctgagcgcctctgtggtgaaggtgaacagccagagcctgagcccctacctgttccgggccttccgcagcagcctgaagagggtggaggtgctggatgagaacaacctggtgatgaacctggagttcagcatccgggagaccacctgcaggaaggacagcggggaggaccctgccacctgtgccttccagagggactactacgtgtccacagctgtgtgccgcagcacagtgaaggtgtctgcccagcaggtgcagggcgtgcacgcccgctgctcctggagcagcagcaccagcgagagctacagcagcgaggagatgatctttggagacatgctgggcagccacaagtggaggaacaactacctgtttggcctcatcagtgatgagagcatcagcgagcagttctatgacaggagcctgggcatcatgagaagagtgctgcccccaggcaacagacgctaccccaaccaccgccaccgggcccgcatcaacacagactttgaatag

SEQ ID NO: 169433 - DNA, 636 bp, Artificial Sequence
  derived and/or modified sequence
atgatcagccggatggagaagatgaccatgatgatgaagatcctgattatgttcgctctgggaatgaattactggtcctgttcaggatttccagtctacgactatgacccttcaagcctgagagacgcgctgtcggcgagtgttgtgaaggtcaattcccagagcctatctccttacttatttagggcatttcgctcctccctcaagcgagtggaagtgcttgatgagaataatctggtgatgaacctggaattctcaatcagagaaacaacttgccgtaaggattctggcgaggacccagctacctgtgccttccagcgagattactacgtgtctacagccgtctgtcgtagtactgtcaaagtctcagctcagcaggtccagggcgtgcacgcccgatgttcctggtccagtagcactagtgaatcttactcgtccgaagagatgattttcggggatatgctgggatcccacaagtggcgaaataactatctgttcgggctcatatcggacgagtctatatccgagcagttctatgatcgtagtctgggcattatgagacgcgtgctgcccccgggaaaccgccgctaccctaatcaccgccaccgcgccaggatcaataccgatttcgaatag

SEQ ID NO: 169434 - DNA, 636 bp, Artificial Sequence
  derived and/or modified sequence
atgatcagccggatggagaagatgaccatgatgatgaagatcctgattatgttcgcgctgggcatgaattactggtcatgcagcgggtttccagtgtatgactacgatccttcatccctgcgggatgccctcagcgcgtccgtggtgaaagtaaacagccagtcattgagcccgtatctgtttcgagcctttcggagctccttaaagagagtggaggtactggacgagaacaacctggtgatgaacttggagttttctattcgggagacgacatgccggaaggacagcggggaggaccccgcgacgtgcgccttccagcgggactattatgtgagtacagcggtttgccggagcacagtgaaggtatcagcacaacaggtgcagggcgtccacgcacgttgcagttggagttcgtctacaagcgagagttattctagtgaggagatgatatttggcgacatgttaggctcgcacaagtggcgaaataactatttattcggcctcatctctgacgagagtatatccgagcagttctatgatcggtcccttggcattatgcgccgagtactcccacctggcaaccgacgctaccctaatcatcggcatcgggcgcgtatcaatacagacttcgagtag

SEQ ID NO: 169435 - DNA, 636 bp, Artificial Sequence
  derived and/or modified sequence
atgatttcaaggatggaaaaaatgaccatgatgatgaaaatactgatcatgtttgccttggggatgaattactggtcctgtagtgggttccccgtttatgattacgatccttcatcattgagagacgctctttccgcgtctgttgtgaaggtgaactcacaatccctctccccatatctgttcagagcgttccgctctagcctcaagagagttgaagtgctggatgaaaacaatctggttatgaatcttgagttctctattagagaaactacgtgccgaaaggacagcggagaggatcctgctacctgtgcctttcagcgcgactactacgtgagcaccgcagtttgtcggtccacggttaaggtctcggcacaacaggtccagggagtgcacgcccgatgttcctggagctcttccacttctgagagttattcaagcgaagagatgatctttggcgatatgttaggctctcacaagtggaggaataattatcttttcggactaatttccgatgaatcgataagcgaacagttttacgatcgctctttgggaatcatgcgaagggtcctcccacccggtaatcgaaggtacccgaaccacaggcacagggcccgtataaatacagacttcgagtag

SEQ ID NO: 169436 - DNA, 636 bp, Artificial Sequence
  derived and/or modified sequence
atgatttcaagaatggaaaaaatgaccatgatgatgaagatcctgatcatgttcgcactcggcatgaattattggtcctgtagtggctttcccgtatacgattatgatccttccagtctgcgggatgccttatctgcctcagttgtcaaggtgaattcgcagagcttaagcccttatctgtttcgggcatttcgttcgagcctgaaaagagtcgaggtgctagatgagaataatctggtcatgaatttggagttttcgatcagagaaaccacgtgtcgcaaagactcgggtgaggatccagccacatgcgcattccaacgagattattacgtgtctaccgcagtgtgtcggagcacagtgaaggtcagtgcccagcaggtccagggtgtacatgccaggtgttcatggagtagttccacaagcgagagctatagttctgaggagatgattttcggcgatatgctgggctcccacaagtggcggaacaactacctctttggattgatcagcgacgagtccatttccgagcaattttatgatcggtctttgggaattatgagaagggtgttgccgcctgggaatcggagatacccaaaccatcgccatagggctcgtattaatacggacttcgagtag

SEQ ID NO: 169437 - DNA, 636 bp, Artificial Sequence
  derived and/or modified sequence
atgatttcacgaatggaaaagatgaccatgatgatgaaaatcctgattatgtttgcactcgggatgaactactggagctgtagcggattccccgtgtatgactacgacccctctagcttgagggatgcactctctgctagcgtggtgaaagtgaattcccagtcgctctccccttacctcttccgggcatttcgcagctcactgaaaagggtggaggtcctagacgaaaataacctagtcatgaatcttgaatttagcattcgcgaaaccacatgtcgcaaagactctggcgaagatcccgccacctgcgccttccagcgcgattactacgtgagcaccgctgtgtgtaggagtactgtgaaagtttcagctcaacaggtgcagggggtgcacgccaggtgtagctggtctagttcaacatccgaatcctattcatctgaggagatgattttcggggacatgctcggatcccataaatggcgcaataactatctgttcggcttaatttctgacgagtcaatctctgagcagttttacgatcgtagcttaggaataatgagacgagtcctgccgcctggcaaccgcaggtaccctaatcaccggcacagggcccgcatcaatacagatttcgaatag

SEQ ID NO: 169438 - DNA, 636 bp, Artificial Sequence
  derived and/or modified sequence
atgatcagtcgtatggaaaagatgaccatgatgatgaaaatactgataatgtttgcccttggtatgaattattggagttgtagcggctttcccgtgtatgactacgacccctcaagcctccgagacgcattatcagccagtgtggtgaaggtgaactctcagtccctgtccccctacctcttccgtgccttccggagttcgcttaaacgggtcgaagttctcgatgaaaataatctggtaatgaatttggagttttccatccgcgaaaccacctgtcggaaagattcaggagaggaccccgccacatgcgccttccaacgggactactacgtctctacagccgtctgtcgttctaccgtaaaggtatcggcccagcaagtacaaggggttcatgcgcgctgttcctggtcctcttccacctcagaaagctattctagtgaggagatgatttttggagacatgttgggctctcacaagtggaggaataattacctttttggcctcataagtgacgaaagcattagcgaacagttttacgatcgtagcctgggtatcatgcgacgcgttctacctcctggaaacagaaggtatcctaatcatagacacagggccagaattaacaccgacttcgaatag

SEQ ID NO: 169439 - DNA, 1024 bp, Artificial Sequence
  derived and/or modified sequence
gccagtgtttgataaagacagctcctcttaggaagaactgtcatccccaaacacatagagagacactctctgtctctcgattacaatcatgatttccagaatggagaagatgacgatgatgatgaagatattgattatgtttgctcttggaatgaactactggtcttgctcaggtttcccagtgtacgactacgatccatcctccttaagggatgccctcagtgcctctgtggtaaaagtgaattcccagtcactgagtccgtatctgtttcgggcattcagaagctcattaaaaagagttgaggtcctagatgagaacaacttggtcatgaatttagagttcagcatccgggagactacatgcaggaaggattctggagaagatcccgctacatgtgccttccagagggactactatgtgtccacagctgtttgcagaagcaccgtgaaggtatctgcccagcaggtgcagggcgtgcatgctcgctgcagctggtcctcctccacgtctgagtcttacagcagcgaagagatgatttttggggacatgttgggatctcataaatggagaaacaattatctatttggtctcatttcagacgagtccataagtgaacaattttatgatcggtcacttgggatcatgagaagggtattgcctcctggaaacagaaggtacccaaaccaccggcacagagcaagaataaatactgactttgagtaacggccttgaggtgtccctcgcccttttggtttgttcaaggagctgctgctttgcatagctgctctagtgtctggtatcatcggatctggttttgaataattcccaggagtcctgggtccctggcctccaaagctggaatgtgaacgcatgccacggtggtctgaccctcacactccttttctcttaacagcaaaatgcaatggaaggaagaaaagttccaacaaagaatgattttgtgaattctgtgatttttcttctgatcagtttcaatctgtaataaatgccttatttttcctgtaa

SEQ ID NO: 169440 - DNA, 860 bp, Artificial Sequence
  derived and/or modified sequence
tgctgcagtcaaaataagcagccagtgtttgataaagacagctcctcttaggaagaactgtcatccccaaacacatagagagacactctctgtctctcgattacaatcatgatttccagaatggagaagatgacgatgatgatgaagatattgattatgtttgctcttggaatgaactactggtcttgctcaggtttcccagtgtacgactacgatccatcctccttaagggatgccctcagtgcctctgtggtaaaagtgaattcccagtcactgagtccgtatctgtttcgggcattcagaagctcattaaaaagagttgaggtcctagatgagaacaacttggtcatgaatttagagttcagcatccgggagactacatgcaggaaggattctggagaagatcccgctacatgtgccttccagagggactactatgtgtccacagctgtttgcagaagcaccgtgaaggtatctgcccagcaggtgcagggcgtgcatgctcgctgcagctggtcctcctccacgtctgagtcttacagcagcgaagagatgatttttggggacatgttgggatctcataaatggagaaacaattatctatttggtctcatttcagacgagtccataagtgaacaattttatgatcggtcacttgggatcatgagaagggtattgcctcctggaaacagaaggtacccaaaccaccggcacagagcaagaataaatactgactttgagtaacggccttgagcaaaatgcaatggaaggaagaaaagttccaacaaagaatgattttgtgaattctgtgatttttcttctgatcagtttcaatctgtaataaatgccttatttttcct

SEQ ID NO: 169441 - DNA, 636 bp, Artificial Sequence
  derived and/or modified sequence
atgatcagcagaatggagaagatgaccatgatgatgaagatcctgatcatgttcgccctgggcatgaactactggagctgcagcggcttccccgtgtacgactacgaccccagcagcctgagagacgccctgagcgccagcgtggtgaaggtgaacagccagagcctgagcccctacctgttcagagccttcagaagcagcctgaagagagtggaggtgctggacgagaacaacctggtgatgaacctggagttcagcatcagagagaccacctgcagaaaggacagcggcgaggaccccgccacctgcgccttccagagagactactacgtgagcaccgccgtgtgcagaagcaccgtgaaggtgagcgcccagcaggtgcagggcgtgcacgccagatgcagctggagcagcagcaccagcgagagctacagcagcgaggagatgatcttcggcgacatgctgggcagccacaagtggagaaacaactacctgttcggcctgatcagcgacgagagcatcagcgagcagttctacgacagaagcctgggcatcatgagaagagtgctgccccccggcaacagaagataccccaaccacagacacagagccagaatcaacaccgacttcgagtag

SEQ ID NO: 169442 - DNA, 450 bp, Artificial Sequence
  derived and/or modified sequence
atgaaggaagcgttgcatcaaatcgtggtgagatgcagcgagttggtcagtagtactagcctgccacgattgtccgtatcgcgtctccagggaccgcccgactctcagcctttgggtaccttgggtcagggaggatggaagctgctggggattgtcgggtctctggctccggaaacactaggggggctgggcactgagttcggcccctgcactcaccccttgcccttcgacatggtaagagagcgcgaacgagacgacgaactgaggcaaggctggcttctgcagtgtccacaatgcgctcgtacattgctgtgccattgcggaccgttcctgactccaccatctcagactagctcctccggttttcagttgtgcagcctgaaaccgtccgggtctctggtgacagcgacggaaccactgagcaacttcgctttcagctacttcccctag

SEQ ID NO: 169443 - DNA, 2805 bp, Artificial Sequence
  derived and/or modified sequence
atgagcagcaccctgagccccaccgacttcgacagcctggagatccagggccagtacagcgacatcaacaacagatgggacctgcccgacagcgactgggacaacgacagcagcagcgccagactgttcgagagaagcagaatcaaggccctggccgacgagagagaggccgtgcagaagaagaccttcaccaagtgggtgaacagccacctggccagagtgacctgcagagtgggcgacctgtacagcgacctgagagacggcagaaacctgctgagactgctggaggtgctgagcggcgagatcctgcccaagcccaccaagggcagaatgagaatccactgcctggagaacgtggacaaggccctgcagttcctgaaggagcagaaggtgcacctggagaacatgggcagccacgacatcgtggacggcaaccacagactgaccctgggcctggtgtggaccatcatcctgagattccagatccaggacatcagcgtggagaccgaggacaacaaggagaagaagagcgccaaggacgccctgctgctgtggtgccagatgaagaccgccggctaccccaacgtgaacgtgcacaacttcaccaccagctggagagacggcctggccttcaacgccatcgtgcacaagcacagacccgacctgctggacttcgagagcctgaagaagtgcaacgcccactacaacctgcagaacgccttcaacctggccgagaaggagctgggcctgaccaagctgctggaccccgaggacgtgaacgtggaccagcccgacgagaagagcatcatcacctacgtggccacctactaccactacttcagcaagatgaaggccctggccgtggagggcaagagaatcggcaaggtgctggaccacgccatggaggccgagagactggtggagaagtacgagagcctggccagcgagctgctgcagtggatcgagcagaccatcgtgaccctgaacgacagacagctggccaacagcctgagcggcgtgcagaaccagctgcagagcttcaacagctacagaaccgtggagaagccccccaagttcaccgagaagggcaacctggaggtgctgctgttcaccatccagagcaagctgagagccaacaaccagaaggtgtacacccccagagagggcagactgatcagcgacatcaacaaggcctgggagagactggagaaggccgagcacgagagagagctggccctgagaaccgagctgatcagacaggagaagctggagcagctggccgccagattcgacagaaaggccgccatgagagagacctggctgagcgagaaccagagactggtgagccaggacaacttcggcctggagctggccgccgtggaggccgccgtgagaaagcacgaggccatcgagaccgacatcgtggcctacagcggcagagtgcaggccgtggacgccgtggccgccgagctggccgccgagagataccacgacatcaagagaatcgccgccagacagcacaacgtggccagactgtgggacttcctgagacagatggtggccgccagaagagagagactgctgctgaacctggagctgcagaaggtgttccaggacctgctgtacctgatggactggatggaggagatgaagggcagactgcagagccaggacctgggcagacacctggccggcgtggaggacctgctgcagctgcacgagctggtggaggccgacatcgccgtgcaggccgagagagtgagagccgtgagcgccagcgccctgagattctgcaaccccggcaaggagtacagaccctgcgacccccagctggtgagcgagagagtggccaagctgaccgccctggaggagagagagaaggagagaaagagaaagagagaggaggaggagagaagaaagcagccccccgcccccgagcccaccgccagcgtgccccccggcgacctggtgggcggccagaccgccagcgacaccacctgggacggcacccagcccagacccccccccagcacccaggcccccagcgtgaacggcgtgtgcaccgacggcgagcccagccagcccctgctgggccagcagagactggagcacagcagcttccccgagggccccggccccggcagcggcgacgaggccaacggccccagaggcgagagacagaccagaaccagaggccccgcccccagcgccatgccccagagcagaagcaccgagagcgcccacgccgccaccctgccccccagaggccccgagcccagcgcccaggagcagatggagggcatgctgtgcagaaagcaggagatggaggccttcggcaagaaggccgccaacagaagctggcagaacgtgtactgcgtgctgagaagaggcagcctgggcttctacaaggacgccaaggccgccagcgccggcgtgccctaccacggcgaggtgcccgtgagcctggccagagcccagggcagcgtggccttcgactacagaaagagaaagcacgtgttcaagctgggcctgcaggacggcaaggagtacctgttccaggccaaggacgaggccgagatgagcagctggctgagagtggtgaacgccgccatcgccaccgccagcagcgccagcggcgagcccgaggagcccgtggtgcccagcaccaccagaggcatgaccagagccatgaccatgccccccgtgagccccgtgggcgccgagggccccgtggtgctgagaagcaaggacggcagagagagagagagagagaagagattcagcttcttcaagaagaacaagtag

SEQ ID NO: 169444 - DNA, 354 bp, Artificial Sequence
  derived and/or modified sequence
atgagcagcaccctgagccccaccgacttcgacagcctggagatccagggccagtacagcgacatcaacaacagatgggacctgcccgacagcgactgggacaacgacagcagcagcgccagactgttcgagagaagcagaatcaaggccctggccgacgagagagaggccgtgcagaagaagaccttcaccaagtgggtgaacagccacctggccagagtgacctgcagagtgggcgacctgtacagcgacctgagagacggcagaaacctgctgagactgctggaggtgctgagcggcgagatcctgcccaagcccaccaagggcagaatgagaatccactgcctggagtag

SEQ ID NO: 169445 - DNA, 2805 bp, Artificial Sequence
  derived and/or modified sequence
atgtcgtccacgcttagcccgacggattttgatagccttgagatccagggacagtattcagacataaacaaccgatgggacttgccggacagtgattgggataacgattcttcctctgctcgcctatttgagcgctcgaggatcaaagcactcgccgatgagcgagaagccgtgcagaaaaaaacattcactaaatgggtgaacagccatcttgcacgagtgacttgccgggttggtgatctttactctgatctccgggatgggaggaatctcctccgcctgctggaagtattgagtggcgaaatcctgccgaagcctaccaagggccgcatgcggatacactgtctggagaatgttgacaaagccctgcagtttctgaaggaacagaaggttcacctcgagaatatggggtcccatgacattgtagacggtaaccaccgtttgaccctgggactagtatggactatcattctgcgcttccaaattcaggacatctccgtggaaacggaggataacaaggaaaaaaagtccgctaaggacgcactgctgttgtggtgtcagatgaagacagctggatatccaaacgttaacgtccataattttactacctcttggcgggacggcctcgcttttaacgcgatagtgcataagcaccgccccgatctcttagactttgaatccctgaagaagtgcaatgctcattataacctccagaacgccttcaatctggccgaaaaggaactgggcctgacaaaactcctggatccagaagatgtgaacgtcgaccaaccggatgaaaaaagtataattacatacgttgcaacatactatcactacttctcgaagatgaaagcgttggccgtggaggggaagaggattggcaaggtgttagaccacgccatggaggccgaacggctggtagagaagtatgaaagcttagcctccgaactgcttcagtggattgaacagactattgttaccctcaacgaccgccagctggccaattcgctgtcaggagttcagaatcagctccagagctttaattcttatcgcacggtagagaagccccctaaattcaccgaaaagggaaacctcgaggttctgctgttcactattcaatctaagctgagggcaaacaaccagaaagtgtacactcccagggaggggaggcttattagcgacatcaataaagcatgggagcgactggagaaggctgagcacgaaagagaactcgccctacggacagaacttatccggcaagagaagttggagcagctggcagcccggtttgaccgtaaggccgctatgagagagacatggttgtctgaaaaccagaggctagtgtctcaagataacttcgggttggagttggccgccgtcgaggctgccgtgaggaaacatgaagcgattgagactgacatcgtggcatactccgggcgcgtgcaagccgtggatgcagtggccgccgagttagctgccgaaagatatcatgatatcaagcgcatagcagcgagacagcataacgtggccagactctgggactttctgcggcagatggtggccgccaggcgggagaggctgcttctgaacctcgaattgcagaaagtgttccaggatctgctgtacctgatggactggatggaggaaatgaagggaagactccagagtcaagacttgggcaggcatctggccggagtggaggacttactccaactgcacgaacttgttgaagcagatatcgctgtgcaggctgagcgagtgagggctgtctctgccagtgctctgagattttgcaacccaggcaaggagtacaggccctgcgacccgcagctggtgagcgagagagtggctaagcttacagcactcgaagagagggagaaagagaggaaacgaaagagggaggaggaggagcgacgtaagcagcctccagcccccgaaccgaccgcctctgtgccgccaggcgatctggtgggtggacagacggctagcgacaccacatgggatggcacacagcctcgcccccccccttcgacacaggcgccatcggttaacggagtttgcacggatggagagccaagccagcctctgttagggcagcaacgcttagaacatagcagcttccctgagggccctggccccggtagtggcgatgaggccaacggcccgcggggcgagcgtcagactaggactagaggacctgctccttccgctatgccccaaagtcgctcaaccgaatccgcacatgccgccacattgccacctcggggacccgaaccaagcgctcaagaacaaatggaaggcatgctgtgtagaaagcaggaaatggaagcttttggtaagaaagctgccaatagaagctggcagaacgtttattgcgtgctcaggcggggttccctgggattttacaaggatgcaaaagcggcaagcgccggagtcccgtaccacggcgaggtgccagtttcactggcccgggcgcaggggagcgtggcgttcgactatagaaagcgtaagcatgtttttaagctaggactccaggatgggaaggagtacttattccaagccaaggacgaggccgagatgtcctcttggctgagggtggtgaacgccgcgattgccaccgcttccagcgcctcaggggagcctgaggagccagttgtcccatctaccaccagagggatgacaagagccatgactatgcctcctgtgagccccgttggagctgaagggccggtggtcttgcgctccaaggatggccgcgagcgggagcgggagaaacggttctctttctttaagaaaaacaagtag

SEQ ID NO: 169446 - DNA, 354 bp, Artificial Sequence
  derived and/or modified sequence
atgtcttccaccctgtccccgacagactttgatagtctagaaatccaaggccagtatagcgacatcaataaccgttgggatctccccgactcagattgggacaacgatagttcgagtgctcgtctgttcgagcgctctcggattaaagccctggcagatgagagggaggctgtgcagaagaagaccttcaccaaatgggtcaattcccatttggccagggtgacttgccgcgtgggtgacctgtactccgacctgagggacgggcggaatctgctgcgactgctggaagtgctgtccggagaaatactgcctaaaccgacaaaaggtagaatgcgaattcattgtctggagtag

SEQ ID NO: 169447 - DNA, 2805 bp, Artificial Sequence
  derived and/or modified sequence
atgagcagcaccctgagccccacagactttgacagcctggagatccagggccagtacagcgacatcaacaaccgctgggacctgcctgacagcgactgggacaatgacagcagcagcgcccggctgtttgagaggagccgcatcaaggccctggctgatgagcgggaggccgtgcagaagaagaccttcaccaagtgggtgaacagccacctggcccgggtgacctgccgggtgggggacctgtacagcgacctgagagatggaagaaacctgctgcggctgctggaggtgctgtctggagagatcctgcccaagcccaccaagggccgcatgaggatccactgcctggagaatgtggacaaggccctgcagttcctgaaggagcagaaggtgcacctggagaacatgggcagccatgacatcgtggatggcaaccaccggctgaccctgggcctggtgtggaccatcatcctgcgcttccagatccaggacatctctgtggagacagaggacaacaaggagaagaagagcgccaaggatgccctgctgctgtggtgccagatgaagacagctggctacccaaatgtgaatgtgcacaacttcaccacctcctggagagatggcctggccttcaatgccatcgtgcacaagcacaggccagacctgctggactttgagagcctgaagaagtgcaatgcccactacaacctgcagaatgccttcaacctggccgagaaggagctgggcctgaccaagctgctggaccctgaagatgtgaatgtggaccagccagatgagaagagcatcatcacctacgtggccacctactaccactacttcagcaagatgaaggccctggccgtggagggcaagagaattggcaaggtgctggaccacgccatggaggccgagcggctggtggagaagtatgagagcctggccagcgagctgctgcagtggattgagcagaccatcgtgaccctgaatgaccggcagctggccaacagcctgagcggcgtgcagaaccagctgcagagcttcaacagctacagaacagtggagaagccacccaagttcacagagaagggcaacctggaggtgctgctcttcaccatccagagcaagctgcgggccaacaaccagaaggtgtacaccccccgggagggccgcctcatcagtgacatcaacaaggcctgggagcggctggagaaggccgagcacgagcgggagctggccctgaggacagagctgatccggcaggagaagctggagcagctggccgccaggtttgacaggaaggccgccatgagggagacctggctgtctgagaaccagaggctggtgtcccaggacaactttggcctggagctggccgctgtggaggccgctgtgaggaagcatgaggccatcgagacagacatcgtggcctacagcggccgggtgcaggccgtggatgctgtggccgctgagctggccgctgagcgctaccatgacatcaagagaattgctgcccggcagcacaacgtggcccggctgtgggacttcctgcggcagatggtggccgcccggcgggagcggctgctgctgaacctggagctgcagaaggtgttccaggacctgctgtacctgatggactggatggaggagatgaagggccgcctgcagagccaggacctgggccgccacctggccggcgtggaggacctgctgcagctgcacgagctggtggaggccgacattgctgtgcaggccgagcgggtgcgggctgtgtctgccagcgccctgcgcttctgcaaccctgggaaggagtaccggccctgtgacccccagctggtgtctgagcgggtggccaagctgacagccctggaggagcgggagaaggagaggaagaggaagcgggaggaggaggagaggaggaagcagcccccagcccctgagcccacagcctctgtgcccccaggggacctggtgggcggccagacagccagtgacaccacctgggatggcacccagccccggcccccacccagcacccaggcccccagcgtgaatggagtgtgcacagatggagagcccagccagcccctgctgggccagcagaggctggagcacagcagcttccctgagggccctggccctggcagcggagatgaggccaacggccccagaggagagcggcagaccaggacccggggccctgcccccagcgccatgccccagagccgcagcacagagagcgcccatgctgccaccctgcccccccggggccctgagcccagcgcccaggagcagatggagggcatgctgtgcaggaagcaggagatggaggccttcggcaagaaggccgccaacagatcctggcagaatgtgtactgtgtgctgcggcggggcagcctgggcttctacaaggatgccaaggccgccagcgctggggtgccctaccatggagaggtgcctgtgtccctggcccgggcccagggctctgtggcctttgactacaggaagaggaagcacgtgttcaagctgggcctgcaggacggcaaggagtacctgttccaggccaaggatgaggccgagatgagctcctggctgcgggtggtgaatgctgccatcgccacagccagcagcgccagcggggagcctgaggagcctgtggtgcccagcaccacccggggcatgacccgggccatgaccatgcctcctgtgtcccctgtgggcgctgagggccctgtggtgctgcggagcaaggatggccgggagcgggagcgggagaagcgcttctccttcttcaagaagaacaagtag

SEQ ID NO: 169448 - DNA, 354 bp, Artificial Sequence
  derived and/or modified sequence
atgagcagcaccctgagccccacagactttgacagcctggagatccagggccagtacagcgacatcaacaaccgctgggacctgcctgacagcgactgggacaatgacagcagcagcgcccggctgtttgagaggagccgcatcaaggccctggctgatgagcgggaggccgtgcagaagaagaccttcaccaagtgggtgaacagccacctggcccgggtgacctgccgggtgggggacctgtacagcgacctgagagatggaagaaacctgctgcggctgctggaggtgctgtctggagagatcctgcccaagcccaccaagggccgcatgaggatccactgcctggagtag

SEQ ID NO: 169449 - DNA, 2805 bp, Artificial Sequence
  derived and/or modified sequence
atgagcagcaccctgagccccaccgacttcgacagcctggagatccagggccagtactctgatattaataatcgttgggacttgcctgatagtgattgggataatgacagcagctccgccagattgttcgaaagatccagaattaaggcacttgccgatgaacgcgaggccgtacagaaaaagactttcaccaagtgggtgaactcacaccttgcgcgagttacttgcagagtgggagacctctattcagatctgagagacggacgaaacctgctccgtctcttggaagtgctgagtggcgaaattctccctaagcccacaaaggggcggatgagaatccactgcctagagaacgtggacaaggccctgcagttcctcaaggaacagaaggtgcatttggaaaacatgggttcccacgatatcgtggatgggaaccaccggctcaccctgggcttggtttggacaatcatcttgcggttccagattcaggatatctctgtagagacggaggacaacaaggagaaaaagtccgctaaggatgctcttctgttatggtgccaaatgaagaccgccggataccccaacgtgaacgtacacaattttacaacctcctggagagacgggttagctttcaacgcaattgttcataaacaccgcccagaccttcttgacttcgaaagtctgaagaagtgcaacgcccactacaatctccagaacgcgttcaacctggcggagaaggaactggggctgactaaacttctggaccccgaggatgttaatgtggatcagcccgatgagaagtctattatcacttatgtcgcaacatattaccactattttagtaaaatgaaggctctcgccgttgagggcaaacgcatagggaaagtgctggaccacgccatggaggccgagcgcctcgtcgagaaatatgaatcactcgctagtgagctgctccagtggatcgagcaaacaatagtaacactgaacgataggcaattggctaactcactgagtggagtgcaaaaccagttacagagcttcaactcttaccgcaccgttgagaagccccccaagttcaccgagaaaggtaacctggaggttctgctcttcaccattcagagcaaactgagggccaataatcagaaagtgtatacgccaagggaggggagactgatttctgacattaacaaggcctgggagcgtctggagaaagctgaacacgaacgcgaattagccctcaggactgagctgattaggcaggagaagctggaacaactggccgcccgctttgaccgaaaggccgcaatgcgtgaaacttggctgtccgagaatcagcggctcgtcagccaggacaactttggactcgaattggcagctgtagaagctgccgttaggaagcatgaggctatcgaaacagatatcgtggcctactcaggcagggtgcaggctgtcgatgcggtggccgcagaactcgccgcagaaaggtaccacgatattaagcgcatcgcagcccgccaacataatgtggctcgactgtgggatttcctgcggcagatggtagctgcacgcagggagaggttgctcctgaacctcgagcttcaaaaggtgttccaagatctactgtatctcatggactggatggaggagatgaagggaagattgcagtctcaggacctggggcgccacttagccggggtggaagacctgctgcagctccacgagctggtagaagccgatatcgcagtacaggcggagcgggtgcgtgccgtgagcgcatccgcccttcggttctgtaacccaggtaaggagtatcggccatgcgatcctcaacttgtgtcagagcgcgttgctaaattgacagcgttggaagaaagggaaaaggaaagaaagcgcaaaagggaggaggaggagagaagaaaacagccccctgccccggagccaacggccagcgtgccccctggtgatctggtgggcggccagactgcctcggacaccacatgggatggaacccagccgcgccccccaccttccacccaggccccttccgttaacggggtgtgcacagatggtgagccgagccagccactgctgggccagcagcggctggagcactccagctttcccgaggggcctggacctggttccggggacgaggccaacggcccgagaggcgaaagacaaactcgcacacggggaccggcacccagcgcgatgcctcaatcgaggtcaacagaatctgcccatgcagctacattaccgccccgtggacctgagccctccgctcaggagcaaatggaaggtatgctttgtcggaagcaagagatggaggcattcggcaagaaagctgccaaccggagttggcaaaacgtctattgcgtgctgcggagaggctctctgggtttctacaaagacgctaaggccgcaagcgctggagtgccttatcacggagaggtgccggtatcccttgccagagcccaagggtctgtcgcattcgactataggaaaagaaagcatgtattcaagttgggcctgcaggatggaaaagagtatttgtttcaagccaaagatgaggccgagatgagtagttggctccgggtggttaacgcagctatcgcaacagcctcttccgcttcaggtgagccggaggagcctgtagtgcccagcactaccagagggatgactagggctatgacgatgcccccagtgtcccccgtcggcgctgaaggtcccgtggtgctgcgctccaaggatggccgtgaaagggagagggaaaaacggtttagttttttcaaaaaaaacaaatag

SEQ ID NO: 169450 - DNA, 354 bp, Artificial Sequence
  derived and/or modified sequence
atgagcagcaccctgagccccaccgacttcgacagcctggagatccaggggcagtacagcgacatcaacaataggtgggacttaccagactctgattgggacaatgactccagttctgctcgtctttttgagcgctcacgaattaaagcactcgccgatgaacgcgaagccgtacaaaaaaagaccttcactaaatgggtgaattcacatttagctcgtgtgacctgcagggttggggacctgtactcagacctgagggatggaaggaacctgctgcgtcttctggaggtgttatccggtgagatcctgccaaaaccaacaaagggtaggatgcggattcactgcttggaatag

SEQ ID NO: 169451 - DNA, 2805 bp, Artificial Sequence
  derived and/or modified sequence
atgtcctctactctcagccccacagattttgactccctagaaattcagggccaatactctgacatcaataaccggtgggatctccccgactccgactgggataatgactcatcttctgccagactgttcgaaagatctaggattaaggcactggctgatgaacgggaggccgtccaaaagaagacatttacaaagtgggttaactcacacctcgcacgcgttacctgccgggtgggcgatctatatagtgaccttagagacggacgtaatctactcaggcttctggaggtgttgagtggagaaatcctgcctaagccaaccaaaggccgtatgcgcatccattgtctggaaaatgtcgataaggctctgcagttcctgaaggagcagaaggtgcacctggaaaacatgggctctcacgacatcgtcgacgggaatcatcggttaactctgggcctggtgtggacaatcattctccgattccaaatacaagacatatcagtagagacggaggataacaaagaaaaaaaatctgctaaggacgcgttactgctctggtgtcagatgaaaactgcaggctatcccaatgttaacgtgcacaacttcactacctcctggcgggatgggctcgccttcaacgcaatcgtgcacaagcatcgtcctgatctcttggactttgagagtctgaagaagtgcaatgcacactataatctgcaaaacgccttcaatttggccgagaaggagctcggcctgaccaaactgctggaccctgaggatgtcaacgttgatcagccggacgagaaatccatcatcacatacgttgcgacatactaccactatttttcaaaaatgaaagccctcgccgtggagggaaagaggattgggaaagtgttagaccacgcaatggaagctgagcgcctggtagaaaagtatgagtccctcgcatccgaactgctgcagtggatcgagcagaccattgtaaccctgaacgatcgccagttggctaactccctttccggcgtgcagaatcaactgcaatcctttaattcttataggacagtggaaaaaccccctaaatttacggagaagggtaatctggaggtgctcctgttcacaatacaatccaagctgagggcaaataatcaaaaggtgtatacgccccgtgagggcagactgatctccgacatcaacaaggcatgggagcggctggaaaaggctgagcacgaacgcgagttggccttacgcaccgagcttatccgccaggagaaactggagcagctcgccgcacgctttgatagaaaggctgcgatgcgcgaaacctggctgagcgaaaaccaaagactggtgtctcaagataattttggactggagcttgccgcagtggaagcagctgtaaggaagcatgaagctatcgagacggacattgtggcttactcagggcgagtgcaagcggttgatgcagtggccgcagagctggcagcagaacgttaccatgacatcaagcgaatcgctgcccgacaacataacgtggctcgcctgtgggacttcctcagacagatggttgccgctagacgggagaggcttctattaaatctcgagctgcagaaagtcttccaagatctgctttatctaatggattggatggaagagatgaagggacgccttcagtcacaggatctcggccgtcatttagccggagtagaagacctactccaactgcacgagctggtggaggcagacatcgccgtgcaggcagaaagagtgagagcagtcagtgcctctgcactccgcttctgtaaccccggtaaggagtacagaccatgcgatccccagctggtttctgagcgcgttgctaaactgaccgcactcgaggagcgagagaaggaacgcaaacgcaagagggaagaggaggaacgtcgtaagcagccccctgctccagagcctaccgctagtgtgcctccaggggatctggtgggagggcagacagccagtgacactacgtgggacggcacccagccgagaccgcctccgagcacgcaggcaccctcagttaatggagtgtgtaccgatggtgaaccctcacagccactgctaggtcagcagagactagaacactcttccttccctgagggaccaggccctggatctggtgatgaagccaatgggcctcggggagagcgccagacaaggacccggggacccgctccaagtgccatgccgcagtcaagaagcaccgaatcagctcacgctgctaccttaccacccaggggcccagaaccttccgcacaggagcagatggaaggaatgctctgccgcaagcaggagatggaagccttcgggaagaaggccgctaacaggtcgtggcagaacgtctactgcgtgctgaggcgcggaagcctcggattctacaaagatgccaaagcagccagtgcgggagtgccttatcacggtgaggtccctgtgtcgctcgcgagggcacagggctccgtggcctttgattacaggaaaagaaagcacgtctttaaactgggcctgcaggatggaaaagagtacctatttcaggcaaaggatgaagccgagatgagttcttggctgcgtgtggtcaacgcggctattgccaccgcttctagcgcgtctggagagcccgaggaaccggtcgtgccctcgacaacccgcggaatgacccgggcaatgacaatgccaccagtgtcacctgtgggcgcagagggtccagtggtcttacggtcaaaagacggcagagaacgcgaacgagaaaaacgattctcattctttaaaaagaataagtag

SEQ ID NO: 169452 - DNA, 354 bp, Artificial Sequence
  derived and/or modified sequence
atgagctctactctcagccctacagattttgattctctggaaatccaggggcagtacagtgacatcaacaataggtgggatcttccagatagcgattgggataacgacagctcatctgctcgactttttgagcgttcccgcatcaaagcgctggccgatgaaagagaagcagttcagaaaaagacattcacaaaatgggtgaactcccaccttgctcgtgtgacgtgtagggtcggcgacctttacagcgatctccgggacggacgcaatctgctaagattactcgaagtgctcagcggggagatactgccaaagcccaccaagggaaggatgcgtatacattgtctggagtag

SEQ ID NO: 169453 - DNA, 2890 bp, Artificial Sequence
  derived and/or modified sequence
cacaaggagagcggagcacaggagcaggaagccgcctaccaccatgagcagcacgctgtcacccacagactttgacagcttggaaatccagggccagtacagtgacatcaacaaccgctgggaccttcctgactcggactgggacaatgacagcagctcggcccgcctctttgagaggtctcgcattaaggctctggcagatgaacgagaagctgtgcagaagaaaaccttcaccaagtgggtaaactcgcacctggcccgggtcacgtgccgggtgggggacctgtacagcgacctccgggacggacgcaacctgctgaggctcctcgaggtgctctcgggagagatactgccaaagcctacaaagggccgcatgcggatccactgcctggagaacgtggacaaggcactgcagttcctcaaggagcagaaagtgcacttggaaaacatgggctcccatgacattgtggacggaaaccaccgactgacccttgggctggtctggaccatcatccttcgattccagatccaagacatcagtgtggagacagaagacaacaaggagaagaagtcagccaaggatgccctgcttctgtggtgccagatgaagactgcaggttatcccaacgtcaatgtacacaacttcaccaccagctggagagatggactagctttcaacgccatcgtgcataaacaccggccagacctgctggattttgagtctctgaagaagtgtaatgcacactataatctgcagaatgcattcaatctggctgaaaaggaactgggacttaccaagctgctggatcccgaagacgtgaatgtggaccagccagatgagaagtcaatcattacctatgtggctacttactaccattacttctccaagatgaaggccctggccgtggaaggcaagagaattggcaaggtgctggaccatgccatggaggcagagcgcctggtggagaaatacgagtccctggcctcggagctgctgcagtggatcgagcaaacgatcgtgaccctcaatgaccggcagttggccaactcccttagcggggtccagaaccagctgcagtccttcaactcctaccgcaccgtggagaagccgcccaagtttaccgagaaagggaacttggaagtgctgctcttcaccatccagagcaagcttcgggccaacaaccagaaggtctacacgccccgcgagggccggctcatctcggacatcaacaaggcttgggagcggctggagaaggcggagcacgagcgtgagctggccctgcgcaccgagctcatccgccaggagaagctggagcagctggccgcccgcttcgaccgcaaggctgccatgcgggagacctggctcagcgagaaccagcgcctcgtgtcccaggacaactttgggctggagctggcagctgtcgaggcagcagtacggaagcacgaagccattgagacggacatcgtggcctacagcggccgggtgcaggcagtggacgccgtggctgcagagctggccgccgagcgctaccacgacatcaagcgcatcgccgctcggcagcacaacgtggcacggctctgggacttcttgcggcagatggtggccgcccggcgggagcggctcctcctcaacctggagctgcagaaggtgttccaggacctgctctacctcatggactggatggaagagatgaagggccggctgcagtctcaggacctgggcaggcacctagcaggagtggaggacctgctgcagctgcacgagctggtggaggcagacatcgccgtgcaggccgagagggtgcgggccgtcagcgcctctgccctgcgcttctgcaacccagggaaagagtatagaccttgcgacccgcagctggtgtcggagcgggtggccaagcttactgcgctagaggagcgggagaaggagcgaaagagaaagagggaggaggaggagcggcggaaacagccgcctgctcccgaacccacagccagtgtgcctccaggggacctggtgggcggccagacagcttctgacaccacctgggacggaacccagccacggccaccaccatccacacaagcacccagtgttaatggagtctgcacagatggagagccctcacagcccctgctgggacaacagagacttgagcacagcagcttccccgaagggccgggacctggctcaggggacgaagccaatgggccccggggagagaggcagacccggactcggggcccggccccatctgcaatgccccagagcaggtctaccgagtcagcccatgctgccaccctgccgcctcgaggcccagagccatctgcccaggagcagatggaggggatgctgtgccgcaagcaggagatggaggccttcgggaagaaggctgccaacaggtcctggcagaacgtgtactgtgtcctgcggcgtgggagcctcggcttttacaaggatgccaaggcagccagcgcgggagtgccataccacggagaagtgcctgtcagcctggccagggcccagggcagcgtcgcctttgattaccgaaagcgcaaacatgtcttcaagctgggcttacaggatggaaaagaatatttattccaggccaaggatgaggcagagatgagctcgtggctacgggtggtgaatgcagccattgccacagcgtcttctgcctctggagagcctgaagagccggtggtgcccagcaccacccggggcatgacccgggccatgaccatgcccccagtgtcacccgtcggggctgaggggcctgttgtgctccgcagcaaagacggcagagaacgagagcgagaaaaacgcttcagcttctttaagaagaacaagtagttgggggcaaggtcccaggccaactccctccctccgttcagg

SEQ ID NO: 169454 - DNA, 859 bp, Artificial Sequence
  derived and/or modified sequence
tgatttgggcataattccttcctctcctaagcaggcagcagttcaccttggttaaggaccttggaccttagaccactcagacgctaacaaaccaaggagaaacccagccgtgtcaggcctagaaatgtctgcccccacccccacccccctcaagacggtgactaggccggaattctcctggttgataaatgagaggagctgagaagcgctgagatgcctgtttggagcatctgatctgtagaagacgaatcttcactgtgccatggagatgttctgggagggagagccggcccagctgcctgaaggaggacgcgagagcgaggggacgggtgagaggaatgcttagcggagacggactggaggtgcccggagaggaaaggggaacggaggctggatctcgggaaacctcgtcggcagtgtcattagaggaaggatcgcgtgtctcggggatacggattttggaggaaaagcagaatagggacaaaggagcaggaagccgcctaccaccatgagcagcacgctgtcacccacagactttgacagcttggaaatccagggccagtacagtgacatcaacaaccgctgggaccttcctgactcggactgggacaatgacagcagctcggcccgcctctttgagaggtctcgcattaaggctctggcagatgaacgagaagctgtgcagaagaaaaccttcaccaagtgggtaaactcgcacctggcccgggtcacgtgccgggtgggggacctgtacagcgacctccgggacggacgcaacctgctgaggctcctcgaggtgctctcgggagagatactgccaaagcctacaaagggccgcatgcggatccactgcctggag

SEQ ID NO: 169455 - protein, 671 aa, Artificial Sequence
  derived and/or modified sequence
MASGGSGGVSVPALWSEVNRYGQNGDFTRALKTVNKILQINKDDVTALHCKVVCLIQNGSFKEALNVINTHTKVLANNSLSFEKAYCEYRLNRIENALKTIESANQQTDKLKELYGQVLYRLERYDECLAVYRDLVRNSQDDYDEERKTNLSAVVAAQSNWEKVVPENLGLQEGTHELCYNTACALIGQGQLNQAMKILQKAEDLCRRSLSEDTDGTEEDPQAELAIIHGQMAYILQLQGRTEEALQLYNQIIKLKPTDVGLLAVIANNIITINKDQNVFDSKKKVKLTNAEGVEFKLSKKQLQAIEFNKALLAMYTNQAEQCRKISASLQSQSPEHLLPVLIQAAQLCREKQHTKAIELLQEFSDQHPENAAEIKLTMAQLKISQGNISKACLILRSIEELKHKPGMVSALVTMYSHEEDIDSAIEVFTQAIQWYQNHQPKSPAHLSLIREAANFKLKYGRKKEAISDLQQLWKQNPKDIHTLAQLISAYSLVDPEKAKALSKHLPSSDSMSLKVDVEALENSAGATYIRKKGGKVTGDSQPKEQGQGDLKKKKKKKKGKLPKNYDPKVTPDPERWLPMRERSYYRGRKKGKKKDQIGKGTQGATAGASSELDASKTVSSPPTSPRPGSAATVSASTSNIIPPRHQKPAGAPATKKKQQQKKKKGGKGGW

SEQ ID NO: 169456 - DNA, 2016 bp, Artificial Sequence
  derived and/or modified sequence
atggccagcggaggctctggcggcgtgagcgttccagcattgtggagcgaggttaatagatacggccaaaacggtgatttcacacgggcgctcaagaccgtgaacaagatcctacagatcaataaagacgatgtgacagccctgcattgcaaggttgtttgcctgatccagaacgggagcttcaaagaggccctgaatgtgatcaacacccacaccaaggtcctggctaataacagtttatcattcgagaaggcgtattgtgagtaccgactgaatagaattgagaacgcactgaaaactatcgagtccgccaaccagcagactgacaaacttaaagaactgtacggccaagtgctctacaggctggaacgatatgatgagtgtctggctgtataccgcgatctcgtgcgcaatagccaagacgattatgacgaagagaggaagacgaatttgtctgcggtggtcgcggctcagagcaattgggaaaaagtggtccctgaaaatctgggcttacaggagggtacccatgagttgtgctataacacggcatgtgccctgatagggcaagggcaacttaaccaggccatgaagatactccagaaggcagaagatctgtgtcgcaggtctctgagcgaggacacagacggaactgaggaggatccacaggcagaacttgccattattcacggccagatggcctacattctccagctgcaaggcaggacagaagaggcactgcagttatataatcagatcattaagctgaaacctaccgacgttggactgctcgccgttatcgctaataatataatcaccattaacaaggaccagaacgtgttcgatagcaagaagaaagtaaagcttaccaatgctgaaggggtggaattcaaactgtctaagaagcagttgcaggccatcgaattcaacaaggccttgctggcaatgtacaccaaccaggcagaacaatgcagaaagatttccgcatctctgcaatctcagagccctgagcacttgcttccagttttgatccaggccgcccagttatgccgggaaaaacagcatactaaggctatcgagctcctacaggaattttccgaccagcatcctgagaatgccgctgagataaaactgaccatggcccagctgaaaattagccaagggaatatctctaaagcgtgtctcatcctgaggtctatcgaggaactgaagcataagccagggatggttagcgctctggtcaccatgtatagtcacgaggaggatattgatagcgcaattgaggtattcacgcaggccatccagtggtaccagaaccatcagcctaagagtcctgcgcacctgagcctgattcgtgaagccgccaacttcaagcttaaatacggacgaaaaaaagaagctatatctgacctgcagcaactctggaaacagaatcctaaagacattcacactctcgcgcaactaatttccgcctattcattggtggatccggaaaaggccaaagctctgagcaaacacttgccctcatctgatagtatgtccctgaaagttgacgtagaggccctcgagaactctgctggcgctacctacatccgaaaaaagggcggtaaggttactggcgattctcagccaaaggaacagggacagggggacctaaagaagaaaaagaagaaaaagaaaggcaagctgcccaagaattacgaccccaaagtgacccccgatcccgaacgctggctgccaatgcgtgagaggtcttactacagagggagaaaaaaaggaaaaaagaaagaccagattggaaaaggaacgcagggcgctacagcgggcgcatcctccgaactggatgccagtaaaactgtgtcgagtccgcctacgtctcccagacctggtagcgcggcaaccgtgagcgccagtaccagtaacatcatcccaccacggcatcaaaagcccgcgggagcccccgccactaagaaaaaacagcagcagaaaaaaaagaagggcgggaaaggcggttggtag

SEQ ID NO: 169457 - DNA, 2016 bp, Artificial Sequence
  derived and/or modified sequence
atggccagcggcggcagcggcggcgtgtctgtgcctgccctgtggagcgaggtgaacagatatggccagaatggagacttcacccgggccctgaagacagtgaacaagatcctgcagatcaacaaggatgatgtgacagccctgcactgcaaggtggtgtgcctgatccagaatggcagcttcaaggaggccctgaatgtcatcaacacccacaccaaggtgctggccaacaacagcctgagctttgagaaggcctactgtgagtaccgcctgaacagaattgaaaatgccctgaagaccattgaaagtgccaaccagcagacagacaagctgaaggagctgtatggccaggtgctgtaccgcctggagagatatgatgaatgtctggccgtgtacagagacctggtgaggaacagccaggatgattatgatgaggagaggaagaccaacctgtctgctgtggtggccgcccagagcaactgggagaaggtggtgcctgagaacctgggcctgcaggagggcacccatgagctgtgctacaacacagcctgtgccctgattggccagggccagctgaaccaggccatgaagatcctgcagaaggccgaggacctgtgcagaagaagcctgtctgaggacacagatggaacagaggaggacccccaggccgagctggccatcatccacggccagatggcctacatcctgcagctgcagggccgcacagaggaggccctgcagctgtacaaccagatcatcaagctgaagcccacagatgtgggcctgctggccgtcatcgccaacaacatcatcaccatcaacaaggaccagaatgtgtttgacagcaagaagaaggtgaagctgaccaatgctgagggcgtggagttcaagctgagcaagaagcagctgcaggccatcgagttcaacaaggccctgctggccatgtacaccaaccaggccgagcagtgcaggaagatcagcgccagcctgcagagccagagccctgagcacctgctgcctgtgctgatccaggccgcccagctgtgccgggagaagcagcacaccaaggccatcgagctgctgcaggagttcagtgaccagcacccagaaaatgctgctgagatcaagctgaccatggcccagctgaagatcagccagggcaacatcagcaaggcctgcctgatcctgcggagcattgaggagctgaagcacaagccaggcatggtgtctgccctggtgaccatgtacagccatgaggaggacatcgacagcgccatcgaggtgttcacccaggccatccagtggtaccagaaccaccagcccaagagccctgcccacctgagcctcatccgggaggccgccaacttcaagctgaagtatggcaggaagaaggaggccatcagtgacctgcagcagctgtggaagcagaaccccaaggacatccacaccctggcccagctgatcagcgcctacagcctggtggaccctgagaaggccaaggccctgagcaagcacctgcccagcagtgacagcatgagcctgaaggtggatgtggaggccctggagaacagcgctggggccacctacatcaggaagaagggcggcaaggtgactggagacagccagcccaaggagcagggccagggcgacctgaagaagaagaagaagaagaagaagggcaagctgcccaagaactatgaccccaaggtgaccccagaccctgagcgctggctgcccatgagggagaggagctactaccggggcaggaagaagggcaagaagaaggaccagatcggcaagggcacccagggcgccacagctggggccagcagcgagctggatgccagcaagacagtgagcagcccccccaccagcccccggcccggcagcgctgccaccgtgtctgccagcaccagcaacatcatccccccaagacaccagaagccagctggggccccagccaccaagaagaagcagcagcagaagaagaagaagggcggcaagggcggctggtag

SEQ ID NO: 169458 - DNA, 2016 bp, Artificial Sequence
  derived and/or modified sequence
atggccagcggcggcagcggcggcgtgagcgtgcccgccctgtggtccgaggtaaatagatatggtcagaatggcgacttcacacgcgctttaaagactgtgaataagattctgcagatcaacaaggacgacgtcaccgccctgcactgcaaagtcgtctgtctgatccagaatggttccttcaaggaagcgctgaacgtcataaatacacacactaaagtgttggccaataactcactgtcttttgaaaaggcctactgtgagtacagactgaatcgtattgaaaacgcactgaagactattgagagcgccaaccagcagacagacaagctcaaggaactctacggtcaggttctgtaccgcctggaacgatacgatgagtgcctggccgtttaccgggatttggtcagaaattcccaggatgattatgacgaggaaagaaaaacaaacttatcagccgtcgtagctgcccagtccaattgggaaaaggtcgtcccggaaaatctgggactgcaggaaggaacccacgaactttgttacaacaccgcatgcgcccttataggacaaggacagctgaatcaggcaatgaagatcttacaaaaggccgaagacctctgtcgcaggagtctttctgaagatactgatggcaccgaagaggacccacaggccgagctggcgatcattcatgggcagatggcgtatatccttcagcttcaggggcgcaccgaggaagctctgcagctttataaccagatcattaagctcaagcccacagacgtggggctgttagcggtgatagctaacaatattattacaataaataaagatcaaaacgtatttgactccaaaaagaaagtcaaactcaccaatgcagaaggcgtggaattcaaactgagtaagaagcaactccaggcaatcgaatttaacaaggcccttctcgccatgtatacaaatcaagctgaacagtgcagaaagatctccgcatctctacagtcccagtcacctgaacacttgttgcccgttctaatccaagccgcacagctttgccgcgaaaagcagcacaccaaggcaatagagctgctgcaagaattttccgatcagcaccccgaaaacgccgctgagatcaagcttaccatggcacaactgaagatcagtcaaggcaacatttccaaagcgtgtcttatactgaggagcattgaagagctgaaacataaacctgggatggtaagcgcactagttaccatgtatagtcatgaagaggacattgacagcgcgatcgaggtgttcacccaggccatacagtggtaccagaatcatcagcccaagtctccagcacacctctcactgatccgcgaagcagctaacttcaagcttaaatacggacggaaaaaagaggccataagtgacctgcagcagctgtggaaacagaacccaaaagacatccacaccttggcccaacttatctctgcctactcactggtagaccctgagaaagctaaggcattgtctaagcaccttccttcaagcgatagtatgtccttgaaagtcgacgtagaggcactcgagaatagtgcaggtgccacgtatattaggaaaaagggtggcaaggtgactggagactcccagccaaaagaacaaggccagggcgatctgaaaaagaaaaagaagaaaaagaaaggcaagctcccaaagaactacgatcctaaggttacacctgaccccgaacgttggctcccaatgagggagagatcatactatcgcgggcgcaaaaaagggaaaaaaaaagaccagattgggaagggaactcagggagctaccgctggggcctcctcagagttagatgcatctaagaccgtatcatccccccctaccagtccaagacccggcagcgctgccacagtatcagctagcacctcaaatatcatcccacccaggcaccagaagccagccggagcgcccgccaccaaaaaaaagcagcagcaaaagaagaaaaagggcgggaaaggaggctggtag

SEQ ID NO: 169459 - DNA, 2016 bp, Artificial Sequence
  derived and/or modified sequence
atggccagcgggggatccgggggagtgtctgtgccagccctgtggagtgaagtcaaccgatacggacagaacggcgactttacacgcgcactgaaaactgttaataagattctccagatcaacaaagatgacgtcacagccctgcactgtaaggtagtctgtcttatccagaatggctcgtttaaggaagccctgaacgtgattaatactcacaccaaggtcctggccaacaacagcctgagcttcgagaaagcgtattgcgaataccggctgaacagaatagagaatgcgctgaaaaccatcgaaagtgccaaccagcagactgataaattgaaggagctatacggacaggtactgtataggctggaacgctatgatgaatgcctggctgtgtacagggatttagtgcgaaattctcaggatgattatgacgaggagaggaagaccaatctttccgctgtggtggccgctcagagcaattgggagaaggtggtgccagaaaatttaggtctgcaggaaggcacacacgagctgtgctacaataccgcgtgcgcattaataggccagggccaactgaatcaggccatgaaaatccttcagaaagccgaggacctctgtagacggtctcttagcgaagatactgatggcactgaggaagatcctcaggctgagcttgctatcattcacggacagatggcttacatccttcaacttcagggaaggactgaggaggccttacaactgtacaatcaaattatcaaattaaagcctactgatgtgggtttactcgcagtaatcgcgaacaatatcatcactatcaataaagaccagaatgtgtttgattcaaaaaaaaaagtcaagctgacaaacgcagaaggagtggaatttaaactgtccaagaaacagctccaagccattgaattcaacaaggcactgctagcgatgtatacgaatcaggccgaacaatgcagaaaaataagcgcctctctgcaaagtcaaagccccgaacacttacttccagttttgatccaggctgcacaactttgtcgagaaaagcagcacaccaaggccatcgaacttctgcaagagttcagtgatcagcatcctgaaaatgcagcagaaataaagctaactatggcacagctgaaaatatcccagggaaacatcagtaaagcctgcctgatcctcagatccatcgaagagttgaaacataagcccggaatggtgtccgccctggtcacgatgtattcccatgaagaagatatcgactctgcaatcgaagtatttacacaggcaatccagtggtatcaaaaccaccagccgaaatctcctgcccatctaagtcttatacgagaggcagccaatttcaaattgaagtatggacgtaagaaggaggctatttctgatttacagcagctgtggaaacagaatcctaaggacatccatacccttgcccagctcatctcagcatacagcttagtggacccagagaaagccaaggccctgagtaaacacttgccttcctctgactcgatgtccctgaaagttgatgtagaagcactggagaattcagccggtgccacctacatccggaagaaagggggtaaggtgaccggcgattcacagcccaaggaacaaggtcagggagacctgaagaaaaagaagaagaaaaagaagggcaaactacccaaaaattacgatcctaaagttaccccggatccagagcgctggctgcctatgcgggagcgctcttactaccgcggtagaaaaaaagggaagaagaaggaccagataggcaaaggaacacagggtgccacggcaggggcaagtagtgaactcgacgcatctaagaccgtgtccagtcccccaacttcacctcgccctggatctgccgctacggtgtcagcaagcacaagtaacatcattccaccacgacaccagaagcccgctggagcccctgctacaaagaaaaagcaacaacagaaaaaaaagaagggcggtaaaggcggatggtag

SEQ ID NO: 169460 - DNA, 3983 bp, Artificial Sequence
  derived and/or modified sequence
gctaagtaacttgtttattgtcagacatctagtgagtcgcagagccagggaactgaccacgggcattttcaccccattacccttccagcttattgccgactgctcccgaagggagcgaaaaggacaggcaaagggtttcaccaaaccctttgtaatgggagattcttgccttcttacctttcctcacgtttgcttctctgccagaatgtcttcccgcactttccccagaacccaagttctcctaatcatctttcaagatccctttccctcaaccacagatgagccgtgcctatttctccttcaaatgactccctatggcttctagttggtagtcttttatttaccacctcatagtccttttatttatatcccataaatgatcgtccggccccgcaccgtgggaccaggacgctgcctcgaccatggcggtctcctggaaacaggctgctttgagccgaaactggtgaccgtttcccaaccccgtccaggagtccgacgcctcttttctccaggccaacttcaagtgaggtgtatcaactctatccgcacaaatttcttgccacgagagcagaagattatgatctctgatgctgccttagggctgaagacactcccaactcggcgacgcttagcaatcatcgacttcctcctcctcttggctgcctcggagatcctgttccggggcagaggtctccccgccccgcccctcgtctcctccaagatggcgagcggcggcagcgggggggtgtcagtacctgcgctgtggagtgaagtgaaccggtatggccagaacggcgacttcacgcgcgctctcaagaccgtcaataagatactacagatcaacaaagatgacgtaactgccctgcattgtaaagtggtatgccttatccagaatggaagtttcaaggaagctttgaatgtcatcaatactcacaccaaagtgttagccaataactctctctcctttgaaaaggcatattgcgagtacaggctgaacagaattgagaatgccttgaagacaatagaaagtgccaaccagcagacagacaaactgaaggagctttatggacaagtgttataccgtttggaacgctatgatgaatgcttagcagtgtatagagatctcgtccgaaactcccaagatgattatgatgaggagaggaaaacaaacctttcagcagttgttgcagctcaaagcaattgggaaaaagtggttccagagaacctgggcctccaagaaggcacacatgagctgtgctacaacactgcatgtgcactgataggccaaggccagctgaaccaggccatgaaaatcctacaaaaagctgaagatctttgccgccgttcattatcagaagacactgatgggactgaggaagacccacaggcagaactggccatcattcatggtcagatggcttatattctgcagcttcagggtcgaacagaggaggctttgcaactttacaatcaaataataaaactaaaaccaacagatgtgggattactagctgtaattgcaaataacatcattaccattaacaaggaccaaaatgtctttgactccaagaagaaagtgaaattaaccaatgcggaaggagtagagtttaagctttccaagaaacaactacaagctatagaatttaacaaagctttacttgctatgtacacaaaccaggctgaacaatgccgcaaaatatctgccagtttacagtcccaaagtcccgagcatctcttacctgtgttaatccaagctgcccagctctgccgtgaaaagcagcacacaaaagcaatagagctgcttcaggaattttcagatcagcatccagaaaatgcagctgaaattaagctgaccatggcacagttgaaaatttctcaaggtaatatttctaaagcatgtctaatattgagaagcatagaggagttaaagcataaaccaggcatggtatctgcattagttaccatgtatagccatgaagaagatattgatagtgccattgaggtcttcacacaagctatccagtggtatcaaaaccatcagccaaaatctcctgctcatttgtccttgataagagaagctgcaaacttcaaactcaaatatgggcggaagaaggaggcaattagtgacctacaacagctgtggaaacaaaatccaaaagatattcacaccctggcacagcttatttctgcttactcacttgtagatccagagaaagccaaagctcttagtaaacacttgccatcgtcagatagtatgtctctaaaagtagatgttgaggctcttgaaaattctgctggtgctacatacattcggaagaagggtggaaaagttactggagatagtcaaccaaaggaacaaggacagggagatttgaaaaagaagaaaaagaaaaagaagggaaaattgcctaagaattatgacccaaaagttaccccagatccagaaagatggctgccaatgcgagaacgttcttactaccggggaagaaagaagggtaaaaagaaggatcagattggaaaagggacccagggagcaactgcaggagcttcatctgaactggatgccagtaaaactgtgagcagcccacccacctccccaagacctggcagtgctgcaacagtatctgcctctacaagtaacatcatacccccaagacaccagaaacctgcaggggctccagcaacaaaaaagaaacagcaacagaaaaagaagaaaggtggaaaaggtggctggtgatgagaatattcttgttgcaggctgtttttaaactagtgtcagtgacactaggaatataataaaggtaacacagcaagaagcacagaactactccctcttcatctccatattttcataatttcttgtgtttcaaatagggaaacatcttcctcaaagtctgcctagtgagatatggcctactggttgcctcatagctttgtacagattatgaggactgaaaataattgggcatttacccatcttggtatctgttgtatcctttatctgtgtgtgctgatttgatcttttttcagtttcacataccttatctaaggtttcccaggatttaaacagaaactacttctatgatttcagctggagtctgaagatacttgtttctgttcaagtcccactttaaattatgtcttaggagactgaaagtggaatcttctgagcattcctaaatatctgcttagaaatatcatgtgataaagagggaccttcttaatacactgatgttcttcactaaatggatggccacaagaaaaataaagtaaatgtcttaaataatttaaccataaattttctgtcatgtgatactggaatatgggatacttttcatgtttatatatatatatatatgtatatatatatacatatatatatatatataaacatgaaatatatatatatggctcctttgtgccccatgtcattttcagattatggtagcatgctgatacagcaccatgaaagaactcaaggaaaatatatcaatgtaagaagttcactcttagacccagtgttctgaggtcacatgggtttggactgtctcaatcagaaagattaatgactgttatcaagaacatgaacattggcttcctccatagagaagaaatcagtatctgagttgcataccaggcagtattaaaatctaacaggtctgtttggcccattgatagatactcaaatggtgtctccttctggttatggattttgaccattgattacctttctcaatgtaatgaagtattttacagtcaatttgtggtgtaaatgttgctcttgtctttccttgcttacaaactactttcacattgaacagctgtgagacagacatattgagatgcctgcccttgttagtattcattttatgctgcccaagatatcatttaatttagacttaacaagtatttccttgtgattatattactctgtccttgttaataaagtgctgctgtgtttgactctgaacatactaccaaaa

SEQ ID NO: 169461 - DNA, 2016 bp, Artificial Sequence
  derived and/or modified sequence
atggccagcggcggcagcggcggcgtgagcgtgcccgccctgtggagcgaggtgaacagatacggccagaacggcgacttcaccagagccctgaagaccgtgaacaagatcctgcagatcaacaaggacgacgtgaccgccctgcactgcaaggtggtgtgcctgatccagaacggcagcttcaaggaggccctgaacgtgatcaacacccacaccaaggtgctggccaacaacagcctgagcttcgagaaggcctactgcgagtacagactgaacagaatcgagaacgccctgaagaccatcgagagcgccaaccagcagaccgacaagctgaaggagctgtacggccaggtgctgtacagactggagagatacgacgagtgcctggccgtgtacagagacctggtgagaaacagccaggacgactacgacgaggagagaaagaccaacctgagcgccgtggtggccgcccagagcaactgggagaaggtggtgcccgagaacctgggcctgcaggagggcacccacgagctgtgctacaacaccgcctgcgccctgatcggccagggccagctgaaccaggccatgaagatcctgcagaaggccgaggacctgtgcagaagaagcctgagcgaggacaccgacggcaccgaggaggacccccaggccgagctggccatcatccacggccagatggcctacatcctgcagctgcagggcagaaccgaggaggccctgcagctgtacaaccagatcatcaagctgaagcccaccgacgtgggcctgctggccgtgatcgccaacaacatcatcaccatcaacaaggaccagaacgtgttcgacagcaagaagaaggtgaagctgaccaacgccgagggcgtggagttcaagctgagcaagaagcagctgcaggccatcgagttcaacaaggccctgctggccatgtacaccaaccaggccgagcagtgcagaaagatcagcgccagcctgcagagccagagccccgagcacctgctgcccgtgctgatccaggccgcccagctgtgcagagagaagcagcacaccaaggccatcgagctgctgcaggagttcagcgaccagcaccccgagaacgccgccgagatcaagctgaccatggcccagctgaagatcagccagggcaacatcagcaaggcctgcctgatcctgagaagcatcgaggagctgaagcacaagcccggcatggtgagcgccctggtgaccatgtacagccacgaggaggacatcgacagcgccatcgaggtgttcacccaggccatccagtggtaccagaaccaccagcccaagagccccgcccacctgagcctgatcagagaggccgccaacttcaagctgaagtacggcagaaagaaggaggccatcagcgacctgcagcagctgtggaagcagaaccccaaggacatccacaccctggcccagctgatcagcgcctacagcctggtggaccccgagaaggccaaggccctgagcaagcacctgcccagcagcgacagcatgagcctgaaggtggacgtggaggccctggagaacagcgccggcgccacctacatcagaaagaagggcggcaaggtgaccggcgacagccagcccaaggagcagggccagggcgacctgaagaagaagaagaagaagaagaagggcaagctgcccaagaactacgaccccaaggtgacccccgaccccgagagatggctgcccatgagagagagaagctactacagaggcagaaagaagggcaagaagaaggaccagatcggcaagggcacccagggcgccaccgccggcgccagcagcgagctggacgccagcaagaccgtgagcagcccccccaccagccccagacccggcagcgccgccaccgtgagcgccagcaccagcaacatcatcccccccagacaccagaagcccgccggcgcccccgccaccaagaagaagcagcagcagaagaagaagaagggcggcaagggcggctggtag

SEQ ID NO: 169462 - protein, 471 aa, Artificial Sequence
  derived and/or modified sequence
MAREMTILGSAVLTLLLAGYLAQQYLPLPTPKVIGIDLGTTYCSVGVFFPGTGKVKVIPDENGHISIPSMVSFTDNDVYVGYESVELADSNPQNTIYDAKRFIGKIFTAEELEAEIGRYPFKVLNKNGMVEFSVTSNETITVSPEYVGSRLLLKLKEMAEAYLGMPVANAVISVPAEFDLKQRNSTIEAANLAGLKILRVINEPTAAAMAYGLHKADVFHVLVIDLGGGTLDVSLLNKQGGMFLTRAMSGNNKLGGQDFNQRLLQYLYKQIYQTYGFVPSRKEEIHRLRQAVEMVKLNLTLHQSAQLSVLLTVEEQDRKEPHSSDTELPKDKLSSADDHRVNSGFGRGLSDKKSGESQVLFETEISRKLFDTLNEDLFQKILVPIQQVLKEGHLEKTEIDEVVLVGGSTRIPRIRQVIQEFFGKDPNTSVDPDLAVVTGVAIQAGIDGGSWPLQVSALEIPNKHLQKTNFN

SEQ ID NO: 169463 - protein, 263 aa, Artificial Sequence
  derived and/or modified sequence
MAYGLHKADVFHVLVIDLGGGTLDVSLLNKQGGMFLTRAMSGNNKLGGQDFNQRLLQYLYKQIYQTYGFVPSRKEEIHRLRQAVEMVKLNLTLHQSAQLSVLLTVEEQDRKEPHSSDTELPKDKLSSADDHRVNSGFGRGLSDKKSGESQVLFETEISRKLFDTLNEDLFQKILVPIQQVLKEGHLEKTEIDEVVLVGGSTRIPRIRQVIQEFFGKDPNTSVDPDLAVVTGVAIQAGIDGGSWPLQVSALEIPNKHLQKTNFN

SEQ ID NO: 169464 - DNA, 1416 bp, Artificial Sequence
  derived and/or modified sequence
atggccagagagatgaccatcctgggcagcgccgtgctgaccctgctgctggccggctacctggcccagcagtacctgcccctgcccacccccaaggtgatcggcatcgacctgggcaccacctactgcagcgtgggcgtgttcttccccggcaccggcaaggtgaaggtgatccccgacgagaacggccacatcagcatccccagcatggtgagcttcaccgacaacgacgtgtacgtgggctacgagagcgtggagctggccgacagcaacccccagaacaccatctacgacgccaagagattcatcggcaagatcttcaccgccgaggagctggaggccgagatcggcagataccccttcaaggtgctgaacaagaacggcatggtggagttcagcgtgaccagcaacgagaccatcaccgtgagccccgagtacgtgggcagcagactgctgctgaagctgaaggagatggccgaggcctacctgggcatgcccgtggccaacgccgtgatcagcgtgcccgccgagttcgacctgaagcagagaaacagcaccatcgaggccgccaacctggccggcctgaagatcctgagagtgatcaacgagcccaccgccgccgccatggcctacggcctgcacaaggccgacgtgttccacgtgctggtgatcgacctgggcggcggcaccctggacgtgagcctgctgaacaagcagggcggcatgttcctgaccagagccatgagcggcaacaacaagctgggcggccaggacttcaaccagagactgctgcagtacctgtacaagcagatctaccagacctacggcttcgtgcccagcagaaaggaggagatccacagactgagacaggccgtggagatggtgaagctgaacctgaccctgcaccagagcgcccagctgagcgtgctgctgaccgtggaggagcaggacagaaaggagccccacagcagcgacaccgagctgcccaaggacaagctgagcagcgccgacgaccacagagtgaacagcggcttcggcagaggcctgagcgacaagaagagcggcgagagccaggtgctgttcgagaccgagatcagcagaaagctgttcgacaccctgaacgaggacctgttccagaagatcctggtgcccatccagcaggtgctgaaggagggccacctggagaagaccgagatcgacgaggtggtgctggtgggcggcagcaccagaatccccagaatcagacaggtgatccaggagttcttcggcaaggaccccaacaccagcgtggaccccgacctggccgtggtgaccggcgtggccatccaggccggcatcgacggcggcagctggcccctgcaggtgagcgccctggagatccccaacaagcacctgcagaagaccaacttcaactag

SEQ ID NO: 169465 - DNA, 792 bp, Artificial Sequence
  derived and/or modified sequence
atggcctacggcctgcacaaggccgacgtgttccacgtgctggtgatcgacctgggcggcggcaccctggacgtgagcctgctgaacaagcagggcggcatgttcctgaccagagccatgagcggcaacaacaagctgggcggccaggacttcaaccagagactgctgcagtacctgtacaagcagatctaccagacctacggcttcgtgcccagcagaaaggaggagatccacagactgagacaggccgtggagatggtgaagctgaacctgaccctgcaccagagcgcccagctgagcgtgctgctgaccgtggaggagcaggacagaaaggagccccacagcagcgacaccgagctgcccaaggacaagctgagcagcgccgacgaccacagagtgaacagcggcttcggcagaggcctgagcgacaagaagagcggcgagagccaggtgctgttcgagaccgagatcagcagaaagctgttcgacaccctgaacgaggacctgttccagaagatcctggtgcccatccagcaggtgctgaaggagggccacctggagaagaccgagatcgacgaggtggtgctggtgggcggcagcaccagaatccccagaatcagacaggtgatccaggagttcttcggcaaggaccccaacaccagcgtggaccccgacctggccgtggtgaccggcgtggccatccaggccggcatcgacggcggcagctggcccctgcaggtgagcgccctggagatccccaacaagcacctgcagaagaccaacttcaactag

SEQ ID NO: 169466 - DNA, 1416 bp, Artificial Sequence
  derived and/or modified sequence
atggccagagagatgacaattctgggctccgctgtgctcacactgcttctggctggctacctggcccaacagtacctcccgctgccaaccccgaaggttattggcattgacctaggaaccacctactgcagcgtgggtgtctttttcccagggaccggaaaggtcaaagtcattcccgatgaaaatggccatatctccatcccaagcatggtttcattcaccgacaatgacgtctatgtgggctatgagtcagtagaacttgccgatagtaacccacagaacaccatctatgacgcgaaacgttttataggaaaaatctttacagcagaggaactcgaggccgaaattggccggtatcctttcaaagtgctcaacaaaaacggcatggtggagttctcggtgacttctaacgagacgattaccgtttctcctgaatacgtaggctccagattgttactgaagctgaaggaaatggctgaggcctacctgggtatgcccgtggctaacgctgtcatttcagtgccggccgagttcgaccttaaacagaggaatagcacaatagaggctgctaacctcgcaggcttaaagatcctccgcgttataaacgagcctacagctgccgctatggcttacggactgcataaagccgatgtgttccatgttttagtgattgatctggggggcggtaccctggacgttagtttgttaaacaaacaggggggtatgttcttaacacgggctatgtctgggaataacaagcttgggggacaagactttaaccaacgcctgctgcagtacctctacaagcagatataccagacctacgggtttgtgccaagtaggaaggaggagatccaccgcctgagacaggcggtggaaatggttaagctgaacctcaccctgcatcagagcgcccagctgagcgtgctgctgaccgtagaagaacaggaccgcaaagaaccacactcatctgatactgagctgcccaaggataaattatcttcagcagatgaccaccgcgtcaactccgggttcggtcgcgggctgtcggataagaaatctggtgagtcacaagtgctgtttgagacagagatttctcgcaaactgttcgacaccctgaacgaagaccttttccagaagattctggtgccaatacagcaggtccttaaggagggacatctagaaaaaaccgagatcgacgaagtggtactcgtgggggggtcaaccagaattccacgtattcggcaggtcatccaggagttttttggcaaagatcctaatacctccgttgacccagatctcgctgtcgtcacaggggtggcaatacaggccggaatcgatggcggaagttggcccttgcaagtgagcgcactggagattccaaataaacatcttcagaaaactaatttcaattag

SEQ ID NO: 169467 - DNA, 792 bp, Artificial Sequence
  derived and/or modified sequence
atggcttacggcctgcacaaggcagacgtgttccacgtgcttgtaatcgacctgggcggcggcactttggacgtgagtctcctaaataagcagggtggcatgtttcttactcgcgccatgtccggcaataataaattggggggccaggatttcaatcagagattgctgcaatatctgtacaagcagatataccagacatatgggttcgtgcctagtagaaaggaagaaatccatagacttaggcaggccgtggagatggtgaaacttaacctcaccctccatcagagcgctcagctttccgtcctgcttaccgttgaagagcaggacagaaaagagccacattccagtgacaccgaacttcctaaggacaagttgtcatctgccgacgatcacagggtgaattctggttttgggcgaggcctgagcgacaaaaaatcgggagagtctcaggttttgttcgagaccgagatatctagaaaactgttcgataccctgaacgaggacctgtttcagaaaatccttgtcccaatccagcaggtgctgaaagaggggcacctcgagaagactgagatcgatgaggtggttctggtaggtggttctactaggataccccgcataaggcaggtcatccaggagttcttcggcaaagatcccaacactagcgtggacccagaccttgccgtggtcaccggcgtcgcgattcaggctggaatcgatgggggttcttggcccctgcaggtgtcggctcttgaaatcccaaataagcacctgcagaagaccaacttcaattag

SEQ ID NO: 169468 - DNA, 3986 bp, Artificial Sequence
  derived and/or modified sequence
gccgggaggagtgggggcggtgcctcacgtctggtacagtcatcacaagcctgttcggcgggactgtgatggccagagagatgacgatcttaggatcggctgttttgactctcctgttggccggctatttggcacaacagtatttaccattgcctactcctaaagtgattggtattgatcttggcaccacctattgttctgttggggtgttttttcctggcacaggaaaagtaaaggtgattccagatgaaaatgggcatatcagcatacccagcatggtgtcttttactgacaatgatgtatatgtgggatatgaaagcgtagagctggcagattcaaatcctcaaaacacaatatatgatgccaaaagattcataggcaagatttttaccgcagaagagttggaggctgaaattggcagatacccatttaaggttttaaacaaaaatggaatggttgagttttctgtgacaagtaatgagaccatcacagtgtccccagaatatgttggctctcgactattgttgaagttaaaggaaatggcagaggcatatcttggaatgccagttgccaatgctgtcatttctgtaccagcagaatttgatctaaaacagagaaattcaacaattgaagctgctaaccttgcaggactgaagattttgagggtaataaatgaacccacagcagcagctatggcctatggtctccacaaggctgacgtcttccacgtcttggtgatagacttgggcggaggaactctagatgtgtctttactgaataaacaaggagggatgtttctaacccgagcaatgtctggaaacaataaacttggaggacaggacttcaatcagagattgcttcagtacttatataaacagatctatcaaacatatggcttcgtgccctctaggaaagaggaaatccacagattgagacaagctgtggaaatggtcaaattaaatctgactcttcatcaatctgctcagttgtcagtattactaacggtggaggagcaggacaggaaggaacctcacagtagtgacactgaactgccaaaagacaaactttcctcagcagatgaccatcgcgtgaacagtgggtttggacgtggcctttctgataagaaaagtggagaaagtcaggttttatttgaaacagaaatatcacggaaactctttgatacccttaatgaagacctctttcagaaaatactggtacccattcagcaagtattgaaagaaggccacctggaaaagactgagattgatgaggtggttttagttgggggctccactcgtattcctcggatccgtcaagtcattcaagagttctttggaaaagatcccaacacatctgtagaccctgacctagcagtagtaacgggagtggctatccaagcagggattgatggaggctcttggcctctccaagtcagtgctttagaaattcccaataagcatttacaaaaaaccaacttcaactgaattctgcagaaataatggttatttgtgaacttgtctgatgatctcttcccatttatcagattaccttttccacaaaagaaagtctctaaaatatcacagatttacctagagggcaacatttagatacaggaaaattttacatagtgttttgtcttaggattagacgtgaccagattgatcctgtttgattttggagagatcctattctaacaaatactctaaaatgataaaattgaggtacaactctcttaaaagagtatggataactatattttctggattctggaggttgataaccatatgcacttaacattatattctataaacattaagtagtgccagttatgagattcccagttcttactaaattgtattagcaggagctggtaattacttgtattatcacatgtaactaataatttgaactatacttgaaggaccgtgttgatgtcaggtatttacagtggttggaagatagcagtattattagcataagctgcatacgtaatattcagtaactgccatattatataacaaatttacattcacaaattcagtatcctgttaagtgtcatattcttgtaatctgcattctccaggagttttatgtgtttaatagatgaatttattttatttctaaaggtattcaaatgtttcagcaccatataatagaaatacccaattatattctagttcctttatgtcctgtacatcattctctgcttggatttccattattctgtttggttagagaataaaattggtaattgcatttgaagaatgtgttaatgtcataataaagccatgattgctatcttatttttgttatccgagacctttgcaaacattggcaaatagcatcaattacctactgtatttgtttctttgtttatattttcagtaagccctggggaatatagcatggaattgagctactaaatggttttggttccgttttacggagatttttcctcatatttagttttgaatgaggaaaatgtgctcaattataaaagctgtgttattgttttctattattatttttaaataatcacacttggactcttttcaaacattaggttagtttgtaatgaaagcaaaaaatttgtgaatactggaagtaacgtggaaatctaatgtggaagccattgtggcaaggtttctacaaatcggcatttggagcagagttgtttgtttttgttgtttgtttcctttaagaaaaaccacagggaccaagaaagaaaatataacagtttgatttctgtcatacccattgtatttgaagatatatggatacagattatatatatatatacatattttccttaatagaggaatgcttcatattattcaaaaattatatcctgatcacctttttttgttttttattgtaaagtatctctgctttatccattgctgaattcgataggatgttgaaatgctggtcaccaaaaaaggaaactgagcaaattcatttcaacaacatcaaaacttcagcttctcatagtaaaaagctgaatgttactaatatttttcatatctaaaaaaaaattcttagcaatgaaattgctgttaaaacacaaatttcaatcaaatacttttgtgtatagaaaatatgtatagtaggtagatagaaaagtataaaatgtttgttgaagtatcttattttagaatgaatggagaaatgccaaagatgaatccttcactgcattatgaaaatatttcacatgttctcttggactttatataaatctgtaatagattttagaattgaaaaattctttgtgaaggtcttctaaaagtgttccaatttatctcaaaatctccatatataggatcagcttaaaacataaagaaaaccttgaatttctcaaatgtttgagatgttcaagacagtctcttaatccgttaatgcttttggaaacaattgacaaaatagggcaggcagctcatctcatgtcctgaagttggaatttaaataattcctatttgcaaattagaatgacagtgttggaatttggaggcagtagttgagcatattctctagtatatagctacacctttaataaaatgaaggaatgtcttcaatcatattttagtgggctatttataaatagtcttgaagtcaatttagtttatttatttaaaagataatgcatcctgaaagggatcatttatgaataacaatctgaagtcttttcataaaaaaaattaataaactttagttgtacatttagccagtgttatttgaagtatgtaacttttaaaatattaagtgtcttgtatgattagaatatgtgaatgagtaacttattttgtatcaggaatgttttggtactgtgttttcactcaaaccactgacttaacagatactgctgtgtataacatgtactaaatattacagttattgtgcataacagattgttcctcttatatttgtgtgtatacaggcaattcatgttttaatgtaaataaataccattttgcagtttgttttttaaa

SEQ ID NO: 169469 - DNA, 1299 bp, Artificial Sequence
  derived and/or modified sequence
ctgttcggcgggactgtgatggccagagagatgacgatcttaggatcggctgttttgactctcctgttggccggctatttggcacaacagtatttaccattgcctactcctaaagtgattggtattgatcttggcaccacctattgttctgttggggtgttttttcctggcacaggaaaagtaaaggtgattccagatgaaaatgggcatatcagcatacccagcatggtgtcttttactgacaatgatgtatatgtgggatatgaaagcgtagagctggcagattcaaatcctcaaaacacaatatatgatgccaaaagattcataggcaagatttttaccgcagaagagttggaggctgaaattggcagatacccatttaaggactgaagattttgagggtaataaatgaacccacagcagcagctatggcctatggtctccacaaggctgacgtcttccacgtcttggtgatagacttgggcggaggaactctagatgtgtctttactgaataaacaaggagggatgtttctaacccgagcaatgtctggaaacaataaacttggaggacaggacttcaatcagagattgcttcagtacttatataaacagatctatcaaacatatggcttcgtgccctctaggaaagaggaaatccacagattgagacaagctgtggaaatggtcaaattaaatctgactcttcatcaatctgctcagttgtcagtattactaacggtggaggagcaggacaggaaggaacctcacagtagtgacactgaactgccaaaagacaaactttcctcagcagatgaccatcgcgtgaacagtgggtttggacgtggcctttctgataagaaaagtggagaaagtcaggttttatttgaaacagaaatatcacggaaactctttgatacccttaatgaagacctctttcagaaaatactggtacccattcagcaagtattgaaagaaggccacctggaaaagactgagattgatgaggtggttttagttgggggctccactcgtattcctcggatccgtcaagtcattcaagagttctttggaaaagatcccaacacatctgtagaccctgacctagcagtagtaacgggagtggctatccaagcagggattgatggaggctcttggcctctccaagtcagtgctttagaaattcccaataagcatttacaaaaaaccaacttcaactgaattctgcagaaataatggttatttgtgaacttgtctgatgatctcttcccatttatcagattaccttttccacaaaaga

SEQ ID NO: 169470 - DNA, 1416 bp, Artificial Sequence
  derived and/or modified sequence
atggcccgggagatgaccatcctgggcagcgctgtgctgaccctgctgctggccggctacctggcccagcagtacctgcccctgcccacccccaaggtgattggcatcgacctgggcaccacctactgcagcgtgggcgtcttcttccctggcaccgggaaggtgaaggtgatcccagatgaaaatggccacatcagcatccccagcatggtgtccttcacagacaatgatgtgtatgtgggctatgagagcgtggagctggccgacagcaacccccagaacaccatctatgatgccaagcgcttcatcggcaagatcttcaccgctgaggagctggaggccgagatcggccgctaccccttcaaggtgctgaacaagaatggcatggtggagttctctgtgaccagcaatgagaccatcaccgtgtccccagaatatgtgggcagccggctgctgctgaagctgaaggagatggccgaggcctacctgggcatgcctgtggccaatgctgtgatctctgtgcctgctgagtttgacctgaagcagaggaacagcaccattgaagctgccaacctggccggcctgaagatcctgcgggtcatcaatgagcccacagctgctgccatggcctacggcctgcacaaggcagatgtgttccacgtgctggtgattgacctgggcggcggcaccctggatgtgtccctgctgaacaagcagggcggcatgttcctgacccgggccatgagcggcaacaacaagctgggcggccaggacttcaaccagaggctgctgcagtacctgtacaagcagatctaccagacctacggctttgtgcccagcaggaaggaggagatccaccggctgcggcaggccgtggagatggtgaagctgaacctgaccctgcaccagagcgcccagctgtctgtgctgctgactgtggaggagcaggacaggaaggagccccacagcagtgacacagagctgcccaaggacaagctgagcagcgcagatgaccaccgggtgaacagcggcttcggccggggcctgagtgacaagaagagcggggagagccaggtgctgtttgaaacagagatcagcaggaagctgtttgacaccctgaatgaagatctcttccagaagatcctggtgcccatccagcaggtgctgaaggagggccacctggagaagacagaaattgatgaggtggtgctggtgggcggcagcacccgcatcccccgcatccggcaggtgatccaggagttcttcggcaaggaccccaacacctctgtggaccctgacctggccgtggtgactggagtggccatccaggccggcattgatggcggctcctggcccctgcaggtgtctgccctggagatccccaacaagcacctgcagaagaccaacttcaactag

SEQ ID NO: 169471 - DNA, 792 bp, Artificial Sequence
  derived and/or modified sequence
atggcctacggcctgcacaaggcagatgtgttccacgtgctggtgattgacctgggcggcggcaccctggatgtgtccctgctgaacaagcagggcggcatgttcctgacccgggccatgagcggcaacaacaagctgggcggccaggacttcaaccagaggctgctgcagtacctgtacaagcagatctaccagacctacggctttgtgcccagcaggaaggaggagatccaccggctgcggcaggccgtggagatggtgaagctgaacctgaccctgcaccagagcgcccagctgtctgtgctgctgactgtggaggagcaggacaggaaggagccccacagcagtgacacagagctgcccaaggacaagctgagcagcgcagatgaccaccgggtgaacagcggcttcggccggggcctgagtgacaagaagagcggggagagccaggtgctgtttgaaacagagatcagcaggaagctgtttgacaccctgaatgaagatctcttccagaagatcctggtgcccatccagcaggtgctgaaggagggccacctggagaagacagaaattgatgaggtggtgctggtgggcggcagcacccgcatcccccgcatccggcaggtgatccaggagttcttcggcaaggaccccaacacctctgtggaccctgacctggccgtggtgactggagtggccatccaggccggcattgatggcggctcctggcccctgcaggtgtctgccctggagatccccaacaagcacctgcagaagaccaacttcaactag

SEQ ID NO: 169472 - DNA, 1416 bp, Artificial Sequence
  derived and/or modified sequence
atggcccgggagatgaccatcctgggcagcgccgtgctgaccctgttactggctggctacctggcccagcaatacttgccattacccactccaaaggtgatcggcatcgatctgggcaccacgtactgcagcgttggggtgttctttcctggtaccggcaaggtcaaggtgattcctgacgagaacggtcacatatcgattcccagtatggtgagttttaccgacaatgacgtgtatgttgggtacgagtcagtggaactcgctgattcgaaccctcagaataccatttacgacgccaaacgtttcattgggaaaattttcacagctgaggagctggaagcggaaatcggacgttatccctttaaggtcctgaataaaaatggaatggtcgaatttagtgtgaccagcaatgaaacaataaccgtgtcacctgaatatgttggctcgcggctccttcttaagctcaaggagatggccgaggcctacctagggatgcctgtggctaacgccgtgatcagtgtgccggcggagttcgatctgaaacagagaaactccacaatcgaagccgcaaatctggctggcctgaaaattctgagagtcattaatgagccaaccgctgccgccatggcatacggtttgcacaaggccgacgttttccacgtgctcgttattgatttggggggaggcaccttggacgtaagcctgctcaacaagcagggggggatgttcttaacaagggccatgtccggcaacaataagctggggggtcaggacttcaaccaaaggctcctgcagtatctttataagcagatctatcagacttacggatttgttccctctcgcaaggaggagatccaccgtctgagacaggctgtggagatggttaagctcaatctgaccctacaccagagtgctcagttgtcagtgctgctcaccgtagaggagcaagatagaaaggagccgcactcctccgatacggagcttcctaaggacaaactgagcagtgccgacgatcatagagtgaactcagggttcgggcgagggctgtctgacaagaagtccggagaatcccaggtcctattcgaaacagaaatctctcgcaagctatttgacaccttgaatgaggacctgtttcagaaaattttggtccccatacaacaagtactgaaggaggggcatcttgagaagactgagatcgatgaggtagttctcgttggagggagcacccgcataccgaggatacggcaggttatccaagagtttttcggcaaggaccccaacacatctgtggaccccgatctagccgtggtaactggcgtagcaatccaggcgggtatcgacggcggctcctggcccctccaggtgtcggctttggagatccccaacaaacacttacaaaagacaaatttcaactag

SEQ ID NO: 169473 - DNA, 792 bp, Artificial Sequence
  derived and/or modified sequence
atggcctacggcctgcacaaggccgacgtgttccacgtgctggtgattgacctaggggggggcaccctagatgtgagcctgctgaacaagcagggcggaatgtttctgacaagggctatgagcggaaataataagctaggtggacaggactttaatcagagactgttgcaatacctctataagcagatttatcagacctatgggtttgtgccctctcgcaaagaagagatccatcggctaagacaagcagtcgagatggttaagttaaacctgactctgcaccagtcagctcagctctctgtgctactaaccgtggaagagcaagaccggaaagaaccacattcctctgatactgagctgcccaaagacaaactaagctccgcggatgaccacagagtgaactctggattcgggcgtgggctttccgataagaaaagcggcgaaagtcaggtgctctttgaaacagagataagccgcaagctctttgataccctaaatgaggatctgttccagaagattttggtcccgatccagcaggtgctgaaagagggccacctggagaaaaccgagatagatgaagtggtcctggtcggggggtccacccggataccgaggattaggcaggtcatccaggaattctttgggaaggatcctaatacctcggtggatcctgatctcgctgtcgttactggcgtggccatccaagctggaattgatggcggctcctggcccctccaagtgtccgccttagagataccaaataagcatctgcagaagaccaacttcaattag

SEQ ID NO: 169474 - DNA, 1416 bp, Artificial Sequence
  derived and/or modified sequence
atggccagagagatgacaatccttggtagtgccgtgctcaccctcctgctggccggataccttgcccagcagtacctacccctgcccaccccgaaggttatcgggatcgacctgggcaccacctactgctcagtgggtgtgtttttccctggcacggggaaagttaaagtgatccctgacgagaatggccacatttccattccttccatggtatcctttacggacaacgatgtctatgtaggttacgagagtgtggaactggcagactcgaacccacagaatactatttacgatgcaaagagatttataggaaaaattttcactgctgaggagctagaagctgagatcgggagataccccttcaaagtactaaataaaaacggcatggtcgagttctccgtcacgtctaacgagactataacggtcagcccggaatacgtgggatcccgcctcctgctgaaactgaaagaaatggccgaagcatacctcggcatgcctgtcgctaacgctgttatctccgtacccgcagagttcgacctcaagcagcggaactccacaatcgaggccgctaaccttgctggcttgaagatattacgggtgattaacgagcccactgccgcagccatggcgtacggtctccacaaagcggacgtgtttcatgtactggtaattgatttgggtggaggaaccttagatgttagtctgctgaacaaacagggcggtatgtttctcactagagcaatgtccggaaacaataaactcgggggacaggattttaaccaaaggctcctgcaatacctgtataaacagatataccagacatatggcttcgtaccctcgcggaaagaggaaatccaccggctgagacaagccgtggagatggtgaagctgaatctaaccctgcaccagtcagcccagctgagcgttctcttgacagtagaggaacaggatcgaaaggagccacatagttctgacacagagctgccaaaagataaattatcttctgcggacgatcaccgagttaatagcggattcggtagaggactgagcgacaaaaagagcggggaaagtcaggtgctgttcgagactgaaatctccaggaaactcttcgacaccctaaacgaagaccttttccagaagatcctagtgcctattcagcaggtgcttaaagagggacatctagagaagaccgagattgatgaggtcgtgctggtgggaggctcaacccggatccctagaattcgccaagtgatccaggaatttttcggtaaggatcctaataccagtgtggacccagatctggccgtcgtgacaggagtagctatccaagctggcatcgacggcggatcatggccactccaggttagcgccttggagattccaaacaagcaccttcagaagaccaactttaattag

SEQ ID NO: 169475 - DNA, 792 bp, Artificial Sequence
  derived and/or modified sequence
atggcatatgggttgcacaaagccgatgttttccatgtcctcgtgatcgaccttggaggcggaacactggatgtctctcttcttaacaaacagggagggatgttcttaacccgtgccatgtcgggaaataataagttgggtgggcaggactttaaccaacggctactgcagtacctgtataagcagatctatcagacctacgggtttgtgccaagtaggaaggaagagatccaccggctacgccaggccgtggagatggtgaagttgaatttaaccttgcaccagtcagctcaactgtcagtcctgctgaccgttgaggagcaggataggaaggagcctcattcatctgatacggagttacccaaagacaagttatcttcagcagacgatcatcgagtaaatagtggttttggacggggactgtccgacaagaagtccggggagtcgcaagtcttgttcgagacagaaatctccaggaagttgtttgacactctcaatgaagacctgttccaaaaaatactggtgccaatccagcaggtcctgaaggaggggcatctggaaaaaaccgaaattgacgaagtggtgttggtgggcggttcaacccgcataccccgaatccggcaagtgatccaggagtttttcggaaaagatcctaatacgtccgtagatccagatctagcagtggttacaggggtcgctatacaggccggaatcgacggcggtagttggccactgcaggtttctgcactggaaatcccaaacaaacacctgcaaaaaaccaacttcaactag

SEQ ID NO: 169476 - protein, 593 aa, Artificial Sequence
  derived and/or modified sequence
MAPSGLKAVVGEKILSGVIRSVKKDGEWKVLIMDHPSMRILSSCCKMSDILAEGITIVEDINKRREPIPSLEAIYLLSPTEKSVQALIKDFQGTPTFTYKAAHIFFTDTCPEPLFSELGRSRLAKVVKTLKEIHLAFLPYEAQVFSLDAPHSTYNLYCPFRAEERTRQLEVLAQQIATLCATLQEYPAIRYRKGPEDTAQLAHAVLAKLNAFKADTPSLGEGPEKTRSQLLIMDRAADPVSPLLHELTFQAMAYDLLDIEQDTYRYETTGLSEAREKAVLLDEDDDLWVELRHMHIADVSKKVTELLRTFCESKRLTTDKANIKDLSQILKKMPQYQKELNKYSTHLHLADDCMKHFKGSVEKLCSVEQDLAMGSDAEGEKIKDSMKLIVPVLLDAAVPAYDKIRVLLLYILLRNGVSEENLAKLIQHANVQAHSSLIRNLEQLGGTVTNPGGSGTSSRLEPRERMEPTYQLSRWTPVIKDVMEDAVEDRLDRNLWPFVSDPAPTASSQAAVSARFGHWHKNKAGIEARAGPRLIVYVMGGVAMSEMRAAYEVTRATEGKWEVLIGSSHILTPTRFLDDLKALDKKLEDIALP

SEQ ID NO: 169477 - protein, 579 aa, Artificial Sequence
  derived and/or modified sequence
MAPSGLKAVVGEKILSGVIRSVKKDGEWKVLIMDHPSMRILSSCCKMSDILAEGITIVEDINKRREPIPSLEAIYLLSPTEKSVQALIKDFQGTPTFTYKAAHIFFTDTCPEPLFSELGRSRLAKVVKTLKEIHLAFLPYEAQVFSLDAPHSTYNLYCPFRAEERTRQLEVLAQQIATLCATLQEYPAIRYRKGPEDTAQLAHAVLAKLNAFKADTPSLGEGPEKTRSQLLIMDRAADPVSPLLHELTFQAMAYDLLDIEQDTYRYETTGLSEAREKAVLLDEDDDLWVELRHMHIADVSKKVTELLRTFCESKRLTTDKANIKDLSQILKKMPQYQKELNKYSTHLHLADDCMKHFKGSVEKLCSVEQDLAMGSDAEGEKIKDSMKLIVPVLLDAAVPAYDKIRVLLLYILLRNGVSEENLAKLIQHANVQAHSSLIRNLEQLGGTVTNPGGSGTSSRLEPRERMEPTYQLSRWTPVIKDVMEDAVEDRLDRNLWPFVSDPAPTASSQAAVSARFGHWHKNKAGIEARAGPRLIVYVMGGVAMSEMRAAYEVTRATEGSGRCSLAPHTSSPRPASWMT

SEQ ID NO: 169478 - DNA, 1740 bp, Artificial Sequence
  derived and/or modified sequence
atggcccccagcggcctgaaggccgtggtgggcgagaagatcctgagcggcgtgatcagaagcgtgaagaaggacggcgagtggaaggtgctgatcatggaccaccccagcatgagaatcctgagcagctgctgcaagatgagcgacatcctggccgagggcatcaccatcgtggaggacatcaacaagagaagagagcccatccccagcctggaggccatctacctgctgagccccaccgagaagagcgtgcaggccctgatcaaggacttccagggcacccccaccttcacctacaaggccgcccacatcttcttcaccgacacctgccccgagcccctgttcagcgagctgggcagaagcagactggccaaggtggtgaagaccctgaaggagatccacctggccttcctgccctacgaggcccaggtgttcagcctggacgccccccacagcacctacaacctgtactgccccttcagagccgaggagagaaccagacagctggaggtgctggcccagcagatcgccaccctgtgcgccaccctgcaggagtaccccgccatcagatacagaaagggccccgaggacaccgcccagctggcccacgccgtgctggccaagctgaacgccttcaaggccgacacccccagcctgggcgagggccccgagaagaccagaagccagctgctgatcatggacagagccgccgaccccgtgagccccctgctgcacgagctgaccttccaggccatggcctacgacctgctggacatcgagcaggacacctacagatacgagaccaccggcctgagcgaggccagagagaaggccgtgctgctggacgaggacgacgacctgtgggtggagctgagacacatgcacatcgccgacgtgagcaagaaggtgaccgagctgctgagaaccttctgcgagagcaagagactgaccaccgacaaggccaacatcaaggacctgagccagatcctgaagaagatgccccagtaccagaaggagctgaacaagtacagcacccacctgcacctggccgacgactgcatgaagcacttcaagggcagcgtggagaagctgtgcagcgtggagcaggacctggccatgggcagcgacgccgagggcgagaagatcaaggacagcatgaagctgatcgtgcccgtgctgctggacgccgccgtgcccgcctacgacaagatcagagtgctgctgctgtacatcctgctgagaaacggcgtgagcgaggagaacctggccaagctgatccagcacgccaacgtgcaggcccacagcagcctgatcagaaacctggagcagctgggcggcaccgtgaccaaccccggcggcagcggcaccagcagcagactggagcccagagagagaatggagcccacctaccagctgagcagatggacccccgtgatcaaggacgtgatggaggacgccgtggaggacagactggacagaaacctgtggcccttcgtgagcgaccccgcccccaccgccagcagccaggccgccgtgagcgccagattcggccactggcacaagaacaaggccggcatcgaggccagagccggccccagactgatcgtgtacgtgatgggcggcgtggccatgagcgagatgagagccgcctacgaggtgaccagagccaccgagggcagcggcagatgcagcctggccccccacaccagcagccccagacccgccagctggatgacctag

SEQ ID NO: 169479 - DNA, 1782 bp, Artificial Sequence
  derived and/or modified sequence
atggccccatcaggtctcaaggctgtggtgggcgagaagatcctatctggagtaatccgatctgtcaaaaaagatggtgaatggaaagtgctgattatggatcaccctagcatgcgaattctgtctagttgttgcaagatgtccgacatcctggcagagggaattactatcgtggaagacatcaataagagacgcgagcctatacctagcctcgaagccatttatctcctcagtcccaccgaaaaatctgttcaagccttaatcaaagactttcagggaactcctacgttcacctataaggctgcacacattttcttcacagatacttgtccagaaccactcttttccgaattgggccgaagccgcttagccaaagtggtgaaaactctcaaagaaattcatctggctttcctgccatacgaagctcaggttttcagcctggacgctccgcattctacgtataatctctactgcccattccgcgccgaagagaggactcgccagctggaagtcctcgctcagcaaatagcaactctgtgtgccactttgcaggagtaccccgccattagatatcgaaaggggcccgaggacaccgctcaattggcccatgcagttcttgccaaattgaacgcgtttaaagccgacaccccctctctaggagaggggcccgagaagacaaggtctcagctcctcataatggacagggcagctgacccagtgtctcctctgctgcacgaactgacctttcaggccatggcgtatgaccttctggatattgagcaggacacctaccgttatgagaccaccggccttagcgaagcgcgggagaaggctgtacttctggatgaagatgatgatctctgggtcgaactgaggcatatgcacattgcggatgtcagcaaaaaagtgaccgagctgctgaggaccttttgcgaatccaaacggctgacaactgacaaggccaacataaaagacttgagtcagatactgaaaaagatgccacagtatcagaaggaattaaacaagtactccacacatctgcacttggcagatgattgcatgaagcacttcaagggctccgtcgagaaactgtgtagcgtcgagcaagacctggcgatgggttcggacgctgagggtgagaaaattaaggattccatgaaattgatcgtgcccgtgctgcttgatgctgcggtgcccgcctacgataaaattagagtgcttctgctgtacatcctcctgaggaacggggtgagcgaggagaacctagcaaagctgatccaacacgcaaacgttcaagcccatagtagtctgattagaaacttggagcagttagggggcacagtcactaaccctggcggttcaggcactagctccagactggagccccgcgagaggatggagccaacctaccagttatcccgctggacacctgtaattaaggacgttatggaggatgccgtcgaggaccggttggaccgaaatctgtggccatttgttagcgatcctgcgcccaccgctagttctcaggcagccgttagcgcgcgatttggacactggcacaagaacaaagcaggcattgaagccagggccgggccccggttaatagtgtatgtgatgggcggggtggcgatgtccgagatgcgcgctgcctacgaggttaccagagccaccgagggaaaatgggaggtgctcatcggatctagtcacattttgacacctaccagattcctggacgacctgaaggcccttgacaaaaaactggaagacatcgccctgccctag

SEQ ID NO: 169480 - DNA, 1740 bp, Artificial Sequence
  derived and/or modified sequence
atggccccttcaggtcttaaggccgttgtgggagaaaaaattctgtcgggagtcatccggagtgtgaaaaaggatggcgagtggaaggtgctcattatggaccatccctctatgagaatattgtcatcttgctgtaaaatgtcagatatcctagctgaagggattacaatcgtcgaggacataaataagcgcagggaacccattccatcattagaagccatttacctgctttctcctacagaaaaatcagtacaagcactgatcaaggactttcagggaaccccaacatttacttataaagccgctcatatattcttcactgacacttgccctgaacccctattctccgaactgggcaggagccggttggccaaagtggtcaaaaccctgaaagagatacacttggcctttctgccgtacgaagcccaggtgttttccctggacgcccctcattctacttataatttatactgtcccttccgtgccgaggagagaacacgacagttggaggttcttgctcaacaaatcgccacactgtgtgcaactctgcaggagtatcccgcaataaggtatagaaagggccccgaggataccgctcagctggcacatgcagtgctcgctaagttgaacgccttcaaggccgacacaccgagtctgggcgagggcccagagaaaactcggagtcagctattaatcatggaccgggctgctgatccggtcagtcccctcctacacgaactgacattccaggcaatggcttacgacttgctagatattgaacaggatacctacaggtacgaaacaactggcctgtccgaagcccgggagaaggccgtgctgctggatgaggatgacgatctgtgggtggagttacggcatatgcatatcgctgatgtctccaaaaaggtgaccgaattattacggacattctgtgagtcaaaacggctcaccaccgacaaagctaacataaaagaccttagccagattctgaaaaaaatgcctcagtaccagaaagagctaaataagtatagtacccacctgcacttggccgacgactgcatgaaacacttcaaggggtccgtggagaaattgtgctctgtcgagcaagatcttgcaatggggtccgatgccgagggcgagaaaatcaaagatagcatgaagctgatcgtacctgtccttctggatgccgcagtaccagcctacgacaagatcagggtgctgcttctttatattcttctgcggaacggggtgtcagaggagaacctcgccaagctgatccagcacgccaatgtgcaggcacacagctctcttatacgcaacctggagcagctgggcggaactgttactaaccctggtgggtctggaacctctagcagactggaaccccgggaacggatggagcccacatatcagctgagccgctggactccagttatcaaagatgtgatggaggatgctgtggaagaccgcttggatcgaaatctttggccattcgtttctgaccctgcacccacagcgtctagtcaagccgctgtctcagcacgtttcggccactggcacaaaaataaagccggcatcgaggccagggccgggccgaggctgatcgtatacgtgatgggcggggtggctatgtcagagatgcgggctgcttatgaagtcacccgtgccactgagggaagcggccgatgctctttggctcctcacaccagtagcccacgccctgcatcatggatgacctag

SEQ ID NO: 169481 - DNA, 1782 bp, Artificial Sequence
  derived and/or modified sequence
atggcccccagcggcctgaaggctgtggtgggggagaagatcctgagcggggtcatccgctctgtgaagaaggatggagagtggaaggtgctgatcatggaccaccccagcatgaggatcctgagcagctgctgcaagatgtctgacatcctggccgagggcatcaccatcgtggaggacatcaacaagaggcgggagcccatccccagcctggaggccatctacctgctgagccccacagagaagtctgtgcaggccctgatcaaggacttccagggcacccccaccttcacctacaaggccgcccacatcttcttcacagacacctgcccagagcccctcttcagcgagctgggccgcagccggctggccaaggtggtgaagaccctgaaggagatccacctggccttcctgccctatgaggcccaggtgttcagcctggatgccccccacagcacctacaacctgtactgccccttccgggcagaggagaggacccggcagctggaggtgctggcccagcagatcgccaccctgtgtgccaccctgcaggagtacccagccatccgctacagaaaaggacctgaggacacagcccagctggcccatgctgtgctggccaagctgaatgccttcaaggctgacacccccagcctgggggagggccctgagaagaccaggagccagctgctgatcatggacagagctgctgaccctgtgagccccctgctgcacgagctgaccttccaggccatggcctatgacctgctggacatcgagcaggacacctaccgctatgagaccaccggcctgtctgaggcccgggagaaggctgtgctgctggatgaagatgatgacctgtgggtggagctgcggcacatgcacatcgcagatgtgtccaagaaggtgacagagctgctgcggaccttctgtgagagcaagaggctgaccacagacaaggccaacatcaaggacctgagccagatcctgaagaagatgccccagtaccagaaggagctgaacaagtacagcacccacctgcacctggctgatgactgcatgaagcacttcaagggctctgtggagaagctgtgcagcgtggagcaggacctggccatgggcagtgatgctgagggggagaagatcaaggacagcatgaagctgattgtgcctgtgctgctggatgctgctgtgcctgcctatgacaagatccgggtgctgctgctgtacatcctgctgagaaatggagtgtctgaggagaacctggccaagctgatccagcacgccaacgtgcaggcccacagcagcctcatccggaacctggagcagctgggcggcaccgtgaccaaccctgggggcagcggcaccagcagccggctggagccccgggagaggatggagcccacctaccagctgagccgctggacccctgtgatcaaggatgtgatggaggatgctgtggaggaccggctggacaggaacctgtggccctttgtgtctgaccctgcccccacagccagcagccaggccgctgtgtctgcccgcttcggccactggcacaagaacaaggccggcatcgaggcccgggccggcccccggctgattgtgtatgtgatgggcggcgtggccatgtctgagatgagagctgcctatgaggtgacccgggccacagagggcaagtgggaggtgctgattggcagcagccacatcctgacccccacccgcttcctggatgacctgaaggccctggacaagaagctggaggacatcgccctgccctag

SEQ ID NO: 169482 - DNA, 1740 bp, Artificial Sequence
  derived and/or modified sequence
atggcccccagcggcctgaaggctgtggtgggggagaagatcctgagcggggtcatccgctctgtgaagaaggatggagagtggaaggtgctgatcatggaccaccccagcatgaggatcctgagcagctgctgcaagatgtctgacatcctggccgagggcatcaccatcgtggaggacatcaacaagaggcgggagcccatccccagcctggaggccatctacctgctgagccccacagagaagtctgtgcaggccctgatcaaggacttccagggcacccccaccttcacctacaaggccgcccacatcttcttcacagacacctgcccagagcccctcttcagcgagctgggccgcagccggctggccaaggtggtgaagaccctgaaggagatccacctggccttcctgccctatgaggcccaggtgttcagcctggatgccccccacagcacctacaacctgtactgccccttccgggcagaggagaggacccggcagctggaggtgctggcccagcagatcgccaccctgtgtgccaccctgcaggagtacccagccatccgctacagaaaaggacctgaggacacagcccagctggcccatgctgtgctggccaagctgaatgccttcaaggctgacacccccagcctgggggagggccctgagaagaccaggagccagctgctgatcatggacagagctgctgaccctgtgagccccctgctgcacgagctgaccttccaggccatggcctatgacctgctggacatcgagcaggacacctaccgctatgagaccaccggcctgtctgaggcccgggagaaggctgtgctgctggatgaagatgatgacctgtgggtggagctgcggcacatgcacatcgcagatgtgtccaagaaggtgacagagctgctgcggaccttctgtgagagcaagaggctgaccacagacaaggccaacatcaaggacctgagccagatcctgaagaagatgccccagtaccagaaggagctgaacaagtacagcacccacctgcacctggctgatgactgcatgaagcacttcaagggctctgtggagaagctgtgcagcgtggagcaggacctggccatgggcagtgatgctgagggggagaagatcaaggacagcatgaagctgattgtgcctgtgctgctggatgctgctgtgcctgcctatgacaagatccgggtgctgctgctgtacatcctgctgagaaatggagtgtctgaggagaacctggccaagctgatccagcacgccaacgtgcaggcccacagcagcctcatccggaacctggagcagctgggcggcaccgtgaccaaccctgggggcagcggcaccagcagccggctggagccccgggagaggatggagcccacctaccagctgagccgctggacccctgtgatcaaggatgtgatggaggatgctgtggaggaccggctggacaggaacctgtggccctttgtgtctgaccctgcccccacagccagcagccaggccgctgtgtctgcccgcttcggccactggcacaagaacaaggccggcatcgaggcccgggccggcccccggctgattgtgtatgtgatgggcggcgtggccatgtctgagatgagagctgcctatgaggtgacccgggccacagagggcagcggccgctgcagcctggccccccacaccagcagccccaggcctgcctcctggatgacctag

SEQ ID NO: 169483 - DNA, 1782 bp, Artificial Sequence
  derived and/or modified sequence
atggcccccagcggcctgaaggccgtggtgggcgagaagatcctgtctggcgtgattaggtccgttaaaaaggacggggagtggaaggttctaatcatggatcacccatccatgcgcatcctctccagctgctgtaagatgtccgacattctcgctgagggaatcactattgtagaagacattaacaaaaggcgagagccaatacctagtctagaggcgatctatcttctgtctccaacagagaaaagtgtccaggcactcataaaagatttccagggtacacctaccttcacatacaaggctgcacatatattctttacggatacatgtcctgaacccttatttagcgaattaggacgtagcagactggcaaaggtggtcaaaacgttgaaggagatccacctggcctttttgccttatgaggctcaggtgtttagccttgatgcaccccatagcacttataatctgtattgcccatttcgggctgaggaaagaacacgtcagctagaagtgctcgctcagcagattgccacactctgtgccactctgcaagagtaccccgcaattagatatcgcaaaggacccgaagatacagcacagctcgcccacgcagtcctggccaaactgaatgcattcaaggcggacactcctagcttaggcgagggaccagaaaagacccgaagccaacttttgatcatggaccgggctgccgaccccgtgtcgccattactgcacgagctgactttccaagctatggcctacgacttgttagatatcgaacaggacacctaccggtacgaaacaaccggtctgagcgaagcccgtgagaaggctgtgttactggacgaggacgatgatctttgggttgaactgcgccatatgcacatcgccgatgtctctaagaaggtgacggagttgctcaggacgttttgcgagagtaagcgtctcaccaccgacaaggctaacattaaggatctgtcacagatcctgaagaagatgccccagtatcagaaggagctgaacaaatatagcacccacctgcatctggccgacgattgcatgaaacatttcaagggtagcgttgagaaattatgcagcgtcgagcaggacctcgcaatgggctccgacgccgagggggagaagatcaaagacagcatgaagttgattgtgcccgtgcttctggacgccgctgtaccagcttacgacaagatcagggtgctgctgctgtacatcctcctccgaaacggggtatctgaagaaaatcttgccaagttaattcaacacgcaaatgtgcaggctcattcctctcttatcaggaatctggagcagctgggcggaacagtaaccaacccaggcgggagcggaacctccagcaggctcgaaccccgggagagaatggaaccaacataccaactgagtcgatggaccccagtcattaaggacgtaatggaggatgctgtcgaggatcgattggataggaacctatggccatttgtgtccgacccggctcctaccgcatcaagccaagcagccgtcagcgcaagattcgggcattggcacaagaacaaggccggaatcgaagccagagcaggccctaggctgatagtctacgttatgggcggcgtggctatgagcgagatgcgcgccgcctacgaggtaactagagctaccgaggggaagtgggaggtgctgattggcagctcccacatcctgactcccaccaggttcttagatgatctcaaagcgctggacaagaaactggaggacattgccctgccatag

SEQ ID NO: 169484 - DNA, 1740 bp, Artificial Sequence
  derived and/or modified sequence
atggcccccagcggcctgaaggccgtggtgggcgagaagatcctgtcgggggtgatacggagcgtgaaaaaagacggtgaatggaaggtactgatcatggatcaccctagcatgaggattctgagctcctgttgtaaaatgtccgacattctggctgaaggcatcaccatagtggaggatattaacaaacgtcgcgaacctatacctagcctcgaggccatatatctgctatctcccactgaaaagagtgtccaggccctgatcaaggactttcaagggacccccaccttcacgtataaggcggcgcatatctttttcactgatacttgtcccgaaccattattctctgaactagggcggtccagactcgctaaggtagttaaaactctgaaggaaattcatctggccttcttgccatacgaagcccaagtcttctccctggatgcgccccactctacttacaacctgtactgtccatttcgcgccgaagagcgtactcgacaattggaggtccttgctcagcagatcgcgactctttgtgcaaccttgcaagagtatcctgccatcaggtaccggaaaggccccgaggacacagctcagctggcgcatgcagtgcttgctaaacttaacgccttcaaggcagacactccatctttgggtgaaggccccgaaaagacccgaagtcaactactcataatggaccgcgcggccgatccagtaagtcccctgcttcacgaacttacattccaggccatggcatatgacctactggatatcgagcaggatacttacagatatgaaacaacaggactgtctgaagcgcgcgagaaagctgtgctactggacgaagacgatgacctgtgggtagagttgaggcacatgcatatcgccgacgtgtcaaaaaaagtaaccgaactgctccggaccttttgtgaaagcaaacggctcaccaccgacaaggcaaacatcaaggacctttcccagatcctgaagaagatgccgcagtaccaaaaggagctgaataagtactctactcacctgcatttagctgacgattgtatgaagcactttaaaggtagtgtagaaaagctctgtagtgtcgaacaggacttggccatgggttccgatgcagagggtgaaaagatcaaggattctatgaaactcatcgtacccgtgttgttggacgccgcagttcccgcatacgacaaaatcagggttctcttgttgtacatactccttagaaatggcgtatctgaggaaaacctcgcaaaacttattcagcacgctaacgtgcaggcccactcatctcttatccggaacctcgaacaactggggggaacagtgaccaatccgggggggagtggtacatccagccgactggagccaagggagcgtatggagcccacctatcagctttcaagatggaccccggtgataaaggacgttatggaggatgcagttgaagataggctagatcgcaacctatggcctttcgtaagtgatccggcgcccacagcttctagccaagccgccgtgagtgccagatttgggcactggcacaaaaacaaagctgggattgaggctagagcagggccccgattaatcgtctacgtcatgggcggcgtcgccatgtctgaaatgagggccgcatacgaggtgacaagggcaacggagggctccggacgatgttctctggcacctcacacaagttctcctaggcctgcctcgtggatgacgtag

SEQ ID NO: 169485 - DNA, 1782 bp, Artificial Sequence
  derived and/or modified sequence
atggcgccaagtggattgaaagcagtcgtgggagagaaaatcctgtccggcgtcatccggtccgtcaagaaagatggcgagtggaaggtgctgataatggatcacccttctatgcgtattctgtcctcttgctgcaagatgagcgatattctggccgaaggcattacaatcgtggaggacatcaataaacgcagggagccaattcccagcctggaagccatctacctcctgtctccaacggaaaagtcagtgcaggctctgatcaaagacttccaaggcactcctacctttacctacaaggccgcacatattttctttaccgacacttgcccagagccgttattctccgagctgggacggagcagactagccaaggttgtcaagacactgaaggagatccatcttgcattccttccctacgaggcacaggtattcagcctggatgctccccactctacctataatctctattgtccatttcgggctgaagaaaggacccgacagttggaggtactggcccagcagatcgcgaccttgtgcgcaacactgcaggagtacccagcaataaggtacagaaagggccctgaggacacagcacaactggcgcacgccgtgcttgctaaactgaacgcctttaaagccgatactcccagcctgggggagggtccagagaaaactagatcccagcttctgatcatggatagagctgctgacccggtctcaccactcttgcacgagttaaccttccaagcaatggcctatgacctgctggacatcgaacaggatacttatagatacgaaactacaggcctgtcagaggccagggaaaaggctgttttgctggacgaggatgatgatctttgggttgagctgaggcacatgcacattgctgacgtttcgaagaaagtcactgaactgctgcgaactttctgcgagagcaagcgtttaacgactgacaaagctaacattaaggacttatctcagatattgaagaaaatgccacagtatcagaaagagttgaataagtatagcacccatctgcaccttgcagacgactgtatgaaacatttcaaaggcagcgtggaaaaactgtgttcggttgaacaggatctggctatgggttcggatgctgagggcgagaaaatcaaggattccatgaagttgatcgtaccagtgctcctggacgctgctgtgcccgcatatgataaaattagggtgctgctcctgtatatactgctccggaatggtgtcagcgaagagaacctggcaaagctaatccagcacgcaaacgtccaggcacactcatccttaatacggaaccttgagcaactgggtggcacagtcactaatcctggcggatccggtacttctagtagactcgagcctcgagaacggatggagccgacctaccagttgtctagatggacaccagtgattaaagatgtgatggaagacgctgtggaagacagactggaccgaaatctgtggcctttcgtgtctgacccagcccctaccgcttcaagccaagccgcagtcagcgctagatttggacactggcacaaaaataaggccggaattgaggccagagctgggcctagactgattgtgtacgtaatggggggagttgcgatgtccgaaatgcgagctgcatacgaggtgacccgcgcaaccgagggtaagtgggaagtgctcattggcagtagccacatcctgacacccacacgctttctggatgacctgaaggcattagacaaaaagttggaggatattgctctgccttag

SEQ ID NO: 169486 - DNA, 1740 bp, Artificial Sequence
  derived and/or modified sequence
atggccccatccggcctgaaggctgtggttggggagaagattctctcaggggttataaggtcagtgaaaaaagatggcgagtggaaggtcctaattatggaccacccgtcaatgagaatcttaagctcttgctgcaagatgagcgacatcctagctgaagggattacaatagtggaagacatcaataagcggagagagccaatcccgtccttggaagcaatatacttactttcacccaccgaaaaatcagttcaggccttgatcaaagacttccagggcacccctacctttacctacaaagcagcccacattttctttactgacacttgtcctgagcctttatttagcgagctggggaggtctcgattggccaaggtggtcaagactctgaaagaaatccatctcgcgtttcttccctatgaggctcaggtgtttagccttgatgcaccccacagcacttataacctgtactgtcctttccgcgctgaggagagaacgcgccagctggaagtactcgcccaacagattgcgaccctctgcgccacactacaggaatacccggcaatccggtaccgcaagggtccagaggatacagctcagctggctcatgccgttctcgctaaactgaacgcctttaaggctgacacacctagcctgggagaggggccagagaaaactcgctcacaactcttgataatggatagggctgctgaccccgtctcgccactcctgcatgaactgacctttcaggctatggcgtacgatttgctggatatagagcaggatacttaccggtatgagactacggggctgtccgaagccagagaaaaagctgtgctcctggacgaggatgacgatctgtgggtggagctcagacacatgcatatagctgatgtctcaaagaaggttaccgagcttctgcggaccttttgtgagagtaagagattaactacagacaaggccaatatcaaggatctgtcccagatattgaaaaaaatgcctcaataccagaaagagttgaacaagtatagtactcacctacatctggctgacgattgcatgaaacactttaaaggaagtgtcgaaaaactttgttcagtggaacaggacctagctatgggaagtgatgccgagggcgagaaaattaaggactcaatgaagctaatcgtcccggtgctcttagacgccgctgtgcccgcatatgataagataagggtgctgttgttatatatcttgctccgaaacggagtgtctgaggagaatctcgctaagctcatccaacacgctaacgtccaggcgcacagctctctgataagaaatcttgaacagcttgggggtacagtaactaatcctggcggtagtggtacctccagtcggctggagcccagggaacgcatggaacctacttatcagctgagccgctggacccccgtgataaaagacgtgatggaagatgcagtggaagatcgcttagaccgcaatctgtggccatttgtatctgacccagctccgacagccagctcgcaggcagccgtgagcgccagattcggccactggcacaaaaataaagctggaatagaggcgagggccggtcctagactgatcgtctatgtgatgggcggtgttgcaatgtccgaaatgcgggcagcttacgaggttactcgggctacagagggatcaggcaggtgtagcctcgcaccccacacgtcatctccaagacccgctagctggatgacttag

SEQ ID NO: 169487 - DNA, 1889 bp, Artificial Sequence
  derived and/or modified sequence
accttgggacacacccggaagcggcggcggcgcccctcggggaagatggcgccctcggggctgaaggcggtggtgggggaaaaaattctgagcggagttattcggagtgtcaagaaggatggggagtggaaggtgcttatcatggatcacccaagcatgcgcatcttgtcttcctgctgcaaaatgtcagatatcctggctgagggcatcaccattgttgaagacatcaacaaacggcgggaacccattcccagtctggaggccatttatttgctgagccccacggagaagtcggttcaggccctgatcaaagacttccaggggaccccgactttcacctacaaagcggcccatatcttcttcaccgacacctgccccgagcccctgttcagtgagctaggccgctctcgtctggcaaaggtggtgaagacgttgaaggagattcaccttgccttcctcccctacgaggcccaggtgttctccctcgatgctccccacagcacctacaacctctactgccccttccgggcagaggagcgcacgcggcagctcgaggtgctggcccagcagattgccacgctgtgcgccaccctgcaggagtacccggccatccgctaccgcaagggcccagaggacacagcccagttggcccacgccgtcctggccaagctgaacgccttcaaggcagacactcccagtctgggcgagggcccagagaaaacccgctcccagctgctgataatggaccgggcagctgaccccgtgtccccactactgcatgagctcacgttccaggccatggcgtatgatctgctggacatagagcaggacacatacaggtatgagaccaccgggctgagcgaggcgcgggagaaggccgtcttgctggacgaggacgatgacttgtgggtggagcttcgccacatgcatatcgcagatgtgtccaagaaggtcacggagctcctgaggaccttctgtgagagcaagaggctgaccacggacaaggcgaacatcaaagacctatcccagatcctgaaaaagatgccgcagtaccagaaggagctgaataagtattctacgcacctgcatctagcagatgattgtatgaagcacttcaagggctcggtggagaagctgtgtagtgtggagcaggacctggccatgggctccgacgcagagggggagaagatcaaggactccatgaagctgatcgttccggtgctgctggacgcggcggtgcccgcctacgacaagatccgggtcctgctgctctacatcctccttcggaatggtgtgagtgaggagaacctggccaagctgatccagcatgccaatgtacaggcgcacagcagcctcatccgtaacctggagcagctgggaggcactgtcaccaaccccgggggctcggggacctccagccggctggagccgagagaacgcatggagcccacctatcagctgtcccgctggaccccggtcatcaaggatgtaatggaggacgccgtggaggaccggctggacaggaacctgtggcccttcgtatccgaccccgcccccacggccagctcccaggccgctgtcagtgcccgcttcggtcactggcacaagaacaaggctggcatagaagcccgggcgggcccccggctcatcgtgtatgtcatgggcggtgtggccatgtcagagatgagggccgcctacgaggtgaccagggccaccgagggcaagtgggaggtgctcattggctcctcacacatcctcaccccgacccgcttcctggatgacctgaaggcactggacaagaagctggaggacattgccctgccctgacccctggccccgccccctacccctccctttccagagaaataaactcttcccgtcgctctgcc

SEQ ID NO: 169488 - DNA, 1869 bp, Artificial Sequence
  derived and/or modified sequence
gcggcggcggcgcccctcggggaagatggcgccctcggggctgaaggcggtggtgggggaaaaaattctgagcggagttattcggagtgtcaagaaggatggggagtggaaggtgcttatcatggatcacccaagcatgcgcatcttgtcttcctgctgcaaaatgtcagatatcctggctgagggcatcaccattgttgaagacatcaacaaacggcgggaacccattcccagtctggaggccatttatttgctgagccccacggagaagtcggttcaggccctgatcaaagacttccaggggaccccgactttcacctacaaagcggcccatatcttcttcaccgacacctgccccgagcccctgttcagtgagctaggccgctctcgtctggcaaaggtggtgaagacgttgaaggagattcaccttgccttcctcccctacgaggcccaggtgttctccctcgatgctccccacagcacctacaacctctactgccccttccgggcagaggagcgcacgcggcagctcgaggtgctggcccagcagattgccacgctgtgcgccaccctgcaggagtacccggccatccgctaccgcaagggcccagaggacacagcccagttggcccacgccgtcctggccaagctgaacgccttcaaggcagacactcccagtctgggcgagggcccagagaaaacccgctcccagctgctgataatggaccgggcagctgaccccgtgtccccactactgcatgagctcacgttccaggccatggcgtatgatctgctggacatagagcaggacacatacaggtatgagaccaccgggctgagcgaggcgcgggagaaggccgtcttgctggacgaggacgatgacttgtgggtggagcttcgccacatgcatatcgcagatgtgtccaagaaggtcacggagctcctgaggaccttctgtgagagcaagaggctgaccacggacaaggcgaacatcaaagacctatcccagatcctgaaaaagatgccgcagtaccagaaggagctgaataagtattctacgcacctgcatctagcagatgattgtatgaagcacttcaagggctcggtggagaagctgtgtagtgtggagcaggacctggccatgggctccgacgcagagggggagaagatcaaggactccatgaagctgatcgttccggtgctgctggacgcggcggtgcccgcctacgacaagatccgggtcctgctgctctacatcctccttcggaatggtgtgagtgaggagaacctggccaagctgatccagcatgccaatgtacaggcgcacagcagcctcatccgtaacctggagcagctgggaggcactgtcaccaaccccgggggctcggggacctccagccggctggagccgagagaacgcatggagcccacctatcagctgtcccgctggaccccggtcatcaaggatgtaatggaggacgccgtggaggaccggctggacaggaacctgtggcccttcgtatccgaccccgcccccacggccagctcccaggccgctgtcagtgcccgcttcggtcactggcacaagaacaaggctggcatagaagcccgggcgggcccccggctcatcgtgtatgtcatgggcggtgtggccatgtcagagatgagggccgcctacgaggtgaccagggccaccgagggcagtgggaggtgctcattggctcctcacacatcctcaccccgacccgcttcctggatgacctgaaggcactggacaagaagctggaggacattgccctgccctgacccctggccccgccccctacccctccctttccagagaaataaactcttcccgtcgctctgcca

SEQ ID NO: 169489 - DNA, 1782 bp, Artificial Sequence
  derived and/or modified sequence
atggcccccagcggcctgaaggccgtggtgggcgagaagatcctgagcggcgtgatcagaagcgtgaagaaggacggcgagtggaaggtgctgatcatggaccaccccagcatgagaatcctgagcagctgctgcaagatgagcgacatcctggccgagggcatcaccatcgtggaggacatcaacaagagaagagagcccatccccagcctggaggccatctacctgctgagccccaccgagaagagcgtgcaggccctgatcaaggacttccagggcacccccaccttcacctacaaggccgcccacatcttcttcaccgacacctgccccgagcccctgttcagcgagctgggcagaagcagactggccaaggtggtgaagaccctgaaggagatccacctggccttcctgccctacgaggcccaggtgttcagcctggacgccccccacagcacctacaacctgtactgccccttcagagccgaggagagaaccagacagctggaggtgctggcccagcagatcgccaccctgtgcgccaccctgcaggagtaccccgccatcagatacagaaagggccccgaggacaccgcccagctggcccacgccgtgctggccaagctgaacgccttcaaggccgacacccccagcctgggcgagggccccgagaagaccagaagccagctgctgatcatggacagagccgccgaccccgtgagccccctgctgcacgagctgaccttccaggccatggcctacgacctgctggacatcgagcaggacacctacagatacgagaccaccggcctgagcgaggccagagagaaggccgtgctgctggacgaggacgacgacctgtgggtggagctgagacacatgcacatcgccgacgtgagcaagaaggtgaccgagctgctgagaaccttctgcgagagcaagagactgaccaccgacaaggccaacatcaaggacctgagccagatcctgaagaagatgccccagtaccagaaggagctgaacaagtacagcacccacctgcacctggccgacgactgcatgaagcacttcaagggcagcgtggagaagctgtgcagcgtggagcaggacctggccatgggcagcgacgccgagggcgagaagatcaaggacagcatgaagctgatcgtgcccgtgctgctggacgccgccgtgcccgcctacgacaagatcagagtgctgctgctgtacatcctgctgagaaacggcgtgagcgaggagaacctggccaagctgatccagcacgccaacgtgcaggcccacagcagcctgatcagaaacctggagcagctgggcggcaccgtgaccaaccccggcggcagcggcaccagcagcagactggagcccagagagagaatggagcccacctaccagctgagcagatggacccccgtgatcaaggacgtgatggaggacgccgtggaggacagactggacagaaacctgtggcccttcgtgagcgaccccgcccccaccgccagcagccaggccgccgtgagcgccagattcggccactggcacaagaacaaggccggcatcgaggccagagccggccccagactgatcgtgtacgtgatgggcggcgtggccatgagcgagatgagagccgcctacgaggtgaccagagccaccgagggcaagtgggaggtgctgatcggcagcagccacatcctgacccccaccagattcctggacgacctgaaggccctggacaagaagctggaggacatcgccctgccctag

SEQ ID NO: 169490 - protein, 705 aa, Artificial Sequence
  derived and/or modified sequence
MNYLRRRLSDSNFMANLPNGYMTDLQRPQPPPPPPGAHSPGATPGPGTATAERSSGVAPAASPAAPSPGSSGGGGFFSSLSNAVKQTTAAAAATFSEQVGGGSGGAGRGGAASRVLLVIDEPHTDWAKYFKGKKIHGEIDIKVEQAEFSDLNLVAHANGGFSVDMEVLRNGVKVVRSLKPDFVLIRQHAFSMARNGDYRSLVIGLQYAGIPSVNSLHSVYNFCDKPWVFAQMVRLHKKLGTEEFPLIDQTFYPNHKEMLSSTTYPVVVKMGHAHSGMGKVKVDNQHDFQDIASVVALTKTYATAEPFIDAKYDVRVQKIGQNYKAYMRTSVSGNWKTNTGSAMLEQIAMSDRYKLWVDTCSEIFGGLDICAVEALHGKDGRDHIIEVVGSSMPLIGDHQDEDKQLIVELVVNKMAQALPRQRQRDASPGRGSHGQTPSPGALPLGRQTSQQPAGPPAQQRPPPQGGPPQPGPGPQRQGPPLQQRPPPQGQQHLSGLGPPAGSPLPQRLPSPTSAPQQPASQAAPPTQGQGRQSRPVAGGPGAPPAARPPASPSPQRQAGPPQATRQTSVSGPAPPKASGAPPGGQQRQGPPQKPPGPAGPTRQASQAGPVPRTGPPTTQQPRPSGPGPAGRPKPQLAQKPSQDVPPPATAAAGGPPHPQLNKSQSLTNAFNLPEPAPPRPSLSQDEVKAETIRSLRKSFASLFSD

SEQ ID NO: 169491 - protein, 260 aa, Artificial Sequence
  derived and/or modified sequence
MAKDNSTVRCFQGLLIFGNVIIGCCGIALTAECIFFVSDQHSLYPLLEATDNDDIYGAAWIGIFVGICLFCLSVLGIVGIMKSSRKILLAYFILMFIVYAFEVASCITAATQQDFFTPNLFLKQMLERYQNNSPPNNDDQWKNNGVTKTWDRLMLQDNCCGVNGPSDWQKYTSAFRTENNDADYPWPRQCCVMNNLKEPLNLEACKLGVPGFYHNQGCYELISGPMNRHAWGVAWFGFAILCWTFWVLLGTMFYWSRIEY

SEQ ID NO: 169492 - protein, 169 aa, Artificial Sequence
  derived and/or modified sequence
MAKDNSTVRCFQGLLIFGNVIIGCCGIALTAECIFFVSDQHSLYPLLEATDNDDIYGAAWIGIFVGICLFCLSVLGIVGIMKSSRKILLAYFILMFIVYAFEVASCITAATQQDFFTPNLFLKQMLERYQNNSPPNNDDQWKNNGVTKTWDRLMLQDNCCGVNGPSDWQ

SEQ ID NO: 169493 - protein, 189 aa, Artificial Sequence
  derived and/or modified sequence
MAKDNSTVRCFQGLLIFGNVIIGCCGIALTAECIFFVSDQHSLYPLLEATDNDDIYGAAWIGIFVGICLFCLSVLGIVGIMKSSRKILLAYFILMFIVYAFEVASCITAATQQDFFTPNLFLKQMLERYQNNSPPNNDDQWKNNGVTKTWDRLMLQDNCCGVNGPSDWQKYTSAFRTENNDADYPWPRQ

SEQ ID NO: 169494 - DNA, 783 bp, Artificial Sequence
  derived and/or modified sequence
atggccaaggacaacagcaccgtgagatgcttccagggcctgctgatcttcggcaacgtgatcatcggctgctgcggcatcgccctgaccgccgagtgcatcttcttcgtgagcgaccagcacagcctgtaccccctgctggaggccaccgacaacgacgacatctacggcgccgcctggatcggcatcttcgtgggcatctgcctgttctgcctgagcgtgctgggcatcgtgggcatcatgaagagcagcagaaagatcctgctggcctacttcatcctgatgttcatcgtgtacgccttcgaggtggccagctgcatcaccgccgccacccagcaggacttcttcacccccaacctgttcctgaagcagatgctggagagataccagaacaacagcccccccaacaacgacgaccagtggaagaacaacggcgtgaccaagacctgggacagactgatgctgcaggacaactgctgcggcgtgaacggccccagcgactggcagaagtacaccagcgccttcagaaccgagaacaacgacgccgactacccctggcccagacagtgctgcgtgatgaacaacctgaaggagcccctgaacctggaggcctgcaagctgggcgtgcccggcttctaccacaaccagggctgctacgagctgatcagcggccccatgaacagacacgcctggggcgtggcctggttcggcttcgccatcctgtgctggaccttctgggtgctgctgggcaccatgttctactggagcagaatcgagtactag

SEQ ID NO: 169495 - DNA, 510 bp, Artificial Sequence
  derived and/or modified sequence
atggccaaggacaacagcaccgtgagatgcttccagggcctgctgatcttcggcaacgtgatcatcggctgctgcggcatcgccctgaccgccgagtgcatcttcttcgtgagcgaccagcacagcctgtaccccctgctggaggccaccgacaacgacgacatctacggcgccgcctggatcggcatcttcgtgggcatctgcctgttctgcctgagcgtgctgggcatcgtgggcatcatgaagagcagcagaaagatcctgctggcctacttcatcctgatgttcatcgtgtacgccttcgaggtggccagctgcatcaccgccgccacccagcaggacttcttcacccccaacctgttcctgaagcagatgctggagagataccagaacaacagcccccccaacaacgacgaccagtggaagaacaacggcgtgaccaagacctgggacagactgatgctgcaggacaactgctgcggcgtgaacggccccagcgactggcagtag

SEQ ID NO: 169496 - DNA, 570 bp, Artificial Sequence
  derived and/or modified sequence
atggccaaggacaacagcaccgtgagatgcttccagggcctgctgatcttcggcaacgtgatcatcggctgctgcggcatcgccctgaccgccgagtgcatcttcttcgtgagcgaccagcacagcctgtaccccctgctggaggccaccgacaacgacgacatctacggcgccgcctggatcggcatcttcgtgggcatctgcctgttctgcctgagcgtgctgggcatcgtgggcatcatgaagagcagcagaaagatcctgctggcctacttcatcctgatgttcatcgtgtacgccttcgaggtggccagctgcatcaccgccgccacccagcaggacttcttcacccccaacctgttcctgaagcagatgctggagagataccagaacaacagcccccccaacaacgacgaccagtggaagaacaacggcgtgaccaagacctgggacagactgatgctgcaggacaactgctgcggcgtgaacggccccagcgactggcagaagtacaccagcgccttcagaaccgagaacaacgacgccgactacccctggcccagacagtag

SEQ ID NO: 169497 - DNA, 783 bp, Artificial Sequence
  derived and/or modified sequence
atggccaaggataactccacagtcagatgttttcagggactgctgatcttcggtaacgtgattattgggtgctgtggcatcgctcttaccgctgagtgtattttcttcgtgtctgaccagcactctctttaccccctattagaggccaccgacaatgacgacatctatggcgccgcctggattggcattttcgtgggcatctgtctgttctgtctgagcgttctcggtattgtaggcatcatgaagtcttcccgcaaaatcctcctagcatactttatcctaatgttcattgtctacgccttcgaagtcgcatcatgcattactgcagccacccagcaggactttttcactcccaatctgttccttaagcagatgctcgagcggtatcagaataatagccctcctaacaacgacgaccagtggaagaacaacggggtgacgaagacctgggatcgactgatgctacaagacaactgttgcggggttaatgggccatcagactggcaaaaatatacctcagcatttcgaacggagaataacgacgcagactatccctggccacggcagtgttgcgtcatgaataacctgaaagaaccactcaatttggaagcctgtaagctgggggtccccggattctaccataatcagggctgctatgagctaatcagtggcccaatgaaccgccatgcgtggggcgtagcctggtttggttttgctatcctctgttggacgttttgggtactgcttggtacaatgttttactggtcgcggatcgagtattag

SEQ ID NO: 169498 - DNA, 510 bp, Artificial Sequence
  derived and/or modified sequence
atggccaaagacaactccactgtgcggtgtttccaggggctgttgatctttggcaacgttattattgggtgttgtggaatcgctttaaccgccgagtgcatcttctttgttagtgaccagcatagcctgtaccccctgttagaggcgacagataatgacgatatctatggagccgcctggattgggatcttcgttggcatttgcctgttttgcctgtcagttctggggattgtcgggatcatgaaatcttctcgaaaaattctgctcgcctacttcattttgatgttcatcgtttatgctttcgaggttgcttcatgcataaccgctgccactcagcaggatttcttcacacctaacctcttcttgaagcagatgctggaacgctatcagaacaactctcctcccaataatgacgaccagtggaaaaacaacggggtcacaaagacgtgggacaggctcatgctgcaagacaactgttgcggagtgaatggcccatccgactggcaatag

SEQ ID NO: 169499 - DNA, 570 bp, Artificial Sequence
  derived and/or modified sequence
atggcaaaggataactccacggtacgctgctttcaggggctactgatattcgggaatgtcattattggctgttgcgggatagccctgaccgccgagtgcattttctttgtcagcgatcaacacagcctctaccctctgcttgaggccaccgataacgacgatatttatggcgctgcgtggataggaatcttcgtcgggatctgccttttttgtctgtctgtgcttggaattgtcggcattatgaaatcatcaagaaagatcctcctggcttacttcatcctcatgtttattgtgtacgccttcgaggtggcttcctgcatcaccgccgcgacgcagcaagacttctttactccaaacctgttcttgaagcagatgctcgagcgttatcagaacaactcaccgcccaacaacgacgaccagtggaagaacaatggcgtgaccaagacttgggatcggttaatgctacaggacaactgttgtggcgtcaatggaccttcagactggcagaaatatacatccgctttccgaaccgaaaataatgacgctgattacccgtggccaaggcagtag

SEQ ID NO: 169500 - DNA, 783 bp, Artificial Sequence
  derived and/or modified sequence
atggccaaggacaacagcacagtgcgctgcttccagggcctgctgatctttggaaatgtcatcatcggctgctgcggcatcgccctgacagctgagtgcatcttctttgtgtctgaccagcacagcctgtaccccctgctggaggccacagacaatgatgacatctacggggccgcctggattggcatctttgtgggcatctgcctcttctgcctgtctgtgctgggcatcgtgggcatcatgaagagcagcaggaagatcctgctggcctacttcatcctgatgtttattgtgtatgcctttgaggtggccagctgcatcacagctgccacccagcaggacttcttcacccccaacctcttcctgaagcagatgctggagcgctaccagaacaacagcccccccaacaatgatgaccagtggaagaacaacggggtgaccaagacctgggaccggctgatgctgcaggacaactgctgcggcgtgaatggccccagcgactggcagaagtacaccagcgccttcagaacagagaacaatgatgctgactacccctggccccggcagtgctgcgtgatgaacaacctgaaggagcccctgaacctggaggcctgcaagctgggcgtgcccggcttctaccacaaccagggctgctatgagctgatcagcggccccatgaacagacatgcctggggcgtggcctggtttggatttgccatcctgtgctggaccttctgggtgctgctgggcaccatgttctactggagccgcatcgagtactag

SEQ ID NO: 169501 - DNA, 510 bp, Artificial Sequence
  derived and/or modified sequence
atggccaaggacaacagcacagtgcgctgcttccagggcctgctgatctttggaaatgtcatcatcggctgctgcggcatcgccctgacagctgagtgcatcttctttgtgtctgaccagcacagcctgtaccccctgctggaggccacagacaatgatgacatctacggggccgcctggattggcatctttgtgggcatctgcctcttctgcctgtctgtgctgggcatcgtgggcatcatgaagagcagcaggaagatcctgctggcctacttcatcctgatgtttattgtgtatgcctttgaggtggccagctgcatcacagctgccacccagcaggacttcttcacccccaacctcttcctgaagcagatgctggagcgctaccagaacaacagcccccccaacaatgatgaccagtggaagaacaacggggtgaccaagacctgggaccggctgatgctgcaggacaactgctgcggcgtgaatggccccagcgactggcagtag

SEQ ID NO: 169502 - DNA, 570 bp, Artificial Sequence
  derived and/or modified sequence
atggccaaggacaacagcacagtgcgctgcttccagggcctgctgatctttggaaatgtcatcatcggctgctgcggcatcgccctgacagctgagtgcatcttctttgtgtctgaccagcacagcctgtaccccctgctggaggccacagacaatgatgacatctacggggccgcctggattggcatctttgtgggcatctgcctcttctgcctgtctgtgctgggcatcgtgggcatcatgaagagcagcaggaagatcctgctggcctacttcatcctgatgtttattgtgtatgcctttgaggtggccagctgcatcacagctgccacccagcaggacttcttcacccccaacctcttcctgaagcagatgctggagcgctaccagaacaacagcccccccaacaatgatgaccagtggaagaacaacggggtgaccaagacctgggaccggctgatgctgcaggacaactgctgcggcgtgaatggccccagcgactggcagaagtacaccagcgccttcagaacagagaacaatgatgctgactacccctggccccggcagtag

SEQ ID NO: 169503 - DNA, 783 bp, Artificial Sequence
  derived and/or modified sequence
atggccaaggacaacagcaccgtgcggtgcttccagggcctgctgatctttggcaacgttatcatcggttgttgtggcatagccctcactgctgaatgtatcttcttcgtttcagatcagcactcactgtatcctttgctcgaagccaccgataacgatgacatctacggtgctgcctggattgggattttcgtcggcatttgtttgttctgtctgtctgttctcggaatcgtgggtattatgaagagttcacgcaaaattttgctggcttattttatcctgatgttcatcgtgtacgcctttgaagtggcatcatgtatcacagcagcgacccagcaggacttctttacacctaacctcttcctcaagcagatgctggaaagataccaaaacaattcacccccgaataatgacgaccagtggaagaacaatggagtgacaaagacttgggaccggcttatgctacaggacaattgttgcggtgttaatggtccatctgactggcagaagtatacaagtgctttcaggactgaaaataatgatgcagactatccatggccgaggcagtgctgtgtcatgaacaatctgaaggaaccacttaacctagaagcctgcaagcttggggtgcccggcttttatcacaaccaggggtgttacgaactgatttctggccccatgaaccggcatgcctggggcgtggcttggtttggctttgcaatcttgtgctggactttctgggttctgctcggtaccatgttctactggtcgaggatcgaatattag

SEQ ID NO: 169504 - DNA, 510 bp, Artificial Sequence
  derived and/or modified sequence
atggccaaggacaacagcaccgtgcggtgcttccagggcctgctgattttcggtaatgtgatcataggctgctgcggcattgccttaactgcagagtgcatttttttcgtctccgaccagcacagcttatatcccctgcttgaggcaacagacaatgatgatatatacggagccgcttggatagggatcttcgtgggaatttgcctgttttgcttatcagttctgggtatcgttggtatcatgaagagcagtcggaaaatcctgctagcctatttcattttgatgtttatcgtgtacgccttcgaagtggcctcttgcatcacggccgccactcaacaagacttttttactcccaatttatttctcaaacaaatgctcgagagatatcagaacaactccccccccaataacgacgaccagtggaagaataatggcgtgacaaaaacttgggacagattgatgctgcaggacaattgttgcggggtcaatggaccctctgactggcaatag

SEQ ID NO: 169505 - DNA, 570 bp, Artificial Sequence
  derived and/or modified sequence
atggccaaggacaacagcaccgtgcggtgcttccagggcctgctgatcttcggcaacgtgatcatcggctgctgtggaatcgctctgactgccgagtgtatattctttgtgtcagaccaacactccctttatcccctgctagaggccacggacaacgatgatatatatggagccgcctggattgggattttcgtggggatttgcctgttctgcctttctgttttaggcatcgttggcataatgaaatccagcagaaaaattttgctggcttatttcatcctcatgtttattgtgtatgcatttgaggtggccagttgtattaccgctgcgactcaacaggacttcttcacgcctaatctttttctcaaacagatgcttgagcgttatcagaataatagtccgccaaacaatgacgatcaatggaagaacaatggggtgaccaaaacatgggaccggctgatgctgcaagataattgttgcggcgtgaatggcccatcagattggcagaaatacactagcgctttccgcacagaaaataatgacgctgattacccctggcctagacagtag

SEQ ID NO: 169506 - DNA, 783 bp, Artificial Sequence
  derived and/or modified sequence
atggcaaaggataacagtactgtgcgctgctttcagggacttcttattttcgggaacgtaatcattggctgctgtggaattgctcttacagccgaatgcatcttcttcgtttccgatcagcactctctgtacccccttctcgaggcgaccgataacgatgatatctacggcgctgcctggattggcatcttcgtcgggatctgtttattctgtctgtcagtgctgggtatcgtaggtatcatgaagtcttctcgcaagatcctcttagcttactttattctcatgtttatcgtgtacgccttcgaagtcgcctcctgtatcacggccgctactcagcaggatttctttacaccaaacctttttctgaagcagatgctggagaggtaccaaaacaactccccccctaacaacgatgaccagtggaaaaataacggcgtgaccaagacatgggaccgcctgatgttacaggataattgctgtggtgtgaatggcccttccgactggcaaaagtacactagcgcttttaggaccgagaacaatgacgccgattacccatggccaaggcagtgctgcgtgatgaataatttaaaggagcccctgaacctcgaagcttgcaagttgggagtccccggtttttatcataaccaggggtgctatgagttgatttcaggtcctatgaacaggcatgcgtggggtgtggcatggtttggattcgccatcctctgctggactttttgggtcctgttgggaacaatgttttactggagcagaatcgagtattag

SEQ ID NO: 169507 - DNA, 510 bp, Artificial Sequence
  derived and/or modified sequence
atggctaaggataattccactgtgcggtgttttcagggtcttcttatctttgggaatgtgataatcggctgctgtgggatcgctctgaccgccgaatgcatatttttcgtgtcagatcagcattctctttaccctctgctcgaggccaccgataacgatgatatatacggggcagcttggatcggcatctttgtaggaatatgtcttttctgtttgtcggtgcttgggatcgtcggaattatgaagtcgagcagaaagatccttctggcttatttcattctaatgttcatcgtttacgcatttgaggtcgcttcttgcattacagcagcaacccaacaggacttttttactcctaatctcttcctcaaacagatgctggagaggtatcagaacaattctcctccgaataacgacgaccaatggaaaaacaacggtgtaacgaagacctgggaccgcctgatgttgcaggacaactgctgtggggtcaacggcccttccgattggcaatag

SEQ ID NO: 169508 - DNA, 570 bp, Artificial Sequence
  derived and/or modified sequence
atggcgaaggacaactcaactgtgcggtgtttccaaggactgttaatttttggaaatgtgattattgggtgctgtggaatagctcttacagccgagtgcatattctttgtaagtgaccaacatagtctgtatccccttcttgaagcaaccgacaacgacgacatctatggagccgcttggattggcatcttcgtagggatctgcctcttctgcctgtcagtcctgggaatcgtggggatcatgaaaagctcccggaaaatcctgctcgcctacttcattctgatgttcatcgtgtacgctttcgaggttgccagctgcatcacagcagctacccaacaggacttctttacacctaacctgtttttaaagcagatgcttgagcgctaccaaaacaactcacctcctaacaacgatgatcagtggaaaaataatggcgtgaccaagacctgggaccgactcatgctgcaggataattgctgcggggttaacggcccatccgattggcagaagtacacctccgcttttcgcaccgagaataacgacgccgactacccttggccccgtcagtag

SEQ ID NO: 169509 - DNA, 2118 bp, Artificial Sequence
  derived and/or modified sequence
atcacagactacccttccctggtcctggaggttcaaagaattgcaggagggtagaaaagcacctgggtcgggtgcagactgcggagcgggccctaccgtgtgcgcagaaagaggaggcgcttgccttcagcttgtgggaaatcccgaagatggccaaagacaactcaactgttcgttgcttccagggcctgctgatttttggaaatgtgattattggttgttgcggcattgccctgactgcggagtgcatcttctttgtatctgaccaacacagcctctacccactgcttgaagccaccgacaacgatgacatctatggggctgcctggatcggcatatttgtgggcatctgcctcttctgcctgtctgttctaggcattgtaggcatcatgaagtccagcaggaaaattcttctggcgtatttcattctgatgtttatagtatatgcctttgaagtggcatcttgtatcacagcagcaacacaacaagactttttcacacccaacctcttcctgaagcagatgctagagaggtaccaaaacaacagccctccaaacaatgatgaccagtggaaaaacaatggagtcaccaaaacctgggacaggctcatgctccaggacaattgctgtggcgtaaatggtccatcagactggcaaaaatacacatctgccttccggactgagaataatgatgctgactatccctggcctcgtcaatgctgtgttatgaacaatcttaaagaacctctcaacctggaggcttgtaaactaggcgtgcctggtttttatcacaatcagggctgctatgaactgatctctggtccaatgaaccgacacgcctggggggttgcctggtttggatttgccattctctgctggactttttgggttctcctgggtaccatgttctactggagcagaattgaatattaagcataaagtgttgccaccatacctccttccccgagtgactctggatttggtgctggaaccagctctctcctaatattccacgtttgtgccccacactaacgtgtgtgtcttacattgccaagtcagatggtacggacttcctttaggatctcaggcttctgcagttctcatgactcctacttttcatcctagtctagcattctgcaacatttatatagactgttgaaaggagaatttgaaaaatgcataataactacttccatccctgcttatttttaatttgggaaaataaatacattcgaaggaacctgtgttatcacagtaacccagagctgtatttggctagcaatctgcctgtatctctcactattatctaaaagaaaccttccaatgcttctgttgatctcagtattgtcaggggaacagagaagttgggaaaagattactgaaatataccttttgcatttctttctagagtagctcccatatatggagatgggtgattctcttgatgccaccttcagatccttttattctccagaataattcttaacagtggttcaaatttcctttcataccttgaagtatgtgtttagtagcctcaattctccattaattaaaagtgtgggctgggcgtgggggctcatgcctgtaatcccagcactttgggaggccgaggtgggcagatcacctgaggtcaggagttcaagaccagcctggccaacatggtgaaaccccgtctctacaaaaatacaaaaattagccaggcgtgatggcaggtgcctgtaatcctagctacttggcaggctaacgcaggagaatcacttgaccgggagacagaggttgcagtgagctgagatcgtacctattgcactccatcctggatgaaagagccagactctgtctcaaaacaaacaaaaaagcgtggggacttctggggacagacaaggtgcctgttatatatttactcagtctttgccctgaatggtctcagcttgagaccatttcaaactggagagaagcaagccagccaatagaatggggtgatttacagggatttctgtttactgtcaaaatatttctcatctgcactatgtttccatttgtggtcctgaaggaaattcttataactcaacatttgtctggtcttataagtaaagacagctttaaaatctgttcactttca

SEQ ID NO: 169510 - DNA, 687 bp, Artificial Sequence
  derived and/or modified sequence
ggagcgggccctaccgtgtgcgcagaaagaggaggcgctggacttatcctaccttaagttgaagcagaccagcaattgttgtgacctacaatctccacacccatctttactctgagccaaggaagtgtctgttcttgtgctgagtttcaggtgccttcagcttgtgggaaatcccgaagatggccaaagacaactcaactgttcgttgcttccagggcctgctgatttttggaaatgtgattattggttgttgcggcattgccctgactgcggagtgcatcttctttgtatctgaccaacacagcctctacccactgcttgaagccaccgacaacgatgacatctatggggctgcctggatcggcatatttgtgggcatctgcctcttctgcctgtctgttctaggcattgtaggcatcatgaagtccagcaggaaaattcttctggcgtatttcattctgatgtttatagtatatgcctttgaagtggcatcttgtatcacagcagcaacacaacaagactttttcacacccaacctcttcctgaagcagatgctagagaggtaccaaaacaacagccctccaaacaatgatgaccagtggaaaaacaatggagtcaccaaaacctgggacaggctcatgctccaggacaattgctgtggcgtaaatggtccatcagactggcaaa

SEQ ID NO: 169511 - DNA, 670 bp, Artificial Sequence
  derived and/or modified sequence
ggagcgggccctaccgtgtgcgcagaaagaggaggcgctaaactgtagcagttatttggtaatgctttcaacagtgccttcagcttgtgggaaatcccgaagatggccaaagacaactcaactgttcgttgcttccagggcctgctgatttttggaaatgtgattattggttgttgcggcattgccctgactgcggagtgcatcttctttgtatctgaccaacacagcctctacccactgcttgaagccaccgacaacgatgacatctatggggctgcctggatcggcatatttgtgggcatctgcctcttctgcctgtctgttctaggcattgtaggcatcatgaagtccagcaggaaaattcttctggcgtatttcattctgatgtttatagtatatgcctttgaagtggcatcttgtatcacagcagcaacacaacaagactttttcacacccaacctcttcctgaagcagatgctagagaggtaccaaaacaacagccctccaaacaatgatgaccagtggaaaaacaatggagtcaccaaaacctgggacaggctcatgctccaggacaattgctgtggcgtaaatggtccatcagactggcaaaaatacacatctgccttccggactgagaataatgatgctgactatccctggcctcgtcaat

SEQ ID NO: 169512 - protein, 287 aa, Artificial Sequence
  derived and/or modified sequence
MPPLWALLALGCLRFGSAVNLQPQLASVTFATNNPTLTTVALEKPLCMFDSKEALTGTHEVYLYVLVDSAISRNASVQDSTNTPLGSTFLQTEGGRTGPYKAVAFDLIPCSDLPSLDAIGDVSKASQILNAYLVRVGANGTCLWDPNFQGLCNAPLSAATEYRFKYVLVNMSTGLVEDQTLWSDPIRTNQLTPYSTIDTWPGRRSGGMIVITSILGSLPFFLLVGFAGAIALSLVDMGSSDGETTHDSQITQEAVPKSLGASESSYTSVNRGPPLDRAEVYSSKLQD

SEQ ID NO: 169513 - DNA, 864 bp, Artificial Sequence
  derived and/or modified sequence
atgccccccctgtgggccctgctggccctgggctgcctgagattcggcagcgccgtgaacctgcagccccagctggccagcgtgaccttcgccaccaacaaccccaccctgaccaccgtggccctggagaagcccctgtgcatgttcgacagcaaggaggccctgaccggcacccacgaggtgtacctgtacgtgctggtggacagcgccatcagcagaaacgccagcgtgcaggacagcaccaacacccccctgggcagcaccttcctgcagaccgagggcggcagaaccggcccctacaaggccgtggccttcgacctgatcccctgcagcgacctgcccagcctggacgccatcggcgacgtgagcaaggccagccagatcctgaacgcctacctggtgagagtgggcgccaacggcacctgcctgtgggaccccaacttccagggcctgtgcaacgcccccctgagcgccgccaccgagtacagattcaagtacgtgctggtgaacatgagcaccggcctggtggaggaccagaccctgtggagcgaccccatcagaaccaaccagctgaccccctacagcaccatcgacacctggcccggcagaagaagcggcggcatgatcgtgatcaccagcatcctgggcagcctgcccttcttcctgctggtgggcttcgccggcgccatcgccctgagcctggtggacatgggcagcagcgacggcgagaccacccacgacagccagatcacccaggaggccgtgcccaagagcctgggcgccagcgagagcagctacaccagcgtgaacagaggcccccccctggacagagccgaggtgtacagcagcaagctgcaggactag

SEQ ID NO: 169514 - DNA, 864 bp, Artificial Sequence
  derived and/or modified sequence
atgccccccctgtgggcgcttctggccctggggtgcctccgcttcggctcagctgtaaacctgcaacctcagctggcctcagtaacgtttgcaactaacaaccccacgctgaccactgtagctctggaaaaacctctatgtatgtttgactccaaggaggcccttacaggaacccatgaggtgtacctgtacgtcctggttgactccgcgattagccgaaacgcgtccgtacaggattcgaccaacaccccgctcgggtctacctttctacagacggaaggaggtcgtacaggtccttacaaagctgttgcgtttgacctaattccttgcagtgatctgccctccctggacgctatcggcgatgttagtaaagcttcccaaattctgaacgcttacttggttagggtgggcgcaaacggaacatgcctatgggatcctaatttccagggactgtgcaacgccccgctctccgccgccaccgagtatcgatttaaatacgtgctcgtcaacatgtcaacgggcctcgttgaggatcagacactctggtctgatccaatcagaacgaatcagcttactccgtatagcacaatcgatacttggccaggcagacggtcaggaggaatgatagtcattacctccattttgggctccctgccctttttccttctcgtgggctttgcaggtgcgatcgccctgagtctggttgatatgggaagtagcgatggcgagacaacacatgattcccaaatcacccaggaagcggtccccaagtcattgggagccagtgaaagctcctatacctctgtgaatagaggtccaccactggaccgagcggaggtctactccagcaagctccaggactag

SEQ ID NO: 169515 - DNA, 864 bp, Artificial Sequence
  derived and/or modified sequence
atgccacccctgtgggccctgctggccctgggctgcctgcgctttggatctgctgtgaacctgcagccccagctggcctctgtgacctttgccaccaacaaccccaccctgaccaccgtggccctggagaagcccctgtgcatgtttgacagcaaggaggccctgaccggcacccatgaggtgtacctgtatgtgctggtggacagcgccatcagcagaaatgcctctgtgcaggacagcaccaacacccccctgggcagcaccttcctgcagacagagggcggccgcacaggcccctacaaggctgtggcctttgacctgatcccctgcagcgacctgcccagcctggatgccatcggagatgtgtccaaggccagccagatcctgaatgcctacctggtgcgggtgggcgccaacggcacctgcctgtgggaccccaacttccagggcctgtgcaatgcccccctgtctgctgccacagagtaccgcttcaagtatgtgctggtgaacatgagcacaggcctggtggaggaccagaccctgtggagcgaccccatccgcaccaaccagctgaccccctacagcaccatcgacacctggccaggaagaagaagtggcggcatgatcgtcatcaccagcatcctgggcagcctgcccttcttcctgctggtgggctttgctggggccatcgccctgagcctggtggacatgggcagcagtgatggagagaccacccatgacagccagatcacccaggaggccgtgcccaagagcctgggcgccagcgagagcagctacacctctgtgaacagaggcccccccctggacagagctgaggtgtacagcagcaagctgcaggactag

SEQ ID NO: 169516 - DNA, 864 bp, Artificial Sequence
  derived and/or modified sequence
atgccccccctgtgggccctgctggccctgggctgcctgcggttcggctcagctgtgaatctccagccgcaactggcctcggtcacgttcgccactaataatcctaccctcacaaccgtggcattagaaaagcctctttgcatgtttgatagcaaggaggcccttacgggcacccatgaggtgtacctgtacgtcctcgtggatagcgcaatatctcggaatgccagcgtccaggattccacaaacaccccattgggtagcaccttcctgcagaccgaagggggcaggacaggaccatacaaggccgtggcatttgatctgataccatgctcagacctgccttccttagatgccatcggcgatgtcagcaaagcaagccagatcctgaacgcctatctagtcagagtcggggccaatggaacatgtttatgggatcctaacttccaaggtctgtgtaatgcacccctttctgccgctacggagtaccggtttaagtacgtgctggtaaatatgtcgacgggcctggtggaagaccagactctttggtcggacccgattcgcaccaatcagcttacaccatacagcaccatcgatacttggcccggcagacggagtggcggaatgattgttatcacctccattctgggctcactccctttctttctcctggtcggtttcgctggtgctatcgcactgagcctcgtagacatggggagctccgatggcgagacgacacatgactcacagatcacccaagaggcagtgcccaaatccttaggcgcatctgagtcatcgtacacctctgtcaaccgtgggcccccactcgatcgggcagaagtttactcgtcaaagctacaggattag

SEQ ID NO: 169517 - DNA, 864 bp, Artificial Sequence
  derived and/or modified sequence
atgccacccctgtgggcactgctggctctaggctgcctgagattcggctcagccgtgaatctgcagccacagctggcctccgtgactttcgcgaccaacaaccctacactgacgaccgttgcattggagaaacctctatgcatgttcgatagcaaggaggcactcactggcacccatgaggtctacctctacgtgttggtggattcagctatcagtaggaacgcctcggtgcaggattcaacgaacacccccttgggctctacatttcttcagacagaggggggacgaacagggccatataaggccgttgcctttgatctgatcccgtgttccgatttaccctccctggatgccattggagatgtgagcaaagccagccagatcctcaatgcctacctggttagggtcggtgctaatgggacatgtctttgggaccctaattttcagggattgtgcaatgcaccattgtctgctgccacagagtataggttcaaatatgttctagtgaatatgtccaccggccttgtcgaggaccagaccctgtggagtgatccaatcagaacaaatcagctcacaccttactctacaatcgacacctggccaggtcggcgaagcgggggtatgattgtgatcacaagcatacttggttcattgccatttttcctcttagtgggatttgcaggggcaatcgccctgtccctggtggacatgggctcaagcgatggcgagaccacccacgactcccagattacccaggaagcagtacctaagagcctaggagctagcgagagctcctacacctccgtcaacagaggaccaccactcgacagagctgaggtttatagctctaagctgcaagactag

SEQ ID NO: 169518 - DNA, 1051 bp, Artificial Sequence
  derived and/or modified sequence
ccgccccgcgctctggcggctcctcccgggcgatgcctccgctctgggccctgctggccctcggctgcctgcggttcggctcggctgtgaacctgcagccccaactggccagtgtgactttcgccaccaacaaccccacacttaccactgtggccttggaaaagcctctctgcatgtttgacagcaaagaggccctcactggcacccacgaggtctacctgtatgtcctggtcgactcagccatttccaggaatgcctcagtgcaagacagcaccaacaccccactgggctcaacgttcctacaaacagagggtgggaggacaggtccctacaaagctgtggcctttgacctgatcccctgcagtgacctgcccagcctggatgccattggggatgtgtccaaggcctcacagatcctgaatgcctacctggtcagggtgggtgccaacgggacctgcctgtgggatcccaacttccagggcctctgtaacgcacccctgtcggcagccacggagtacaggttcaagtatgtcctggtcaatatgtccacgggcttggtagaggaccagaccctgtggtcagaccccatccgcaccaaccagctcaccccatactcgacgatcgacacgtggccaggccggcggagcggaggcatgatcgtcatcacttccatcctgggctccctgcccttctttctacttgtgggttttgctggcgccattgccctcagcctcgtggacatggggagttctgatggggaaacgactcacgactcccaaatcactcaggaggctgttcccaagtcgctgggggcctcggagtcttcctacacgtccgtgaaccgggggccgccactggacagggctgaggtgtattccagcaagctccaagactgagcccagcaccacccctgggcagcagcatcctcctctctggccttgccccaggccctgcagcggtggttgtcacaccctgacttcagggaaggtgaaacagggcttgtccctccaactgcaggaaaacccttaataaaatcttctgatgagttcta

SEQ ID NO: 169519 - protein, 639 aa, Artificial Sequence
  derived and/or modified sequence
MTPASASGEDSGSFYSWQKAKREQGLVTFEDVAVDFTQEEWQYLNPPQRTLYRDVMLETYSNLVFVGQQVTKPNLILKLEVEECPAEGKIPFWNFPEVCQVDEQIERQHQDDQDKCLLMQVGFSDKKTIITKSARDCHEFGNILHLSTNLVASIQRPDKHESFGNNMVDNLDLFSRSSAENKYDNGCAKLFFHTEYEKTNPGMKPYGYKECGKGLRRKKGLSLHQRIKNGEKPFECTACRKTFSKKSHLIVHWRTHTGEKPFGCTECGKAFSQKSQLIIHLRTHTGERPFECPECGKAFREKSTVIIHYRTHTGEKPYECNECGKAFTQKSNLIVHQKTHTGEKTYECTKCGESFIQKLDLIIHHSTHTGKKPHECNECKKTFSDKSTLIIHQRTHTGEKPHKCTECGKSFNEKSTLIVHQRTHTGEKPYECDVCGKTFTQKSNLGVHQRTHSGEKPFECNECEKAFSQKSYLMLHQRGHTGEKPYECNECEKAFSQKSYLIIHQRTHTEEKPYKCNECGKAFREKSKLIIHQRIHTGEKPYECPVCWKAFSQKSQLIIHQRTHTGEKPYACTECGKAFREKSTFTVHQRTHTGEKPYKCTECGKAFTQKSNLIVHQRTHAGKKAHGRGHTRKSKFMAH

SEQ ID NO: 169520 - DNA, 3588 bp, Artificial Sequence
  derived and/or modified sequence
agtgcttgttggggccaggctttgtaacggtctcctgagcagcgagcagaaaatctgttatcgagagagagtgagcacagtgacctgcccctaaaggttcatgcgcatccctcagacccctctttagacgcgccccgcttctccctctgccctctccccttgcccaagccccgaggtgggggcctggtgtgaatgctccggccgaagtgaacctgcacccccgcacccgaaggcctctttccggcttctgggcaaggcggccccggtgagcacggccgtcacacatctctgctttttcccaagaagagcaggaaatggccaaaccccagtcctgcaagctgtacaagaagcatgacaccagcatctgcatctggtgaggactcaggaagcttctactcatggcagaaggcaaagagggaacaggggctagtgacatttgaagatgtagctgtggatttcacccaggaggagtggcagtacctgaacccaccacagaggaccctgtacagagacgtgatgctggagacctacagcaacttggtctttgtggggcagcaggttaccaaaccaaacctcatcctcaagttggaggtagaagaatgcccggcagaaggaaaaatcccattttggaactttccagaagtctgtcaagttgatgaacagattgagaggcaacatcaggatgaccaagataaatgtctgctgatgcaagttggattttctgacaagaaaacaattatcaccaagagtgctcgtgactgtcatgagtttggaaacatacttcatctgagtacaaaccttgttgcttcaatacaaagacccgataaacacgaatcatttggaaataatatggtagataatttagacttatttagtagaagttctgcagaaaataaatatgataatggatgtgcaaaattgttcttccatactgagtatgagaaaacaaatcctggaatgaagccctatggctataaagagtgtgggaaaggtcttaggcgaaagaaaggccttagtctacatcagagaattaaaaatggagagaaaccctttgaatgtactgcatgtaggaaaaccttcagcaagaagtcacacctcattgtacattggagaactcatacgggagagaaaccttttggatgtaccgaatgtggaaaagcttttagccaaaaatctcagctcattatacacttgcgaactcatacaggagagagaccctttgagtgtcctgaatgtggaaaagccttcagagaaaagtcaactgtcatcatacattacaggactcacacaggagaaaaaccttatgaatgtaatgaatgtggaaaagccttcactcagaagtccaacctcattgtccatcagaaaacccacactggagagaaaacctatgaatgcactaaatgtggagaatctttcatacagaagcttgatctaattatacatcatagtacccatacaggaaagaaaccccatgaatgtaatgagtgtaagaaaactttcagtgataagtcaactctcattatacaccagagaactcatacgggagagaaacctcataaatgtactgaatgtgggaagtctttcaatgagaagtcaaccctcattgtgcatcaaagaactcatacaggagagaaaccctatgaatgtgatgtgtgtggaaaaaccttcacgcaaaagtcaaaccttggtgtacatcagagaactcattcaggagagaaaccctttgaatgtaatgaatgtgagaaagccttctctcagaagtcctacctcatgctgcatcagagaggtcatacaggagagaaaccttacgagtgcaatgaatgtgaaaaagcattttcacagaaatcatatctcattatacatcaaagaactcatacagaagaaaaaccctataaatgtaatgaatgtggcaaagccttcagagaaaagtcaaagctcattatacatcagagaattcatacaggagagaaaccttatgaatgtcctgtgtgttggaaagcttttagccagaagtcacagctcataatacatcagagaacgcacacgggagagaaaccctatgcatgcactgagtgtggcaaagccttccgagaaaagtcaacattcactgtacatcaaagaactcatactggagagaaaccctataaatgtacagaatgtgggaaagcctttacccaaaaatcaaaccttattgtacatcagcgaacccatgcaggaaagaaagcccatggaagaggccacactcggaagtcaaagttcatggcacattagagagctaatcagcagtatctattatggacactgaaagaaagttgtgtcaattttactcacattttaaaagtatattttgacttgtggtttaaatatgggagtaaattcagcctttcttcttttcatctcagtcataacccaaaagctacgggagaaaaagcagaagtgtaatctctgtatctgacaaaattaggagacagctgcaaccctaatgagagggctgccacaggcagaggaaatgaagcactggtgcaggagatttcagagtgagagtgctcaaggctgcaggtgcaagacagcactggtaaggactcttagctgaggttcgggatataccccgaggcgcggaaccatagatataacagtggtaacagtgcgtgggcaggtgggaggtaggatgtttcctagaccatttggggtctgaggagaaacaggctggggcctcgagaaggagtcactcagacaagccatatttttagaaagtagtctactgatgggagcaacagttatggcatgctgggggaagagaagggacttttccttgtgaagagccctacagctgcccctatttactgacttgggagaagtaaagtcagaaagaacgaacagctgtggggggaaaaaattctcagttgtcaaaaaaaaaaaaactgatctgcttagaatgtggccctggtttcttttcccacatgaacctccagcaaatagcaagtccaggaaaaactcttctcattcaaagaggaattattcaaaagtaatcaaaaccacaaatgcatttggtttttgggccagcaattccacttctaggaatgtacatactcacacatgtacaaaatgatgaacatacagaagtattcattaatgcagcgtttgtgaaaacaaaagattggaagctgtttaaatgacaccatatcagggttctggttccctaaattgtggtatattcatacagcctactcctgggtagacaacaatgaataaataaggagaacttggaaaccatttatgtagtgatgtgggataaccttcagtttatgttattaggtaggaaaaataaggttgaggacagtgactgccatttgtatataaaaaggagaaaaatggtaagtacataattgtgaattcataagttatctctggaaagagacatgagaacctggtaaccctgattaccttgggaggggaaggggcagtggtggctggggggatggaattgagagggagacaactgtatcctttcatagcttttgaaaatgtgggtgtactatgtactatgtggatgtactaccttttcaaaaataaaacatttaaaaagct

SEQ ID NO: 169521 - DNA, 1920 bp, Artificial Sequence
  derived and/or modified sequence
atgacccccgccagcgccagcggcgaggacagcggcagcttctacagctggcagaaggccaagagagagcagggcctggtgaccttcgaggacgtggccgtggacttcacccaggaggagtggcagtacctgaaccccccccagagaaccctgtacagagacgtgatgctggagacctacagcaacctggtgttcgtgggccagcaggtgaccaagcccaacctgatcctgaagctggaggtggaggagtgccccgccgagggcaagatccccttctggaacttccccgaggtgtgccaggtggacgagcagatcgagagacagcaccaggacgaccaggacaagtgcctgctgatgcaggtgggcttcagcgacaagaagaccatcatcaccaagagcgccagagactgccacgagttcggcaacatcctgcacctgagcaccaacctggtggccagcatccagagacccgacaagcacgagagcttcggcaacaacatggtggacaacctggacctgttcagcagaagcagcgccgagaacaagtacgacaacggctgcgccaagctgttcttccacaccgagtacgagaagaccaaccccggcatgaagccctacggctacaaggagtgcggcaagggcctgagaagaaagaagggcctgagcctgcaccagagaatcaagaacggcgagaagcccttcgagtgcaccgcctgcagaaagaccttcagcaagaagagccacctgatcgtgcactggagaacccacaccggcgagaagcccttcggctgcaccgagtgcggcaaggccttcagccagaagagccagctgatcatccacctgagaacccacaccggcgagagacccttcgagtgccccgagtgcggcaaggccttcagagagaagagcaccgtgatcatccactacagaacccacaccggcgagaagccctacgagtgcaacgagtgcggcaaggccttcacccagaagagcaacctgatcgtgcaccagaagacccacaccggcgagaagacctacgagtgcaccaagtgcggcgagagcttcatccagaagctggacctgatcatccaccacagcacccacaccggcaagaagccccacgagtgcaacgagtgcaagaagaccttcagcgacaagagcaccctgatcatccaccagagaacccacaccggcgagaagccccacaagtgcaccgagtgcggcaagagcttcaacgagaagagcaccctgatcgtgcaccagagaacccacaccggcgagaagccctacgagtgcgacgtgtgcggcaagaccttcacccagaagagcaacctgggcgtgcaccagagaacccacagcggcgagaagcccttcgagtgcaacgagtgcgagaaggccttcagccagaagagctacctgatgctgcaccagagaggccacaccggcgagaagccctacgagtgcaacgagtgcgagaaggccttcagccagaagagctacctgatcatccaccagagaacccacaccgaggagaagccctacaagtgcaacgagtgcggcaaggccttcagagagaagagcaagctgatcatccaccagagaatccacaccggcgagaagccctacgagtgccccgtgtgctggaaggccttcagccagaagagccagctgatcatccaccagagaacccacaccggcgagaagccctacgcctgcaccgagtgcggcaaggccttcagagagaagagcaccttcaccgtgcaccagagaacccacaccggcgagaagccctacaagtgcaccgagtgcggcaaggccttcacccagaagagcaacctgatcgtgcaccagagaacccacgccggcaagaaggcccacggcagaggccacaccagaaagagcaagttcatggcccactag

SEQ ID NO: 169522 - DNA, 1920 bp, Artificial Sequence
  derived and/or modified sequence
atgacacctgcgtccgcaagcggggaggactccggtagcttctacagttggcaaaaagcgaagcgcgaacaaggtctggtcacattcgaagatgtcgcagtcgatttcacacaggaagaatggcagtacctcaaccccccacaacggaccctgtatagggacgtaatgctcgagacatattctaatctcgtctttgtgggtcaacaagtgaccaagcccaacctgatactaaaattggaagtcgaagagtgcccagctgagggcaagatccccttctggaattttccagaggtttgccaagtcgacgagcagatcgagagacagcatcaggatgatcaggataaatgcttactcatgcaagttggcttctcagataaaaagaccattataactaagtcagcgcgcgactgccacgaatttggcaatattctgcacctctctacgaatctcgtggcctccatccagagacccgacaaacacgagtcctttggaaacaatatggttgacaatctcgatttattttccagatctagcgccgagaacaaatatgacaacggatgtgccaagctcttcttccacactgaatacgaaaaaaccaatccggggatgaagccatacgggtataaggagtgcggcaaaggattacgcagaaagaagggtctgtcattgcaccagaggataaaaaacggggaaaagccattcgaatgtactgcgtgcagaaaaactttttcaaagaagtctcaccttattgtgcactggaggactcacactggagaaaaaccatttgggtgcactgaatgcggcaaggccttctcccagaaaagtcaactgattattcatcttaggacgcacacaggagaacggccatttgagtgtcctgagtgcgggaaagcttttagagaaaaaagcactgtgattattcactaccgaacacacaccggggagaagccctacgagtgcaatgagtgtgggaaggcatttacacagaaatctaatttgatcgtgcaccaaaagacccataccggagaaaagacatacgaatgcaccaaatgtggggaatccttcatccagaaattggatcttattatacatcactctactcacaccggcaaaaaacctcacgagtgcaacgaatgtaagaagaccttcagtgataagagcactctgatcatccaccagaggactcacaccggtgagaagcctcacaaatgcaccgaatgcggcaaaagctttaacgaaaagtcaactctcattgtgcaccagcgtactcacaccggcgagaagccctacgaatgtgacgtatgtggaaaaacctttactcagaaaagcaatttgggggtccaccagaggacccatagtggggagaaaccattcgagtgcaatgaatgcgagaaagcattttcccaaaaatcttatctaatgctccaccaaaggggccataccggcgagaagccttacgagtgtaatgaatgcgaaaaggcgttctcccagaagagctacctgattatccatcaaaggactcatactgaagaaaagccttataaatgcaatgaatgcggcaaggcgttccgggaaaagagcaaacttatcatccaccagagaattcacaccggcgaaaagccatacgagtgcccggtttgctggaaagccttttcccagaaatcccagttgattatacatcagcggactcacacaggagaaaaaccctatgcctgtacggagtgcggtaaggcttttcgggagaagtccacatttacagttcaccagcgtactcacacaggagagaaaccatataaatgcacagagtgcgggaaggcctttacccagaagtccaatttaatagtgcaccagaggacccatgccggtaagaaggcccatggccgcggccatactcggaaaagcaagtttatggcccattag

SEQ ID NO: 169523 - DNA, 1920 bp, Artificial Sequence
  derived and/or modified sequence
atgaccccagccagcgccagcggagaagattctggcagcttctacagctggcagaaggccaagcgggagcagggcctggtgacctttgaagatgtggccgtggacttcacccaggaggagtggcagtacctgaaccccccccagaggaccctgtacagagatgtgatgctggagacctacagcaacctggtgtttgtgggccagcaggtgaccaagcccaacctgatcctgaagctggaggtggaggagtgcccagctgagggcaagatccccttctggaacttccctgaggtgtgccaggtggatgagcagatcgagcggcagcaccaggatgaccaggacaagtgcctgctgatgcaggtgggcttcagtgacaagaagaccatcatcaccaagagcgcccgggactgccacgagtttggaaacatcctgcacctgagcaccaacctggtggccagcatccagaggccagacaagcatgagagctttggaaacaacatggtggacaacctggacctcttcagccgcagcagcgctgagaacaagtatgacaatggctgtgccaagctgttcttccacacagaatatgagaagaccaaccctggcatgaagccctacggctacaaggaatgtgggaagggcctgcggaggaagaagggcctgagcctgcaccagaggatcaagaatggagagaagccctttgaatgtacagcctgcaggaagaccttcagcaagaagagccacctgattgtgcactggaggacccacactggagagaagcccttcggctgcacagaatgtgggaaggccttcagccagaagagccagctgatcatccacctgcggacccacactggagagcggccctttgaatgtccagaatgtgggaaggccttccgggagaagagcaccgtcatcatccactaccgcacccacactggagagaagccctatgaatgtaatgaatgtgggaaggccttcacccagaagagcaacctgattgtgcaccagaagacccacactggagagaagacctatgaatgtaccaagtgtggggagagcttcatccagaagctggacctgatcatccaccacagcacccacacaggcaagaagccccatgaatgtaatgaatgcaagaagaccttcagtgacaagagcaccctcatcatccaccagaggacccacactggagagaagccccacaagtgcacagaatgtgggaagagcttcaatgagaagagcaccctcatcgtgcaccagaggacccacactggagagaagccctatgaatgtgatgtgtgtgggaagaccttcacccagaagagcaacctgggcgtgcaccagaggacccacagcggggagaagccctttgaatgtaatgaatgtgagaaggccttcagccagaagagctacctgatgctgcaccagaggggccacactggagagaagccctatgaatgtaatgaatgtgagaaggccttcagccagaagagctacctgatcatccaccagaggacccacacagaggagaagccctacaagtgcaatgaatgtgggaaggccttccgggagaagagcaagctgatcatccaccagaggatccacactggagagaagccctatgaatgtcctgtgtgctggaaggccttcagccagaagagccagctgatcatccaccagaggacccacactggagagaagccctatgcctgcacagaatgtgggaaggccttccgggagaagagcaccttcaccgtgcaccagaggacccacactggagagaagccctacaagtgcacagaatgtgggaaggccttcacccagaagagcaacctgattgtgcaccagaggacccatgctgggaagaaggcccacggccggggccacaccaggaagagcaagttcatggcccactag

SEQ ID NO: 169524 - DNA, 1920 bp, Artificial Sequence
  derived and/or modified sequence
atgacccccgccagcgccagcggcgaggacagcggcagcttctactcctggcagaaggcaaaaagagaacagggactagtgaccttcgaagacgtggccgtcgattttacccaggaggaatggcagtacttaaatccccctcaaaggaccctttacagagacgttatgctggaaacctactccaatttagtttttgtggggcaacaagttaccaaacccaatctcatccttaagttggaggttgaggagtgtccagcagaaggaaaaatacccttctggaacttccccgaagtctgtcaagtggatgagcagattgagcgtcagcatcaggacgatcaggataagtgtttattgatgcaggttggtttctcagataaaaagactatcatcacaaagagcgcaagggactgccacgagtttggaaatattctccacctgagcacaaacctggtggcttccatccaacgaccggacaagcatgagagcttcggaaacaatatggtggacaacctggaccttttcagccgctcgagcgccgaaaacaaatatgacaatggctgtgctaagctgttttttcacactgagtatgagaaaactaacccaggaatgaagccttacgggtataaggaatgtggcaagggccttaggcgcaaaaagggtctgtctctgcaccagcgcatcaagaatggagaaaagccgtttgagtgcaccgcctgccggaaaacgttcagtaaaaagtcccatctgatcgtccactggagaacccatacaggtgagaagccttttgggtgcacagagtgcggtaaggccttttctcaaaagtcacagcttattattcatctccgcactcatactggggagaggccttttgagtgtcccgagtgcggcaaagcgttcagagagaaatccacagtaattatacattacagaacacataccggcgagaagccttatgagtgtaatgagtgcggcaaagcctttacgcagaagtctaatctgatcgttcaccagaaaacacataccggtgagaaaacctatgaatgcaccaagtgtggagagtcattcatccagaagttagatctgataatccatcactctacacacacgggaaaaaaaccccacgaatgtaacgaatgtaagaagaccttttcagataaatccaccctgatcatacaccagcgcactcatacaggcgagaaaccccacaaatgcaccgagtgtggaaagtcatttaatgaaaaatcgaccttaattgttcaccagcgtactcatacaggggagaagccttacgaatgcgatgtctgcggaaagactttcactcagaagtccaatcttggagtccatcagaggacccattccggagagaagccctttgagtgtaatgaatgtgagaaagcctttagccagaagtcatatctcatgttgcaccagagggggcacaccggtgaaaagccttatgagtgcaacgagtgtgagaaagccttcagccaaaaatcatacttaatcatccaccaaaggactcataccgaggaaaagccttataaatgcaacgagtgcgggaaggcgttcagagaaaagtctaagctgattattcaccagcgaattcataccggggagaagccatatgagtgccccgtctgctggaaggcattttctcaaaagagtcagcttatcatccaccaacgcacacacacgggagaaaagccctatgcttgcactgaatgcgggaaggcattcagagagaaatccactttcactgtccaccagaggacacataccggagagaagccatacaaatgtacagagtgcgggaaggccttcacccagaaatccaacttgatagtgcaccaacggacccatgcaggaaagaaagcacacggacgtggccacaccagaaagagcaagtttatggcccactag

SEQ ID NO: 169525 - DNA, 1920 bp, Artificial Sequence
  derived and/or modified sequence
atgacccctgctagcgcaagcggcgaagactcaggatcattctactcatggcagaaggcaaagcgagagcagggtctcgttacctttgaggatgtcgcagtcgacttcacccaggaagagtggcaataccttaaccccccacaaaggactctgtatcgcgacgtcatgctggaaacatattccaacctggtctttgtgggacagcaggtgaccaagccaaacttgatcctgaaattagaggtggaggaatgccctgctgaaggcaaaatacctttttggaattttccggaagtgtgccaggttgatgaacagatcgagaggcagcatcaggacgatcaagataagtgccttcttatgcaagttggctttagcgacaaaaaaactatcatcaccaaatctgctcgagactgccacgagtttggaaacattctccacttgtccaccaacttggtcgcctccattcagcggcctgacaagcatgaaagcttcggaaataacatggtggacaacttggacctgttcagccgatcctccgcagagaacaaatacgacaatgggtgtgctaagctgttttttcacacagaatatgagaagacaaatccgggtatgaagccttatgggtacaaagagtgtggaaaggggctgcgaaggaagaaaggactatcattgcaccagcgcataaagaacggcgaaaaaccatttgagtgcactgcctgcagaaagaccttttcgaaaaagagccatctcattgtgcattggcggacgcacacgggggagaagccctttggctgtaccgagtgcgggaaagctttttcccagaaatcccagctgattatccaccttcgcacccacaccggggagcgtcccttcgaatgccccgagtgtgggaaagcgtttcgcgaaaaaagtacagtcattattcattacaggactcataccggagagaagccttatgagtgcaacgagtgcggtaaggcttttactcagaaatcgaacctaatcgttcatcaaaagacacatactggtgagaagacctatgaatgcaccaaatgtggtgagtcatttatccagaagcttgatctgatcatccatcactccactcacacaggcaagaaaccccatgagtgtaacgaatgtaagaaaaccttcagcgataagtccaccctaatcatacaccagaggacccatactggcgaaaaacctcacaaatgtacagagtgcggcaagagtttcaatgaaaagtccacactgatagttcatcaaaggacacatactggtgaaaaaccttatgagtgcgacgtgtgtggcaagacattcacacagaagtctaaccttggcgtacatcaacgcacccacagtggggaaaagccattcgaatgcaacgaatgcgagaaggccttcagccagaagtcctacctgatgcttcaccagaggggccacacaggtgagaaaccttatgaatgtaatgagtgcgaaaaggcattcagtcagaagagctacttgatcatccaccagcgcacccacacagaggagaaaccttataaatgcaatgagtgcgggaaggcttttcgggaaaaaagcaagcttataattcatcagaggatccacacaggagagaagccatacgagtgccctgtgtgctggaaagcgttcagtcaaaagagtcagctgattatacaccagaggacccataccggagaaaagccgtacgcgtgcactgagtgtgggaaagcctttcgggagaaaagtaccttcacggtccatcagcgaacccacacgggggagaaaccgtataaatgcaccgagtgcgggaaggcgttcacacagaagagtaacctaattgtgcaccaacgaacccatgctggaaagaaggcccacggcagagggcatactcgcaaaagtaagttcatggcgcactag

SEQ ID NO: 169526 - DNA, 3586 bp, Artificial Sequence
  derived and/or modified sequence
agtgcttgttggggccaggctttgtaacggtctcctgagcagcgagcagaaaatctgttatcgagagagagtgagcacagtgacctgcccctaaaggttcatgcgcatccctcagacccctctttagacgcgccccgcttctccctctgccctctccccttgcccaagccccgaggtgggggcctggtgtgaatgctccggccgaagtgaacctgcacccccgcacccgaaggcctctttccggcttctgggcaaggcggccccggtgagctcggccgtcacacatctctgctttttcccaagaagagcaggaaatggccaaaccccagtcctgcaagctgtacaagaagcatgacaccagcatctgcatctggtgaggactcaggaagcttctactcatggcagaaggcaaagagggaacaggggctagtgacatttgaagatgtagctgtggatttcacccaggaggagtggcagtacctgaacccaccacagaggaccctgtacagagacgtgatgctggagacctacagcaacttggtctttgtggggcagcaggttaccaaaccaaacctcatcctcaagttggaggtagaagaatgcccggcagaaggaaaaatcccattttggaactttccagaagtctgtcaagttgatgaacagattgagaggcaacatcaggatgaccaagataaatgtctgctgatgcaagttggattttctgacaagaaaacaattatcaccaagagtgctcgtgactgtcatgagtttggaaacatacttcatctgagtacaaaccttgttgcttcaatacaaagacccgataaacacgaatcatttggaaataatatggtagataatttagacttatttagtagaagttctgcagaaaataaatatgataatggatgtgcaaaattgttcttccatactgagtatgagaaaacaaatcctggaatgaagccctatggctataaagagtgtgggaaaggtcttaggcgaaagaaaggccttagtctacatcagagaattaaaaatggagagaaaccctttgaatgtactgcatgtaggaaaaccttcagcaagaagtcacacctcattgtacattggagaactcatacgggagagaaaccttttggatgtaccgaatgtggaaaagcttttagccaaaaatctcagctcattatacacttgcgaactcatacaggagagagaccctttgagtgtcctgaatgtggaaaagccttcagagaaaagtcaactgtcatcatacattacaggactcacacaggagaaaaaccttatgaatgtaatgaatgtggaaaagccttcactcagaagtccaacctcattgtccatcagaaaacccacactggagagaaaacctatgaatgcactaaatgtggagaatctttcatacagaagcttgatctaattatacatcatagtacccatacaggaaagaaaccccatgaatgtaatgagtgtaagaaaactttcagtgataagtcaactctcattatacaccagagaactcatacgggagagaaacctcataaatgtactgaatgtgggaagtctttcaatgagaagtcaaccctcattgtgcatcaaagaactcatacaggagagaaaccctatgaatgtgatgtgtgtggaaaaaccttcacgcaaaagtcaaaccttggtgtacatcagagaactcattcaggagagaaaccctttgaatgtaatgaatgtgagaaagccttctctcagaagtcctacctcatgctgcatcagagaggtcatacaggagagaaaccttacgagtgcaatgaatgtgaaaaagcattttcacagaaatcatatctcattatacatcaaagaactcatacagaagaaaaaccctataaatgtaatgaatgtggcaaagccttcagagaaaagtcaaagctcattatacatcagagaattcatacaggagagaaaccttatgaatgtcctgtgtgttggaaagcttttagccagaagtcacagctcataatacatcagagaacgcacacgggagagaaaccctatgcatgcactgagtgtggcaaagccttccgagaaaagtcaacattcactgtacatcaaagaactcatactggagagaaaccctataaatgtacagaatgtgggaaagcctttacccaaaaatcaaaccttattgtacatcagcgaacccatgcaggaaagaaagcccatggaagaggccacactcggaagtcaaagttcatggcacattagagagctaatcagcagtatctattatggacactgaaagaaagttgtgtcaattttactcacattttaaaagtatattttgacttgtggtttaaatatgggagtaaattcagcctttcttcttttcatctcagtcataacccaaaagctacgggagaaaaagcagaagtgtaatctctgtatctgacaaaattaggagacagctgcaaccctaatgagagggctgccacaggcagaggaaatgaagcactggtgcaggagatttcagagtgagagtgctcaaggctgcaggtgcaagacagcactggtaaggactcttagctgaggttcgggatataccccgaggcgcggaaccatagatataacagtggtaacagtgcgtgggcaggtaggaggtaggatgtttcctagaccatttggggtctgaggagaaacaggctggggcctcgagaaggagtcactcagacaagccatatttttagaaagtagtctactgatgggagcaacagttatggcatgctgggggaagagaagggacttttccttgtgaagagccctacagctgcccctatttactgacttgggagaagtaaagtcagaaagaacgaacagctgtggggggaaaaaattctcagttgtcaaaaaaaaaaaaaactgatctgcttagaatgtggccctggtttcttttcccacatgaacctccagcaaatagcaagtccaggaaaaactcttctcattcaaagaggaattattcaaaagtaatcaaaaccacaaatgcatttggtttttgggccagcaattccacttctaggaatgtacatactcacacatgtacaaaatgatgaacatacagtattcattaatgcagcgtttgtgaaaacaaaagattggaagctgtttaaatgacaccatatcagggttctggttccctaaattgtggtatattcatacagcctactcctgggtagacaacaatgaataaataaggagaacttggaaaccatttatgtagtgatgtgggataaccttcagtttatgttattaggtaggaaaaataaggttgaggacagtgactgccatttgtatataaaaaggagaaaaatggtaagtacataattgtgaattcataagttatctctggaaagagacatgagaacctggtaaccctgattaccttgggaggggaaggggcagtggtggctggggggatggaattgagagggagacaactgtatcctttcatagcttttgaaaatgtgggtgtactatgtactatgtggatgtactaccttttcaaaaataaaacatttaaaaagct

SEQ ID NO: 169527 - DNA, 1920 bp, Artificial Sequence
  derived and/or modified sequence
atgacacctgccagcgctagtggcgaagactccggctctttttatagctggcaaaaagcaaagcgagagcaggggctcgtcacattcgaagatgtcgcggtggacttcacacaggaagagtggcagtatctcaaccctccccagaggactctgtatcgcgatgtgatgctagaaacatactccaacttggtctttgtgggtcaacaggtcactaagcccaaccttatcctgaaacttgaagtcgaagaatgccccgcagaaggaaaaatccccttctggaattttccagaggtgtgtcaggtcgatgagcagattgaacgccagcatcaagacgaccaggataaatgtctgctgatgcaggtgggctttagcgacaagaagaccattataacaaagtctgcacgggactgccacgaatttgggaatatactgcacctctctacaaacctggtcgcaagcatccagcgccctgataaacacgaatcttttggtaacaatatggtcgataacctggatctgttctcccgcagttctgcagagaataagtacgacaacgggtgtgccaagctctttttccacacagaatacgaaaagaccaaccccgggatgaagccctatgggtacaaagagtgcggtaagggcttgcgccggaaaaaaggcttgtcactgcaccagagaattaaaaatggcgagaaacccttcgaatgtactgcttgtcggaagacattttctaagaaaagtcatctcatagtgcactggcgcacccatacaggggagaagccttttgggtgcactgagtgcggaaaggcattttcacaaaagtctcagttgattattcacctgagaactcatactggggaacgcccgtttgagtgcccagagtgtggaaaggccttccgagagaagtctactgtcattatccactaccgcacccacactggagagaagccatatgaatgcaacgaatgcggcaaagctttcacccagaagagcaatctcatcgtccatcagaagacacacaccggtgaaaagacctatgagtgtaccaagtgcggcgagagctttattcagaagttagacctgattattcaccactctactcacactggcaagaaaccacacgagtgcaacgagtgcaagaaaacgttcagtgataagagcaccctcattatacaccagaggacacacactggtgagaaaccgcacaaatgcacagaatgcgggaaaagtttcaatgagaaatccaccctgattgttcaccagagaactcatacaggagaaaaaccgtatgaatgcgatgtgtgcggaaagacttttacacagaaaagcaacctgggggtccaccagcgtacccattctggtgagaagccattcgagtgcaacgaatgcgagaaggcctttagccagaagagctatctaatgctgcatcagcggggccatactggagaaaagccctatgagtgtaacgagtgcgaaaaagccttctcacagaaatcgtatctgataatccaccagaggactcacactgaagagaagccctacaagtgcaacgagtgcggaaaggcgtttcgtgagaagtcgaaactgattattcaccagcgcattcacacaggtgaaaagccttacgaatgtcctgtgtgctggaaagcattctcacaaaagtcccagcttataatccatcaaagaacacatacaggagaaaagccatatgcatgcaccgagtgtggcaaggcctttcgcgaaaaatcaacatttaccgttcaccagagaacccatacgggcgagaaaccctacaagtgtacagaatgtggaaaagcattcacacagaagagtaacttgatcgtgcatcaacggacccacgcaggaaagaaggctcacggacgcggtcatacccgcaagtctaagttcatggctcactag

SEQ ID NO: 169528 - DNA, 1920 bp, Artificial Sequence
  derived and/or modified sequence
atgactcctgcttcagcaagcggcgaggatagtggatctttctactcttggcagaaggctaagcgtgagcagggcctcgtgactttcgaagacgtcgcagttgacttcactcaggaggagtggcagtacctcaacccaccccaaagaaccctttatagggacgtgatgcttgagacctactctaatctggtgttcgtcggccagcaggtaacaaagcctaacctcatcctgaaattggaggtcgaggagtgccctgcagaaggtaagatccccttttggaatttccccgaggtctgccaagtcgacgagcagatagagcggcagcaccaggatgatcaagacaaatgtttgcttatgcaggtaggatttagtgataagaaaaccatcatcaccaagtctgcccgggactgtcatgaatttgggaatattctgcacttgtctactaacttggtagcgtctatccagaggcctgacaagcacgagtccttcggcaataacatggtggataatttagacctcttctcccgatcatccgccgaaaacaagtacgacaacggctgcgcaaaactcttcttccacactgagtatgaaaagactaacccaggcatgaagccatatgggtacaaggaatgcggaaagggcttacgacggaaaaagggcctgtctttgcaccagagaatcaaaaacggcgagaagccttttgaatgcactgcttgtcgtaaaactttcagcaaaaagtcacatctgatcgtgcattggcgcactcatactggggagaaacccttcggttgtacagaatgtggtaaggctttctctcagaagtctcaactcattatccacctgcgaacccataccggggagcgcccttttgaatgcccggagtgcggaaaggcatttagagagaaatcgacagttataattcactacagaacacacaccggcgagaaaccctacgagtgtaacgagtgtggtaaggccttcacccagaagagcaatttaatcgttcatcaaaaaactcacacaggggaaaagacatacgaatgcactaaatgcggtgaaagtttcatccagaagctggatctcattatccatcattccactcataccggaaagaagccgcacgagtgtaacgagtgcaaaaagacattcagtgacaagtcgactctgataattcatcagcggacgcacaccggggagaaaccacacaaatgcaccgagtgtggtaaaagcttcaatgaaaaatctactctcatcgtgcatcagcgaactcatacaggagagaaaccttacgaatgcgatgtttgcggtaagaccttcacacagaagagcaacctaggcgtgcaccagcggactcattctggcgagaaacccttcgaatgtaatgagtgtgaaaaggctttttcacagaagagttacctcatgctgcatcaacgtggacacaccggggagaaaccctacgaatgtaacgagtgcgaaaaggcattcagccaaaagtcctatttaataattcaccagagaacccacaccgaagagaaaccatacaaatgtaatgagtgcggaaaggctttccgagagaaatctaagttgattattcaccaacgaatccacacaggggaaaaaccctacgagtgtcctgtatgttggaaggccttttcccagaaaagccagctgatcatccaccagcggacgcacacaggtgagaagccctatgcctgtacagaatgcggaaaggcctttagggagaagtccacctttacagtgcatcaacgcacccacacaggggagaagccttacaaatgcacagaatgtggaaaggccttcacgcagaagagcaacctgatagtgcatcaaagaacacacgcagggaagaaagctcacggccgtggccacacccgaaagagcaagttcatggctcattag

SEQ ID NO: 169529 - DNA, 1920 bp, Artificial Sequence
  derived and/or modified sequence
atgacccccgccagcgccagcggcgaggacagcggcagcttctacagctggcagaaagctaagagggagcagggtctggttacatttgaggacgtcgccgttgacttcacacaggaggagtggcaatacttgaatcccccccaacggacattgtatagagacgtcatgttggagacctactccaacttggtcttcgttggccaacaggtgacaaaacctaacctgattcttaagctggaggtggaggaatgtccagctgagggtaagatccccttctggaactttccagaggtctgtcaggtggacgagcagatcgagagacagcatcaagacgatcaggataagtgcctgctgatgcaggtgggcttctcagacaaaaagacaatcattactaagtctgcccgagactgtcacgagttcgggaatatactgcacttatctacaaatttggtcgcctccatccaacgcccagacaagcacgagtctttcggcaataatatggttgataatctcgacctctttagcaggtcaagtgctgagaacaagtacgataatgggtgtgcgaaactgttttttcacacagaatacgagaaaacaaacccaggtatgaagccttacgggtataaagagtgcgggaaggggctccggcgcaaaaaaggactctcacttcaccagagaatcaagaacggggaaaagccattcgagtgcactgcttgccgaaagaccttctcgaaaaagagtcacctgatcgtccactggagaacccacaccggcgaaaaacctttcggttgcaccgaatgtggaaaggcgttttctcagaaatcccagctgatcatccacctgaggacacacactggggagagaccattcgagtgtcccgaatgcggcaaagcctttagggaaaagtcaaccgtaattatccattatcggactcacactggagaaaagccatatgagtgcaatgaatgtggaaaggccttcacacaaaaaagcaacctgattgtgcaccagaaaacccatactggggagaagacttacgagtgcactaagtgcggggagtcctttatacagaagctggatctgatcatccaccattcgactcatacggggaagaagcctcatgagtgcaacgagtgtaagaaaaccttctccgataagtctacactcatcatccaccagagaacacacacaggcgagaaaccccacaaatgcactgagtgcgggaaatctttcaatgagaaatcaaccttgatcgtgcatcaaagaacccacacgggggagaagccctacgaatgcgacgtgtgcggcaagacattcacacaaaaaagtaacctaggagtgcatcagcggacccattccggggaaaaaccctttgagtgtaatgagtgtgagaaagctttctctcagaagtcttacttaatgctgcatcagcggggacatactggcgagaagccatacgaatgcaacgagtgtgagaaagctttctctcagaagtcatacctgattattcatcagcgcactcatacagaggaaaagccctacaaatgtaatgaatgcggcaaggcatttcgagagaaatcaaaactgatcatccatcagcgcattcacacaggtgaaaaaccttacgagtgcccagtgtgctggaaggccttctctcagaagtcacaactgattatccaccagcgcacccacacaggtgaaaagccatacgcttgcacagagtgtggcaaggctttccgtgaaaagagcacctttacagtccatcaacgtacgcacaccggcgagaagccttacaaatgcacagagtgcgggaaagcctttactcagaaatctaaccttattgtacaccagcgaacccacgcaggtaaaaaggctcacggccgcgggcatacacgtaagagtaagtttatggcccactag

SEQ ID NO: 169530 - DNA, 1920 bp, Artificial Sequence
  derived and/or modified sequence
atgacccccgccagcgccagcggcgaggacagcggcagcttctacagttggcaaaaagcaaaacgcgagcaagggttagtaacgtttgaggatgtggctgtcgactttacccaggaagaatggcagtatctgaatcctccgcagcgaacactgtaccgagatgtgatgctcgaaacatactccaatctggtgttcgtcggccagcaggtcacaaagccaaaccttatcctcaagctggaggtagaagagtgtcccgcagaagggaagatcccgttctggaactttcctgaagtctgtcaggttgacgagcagatcgagagacagcatcaagatgaccaggacaagtgtctcctgatgcaggtgggcttttcagataaaaagactatcataaccaagtccgcaagggactgccatgagtttggcaatatactccatctgtcaaccaatctggtagcttcaatacaaaggcctgacaaacacgaaagcttcggcaataacatggttgacaatcttgacttgttttctcggagcagcgccgagaataaatacgataacggctgcgccaaactgttctttcacactgagtatgaaaagactaatcctgggatgaaaccttatggatataaagagtgtgggaaagggctgcgcagaaagaagggcctcagtttgcaccagcgtattaaaaatggcgaaaaaccattcgaatgtacagcatgtagaaaaactttctccaagaaatcgcatttaatagtccactggagaacacatacaggggagaagcccttcggatgtactgagtgcggtaaggcattttcacagaagtcccagctgatcatccacctgcgtacacacacaggagagaggccctttgagtgccccgagtgtggaaaagccttcagagagaaaagcaccgtcatcatccactaccgcacacacaccggggagaaaccatatgaatgcaacgagtgcggcaaggctttcactcagaaaagtaatctaatcgtccaccagaaaactcacaccggtgagaaaacatacgaatgtactaagtgcggtgagtcatttatccagaagctggacctgataatccaccactctacccataccggtaagaagcctcacgagtgcaatgaatgcaaaaaaacgtttagtgataagtctactctgattatccaccagagaacccacacgggtgagaagccccataagtgtaccgaatgcgggaaatcgttcaacgagaagagcacgctaatcgtgcaccagcgaactcataccggagaaaagccctatgagtgcgacgtctgtggtaagacctttacccagaaaagcaacttgggggtacatcagcgcacccacagcggggaaaaaccctttgagtgtaacgaatgcgagaaagcgttctcacaaaaatcttaccttatgttacaccagagggggcatacgggggagaagccatacgagtgcaacgagtgcgagaaggcctttagccagaaatcttatcttattatccaccagagaactcacaccgaggagaagccatataagtgcaatgagtgcggtaaggcctttcgcgaaaaaagcaaactgattatccaccaacggattcacactggtgagaaaccttacgagtgtccagtttgttggaaagctttctcccaaaagtcacaactgatcatccatcagcgaacccacacaggagagaaaccgtacgcttgtacagaatgtgggaaagccttccgcgaaaagtctacttttaccgtgcatcagagaacacacaccggtgaaaaaccctacaagtgtacagagtgtggcaaggcgttcacccagaagtcaaacctgattgtccatcagcggacccatgccgggaaaaaagcgcatgggcggggccacacacgcaaatctaaattcatggctcattag

SEQ ID NO: 169531 - DNA, 1920 bp, Artificial Sequence
  derived and/or modified sequence
atgacacccgcttccgcatcaggtgaggattctggcagcttctacagctggcagaaggccaagcgcgaacaaggactcgtgactttcgaggacgtcgccgtcgattttacgcaggaagaatggcaatatcttaaccccccacagagaaccctgtatcgcgatgtcatgctggagacctactccaaccttgtgttcgtggggcagcaggtgacgaaacccaacctcatcctgaagctcgaggtagaagagtgccccgcagaaggaaaaatcccattctggaatttcccagaggtgtgtcaggtcgacgagcagatcgaaagacagcaccaggacgatcaggataaatgcctgctgatgcaggtgggtttctcagacaaaaagaccattataactaaatcggctagggactgtcacgagtttggcaacatcctccatctgtccacaaacctcgtagccagtatacaaagaccagataagcacgagtcatttggaaataatatggtggataacctggatctgttctcacgcagctcggccgagaataaatacgataacggttgtgctaagttgtttttccacaccgagtatgaaaagaccaacccgggaatgaagccctatggttacaaagagtgtgggaagggcctgcgccgtaagaagggcttgtctcttcaccagaggattaaaaacggagagaaaccatttgagtgtacggcgtgcagaaaaaccttttccaaaaagtcgcatctcatcgttcactggaggacccacacaggtgagaagcctttcgggtgcaccgagtgcggcaaagcgttctcccagaaatcccaactgatcatacacctgagaacccatacaggagagcgaccttttgagtgtccagagtgcgggaaggctttccgcgaaaagtccacagtgattatccactacagaacgcacaccggagagaagccttacgagtgtaatgaatgcggcaaagcttttactcagaagtccaatctgatagtgcaccagaaaacacataccggcgagaaaacttatgagtgcaccaaatgcggcgagagttttattcagaaattagacctaatcattcaccacagtacgcataccggcaagaaaccccacgagtgtaacgagtgtaaaaaaaccttttctgataagtccacactcattatccatcagcggactcacactggggagaaaccccacaaatgcacggagtgcggcaagtctttcaatgagaagtcaaccctcatagtgcaccagaggacacatacgggggaaaaaccctacgaatgcgatgtatgcggcaaaaccttcacacagaagagtaatctgggagtacaccagagaacgcactctggagaaaagccgttcgaatgcaatgagtgtgagaaagctttctctcagaaatcctacctcatgcttcaccagcggggacacacaggggagaaaccgtatgaatgcaatgagtgtgagaaggctttctctcagaaatcttatctcatcattcaccagcgtacacatacagaagagaagccttataagtgcaatgaatgtgggaaagcattccgagaaaaaagcaaattgatcatccaccaacgaattcacacaggggaaaagccctatgagtgccctgtttgttggaaggcattttctcagaaatcacaacttattatccaccagagaactcataccggtgagaagccatatgcctgtacagagtgtggcaaagcgtttcgcgagaagtctaccttcaccgtccaccaaaggactcacaccggcgagaagccatataagtgtacggagtgtgggaaggcttttacccaaaagtccaacctcatagtccatcagagaacacatgcaggtaaaaaagctcacggacgcggtcataccagaaaatccaagttcatggcgcactag

SEQ ID NO: 169532 - DNA, 1920 bp, Artificial Sequence
  derived and/or modified sequence
atgacccctgcttcagcttccggcgaggattctggttctttctactcctggcaaaaggctaaaagagagcaaggcctagtgacattcgaggatgtagcagttgactttacccaggaagagtggcagtatctcaatccccctcaaagaactctttatagggatgtgatgctggaaacctatagcaacctggtcttcgtcggacaacaggttacaaagcccaatctgatcttgaagcttgaagtggaggagtgccccgcagaaggaaagattcccttctggaatttcccagaggtgtgtcaggtcgacgagcagatcgagcgtcagcatcaggacgaccaggataagtgcctactgatgcaagtcgggttctcagataagaagaccataattactaagagtgcacgggattgccacgagtttggcaacattttgcatctgtccactaatttggtcgcctctatacagaggcccgacaagcacgagagctttggcaataacatggtagataatctcgatctcttttccagatcaagtgccgagaacaagtacgacaacgggtgcgcgaaattgttctttcacacagaatatgagaaaacaaatcccggaatgaagccctacgggtataaggagtgcggcaaagggctgaggagaaagaaggggctgtctctgcaccagcgcatcaagaatggcgagaagccgttcgagtgtaccgcctgcagaaagacgttctcgaagaagtcgcacctcattgtccactggaggacccataccggcgagaagcctttcggatgcacggaatgtggaaaagcttttagtcaaaaaagtcaactcatcatccacctgcgaacccacacaggcgagagaccctttgaatgtccagagtgtggaaaggcttttcgagaaaagtctaccgtcattattcactatagaacccatactggtgaaaaaccctatgagtgtaatgagtgtggtaaggctttcacccagaaatctaaccttatcgtgcaccaaaagacacacacaggcgaaaagacatacgagtgtactaagtgcggtgagagctttatccagaagttggacctgattatccatcactccacccataccgggaaaaaaccacacgagtgtaacgagtgtaaaaaaactttttccgataaaagtaccttgataattcatcagcgcactcacaccggtgagaagccccacaaatgtacagaatgtggtaaatcttttaacgaaaaaagcaccctgatcgttcaccagagaacgcataccggcgaaaaaccgtacgaatgcgacgtgtgtggcaaaaccttcacacagaagtctaacttaggcgttcatcagcgcactcactcaggcgagaagcccttcgaatgcaatgaatgcgaaaaagcgttttcacaaaagtcatacctgatgttgcatcaacggggacataccggggagaaaccctacgagtgcaacgaatgtgaaaaagctttttcccaaaaaagctatttaattatacaccaaaggactcacacagaagaaaagccatacaaatgcaatgaatgcggcaaagcctttcgggagaaatccaagctgataatccaccagcggatccacacgggagaaaaaccttatgagtgtcccgtttgctggaaggctttctctcagaagagccagctcataattcatcagcgtacacataccggcgagaagccatatgcctgcaccgaatgcggcaaggcctttcgggagaaaagcacctttacagtgcatcagcgtactcataccggagaaaagccttataagtgcaccgaatgtggcaaggcgtttacacagaaatcaaatctgatagtccaccaaaggacgcacgccggaaagaaggcccatgggcgaggccacacacgcaaaagcaagtttatggcccattag

SEQ ID NO: 169533 - DNA, 3573 bp, Artificial Sequence
  derived and/or modified sequence
agtgcttgttggggccaggctttgtaacggtctcctgagcagcgagcagaaaatctgttatcgagagagacacagtgacctgcccctaaaggttcatgcgcatccctcagacccctctttagacgcgccccgcttctccctctgccctctccccttgcccaagccccgaggtgggggcctggtgtgaatgctccggccgaagtgaacctgcacccccgcacccgaaggcctctttccggcttctgggcaaggcggccccggtgagctcggccgtcacacatctctgctttttcccaagaagagcaggaaatggccaaaccccagtcctgcaagctgtacaagaagcatgacaccagcatctgcatctggtgaggactcaggaagcttctactcatggcagaaggcaaagagggaacaggggctagtgacatttgaagatgtagctgtggatttcacccaggaggagtggcagtacctgaacccaccacagaggaccctgtacagagacgtgatgctggagacctacagcaacttggtctttgtggggcagcaggttaccaaaccaaacctcatcctcaagttggaggtagaagaatgcccggcagaaggaaaaatcccattttggaactttccagaagtctgtcaagttgatgaacagattgagaggcaacatcaggatgaccaagataaatgtctgctgatgcaagttggattttctgacaagaaaacaattatcaccaagagtgctcgtgactgtcatgagtttggaaacatacttcatctgagtacaaaccttgttgcttcaatacaaagacccgataaacacgaatcatttggaaataatatggtagataatttagacttatttagtagaagttctgcagaaaataaatatgataatggatgtgcaaaattgttcttccatactgagtatgagaaaacaaatcctggaatgaagccctatggctataaagagtgtgggaaaggtcttaggcgaaagaaaggccttagtctacatcagagaattaaaaatggagagaaaccctttgaatgtactgcatgtaggaaaaccttcagcaagaagtcacacctcattgtacattggagaactcatacgggagagaaaccttttggatgtaccgaatgtggaaaagcttttagccaaaaatctcagctcattatacacttgcgaactcatacaggagagagaccctttgagtgtcctgaatgtggaaaagccttcagagaaaagtcaactgtcatcatacattacaggactcacacaggagaaaaaccttatgaatgtaatgaatgtggaaaagccttcactcagaagtccaacctcattgtccatcagaaaacccacactggagagaaaacctatgaatgcactaaatgtggagaatctttcatacagaagcttgatctaattatacatcatagtacccatacaggaaagaaaccccatgaatgtaatgagtgtaagaaaactttcagtgataagtcaactctcattatacaccagagaactcatacgggagagaaacctcataaatgtactgaatgtgggaagtctttcaatgagaagtcaaccctcattgtgcatcaaagaactcatacaggagagaaaccctatgaatgtgatgtgtgtggaaaaaccttcacgcaaaagtcaaaccttggtgtacatcagagaactcattcaggagagaaaccctttgaatgtaatgaatgtgagaaagccttctctcagaagtcctacctcatgctgcatcagagaggtcatacaggagagaaaccttacgagtgcaatgaatgtgaaaaagcattttcacagaaatcatatctcattatacatcaaagaactcatacagaagaaaaaccctataaatgtaatgaatgtggcaaagccttcagagaaaagtcaaagctcattatacatcagagaattcatacaggagagaaaccttatgaatgtcctgtgtgttggaaagcttttagccagaagtcacagctcataatacatcagagaacgcacacgggagagaaaccctatgcatgcactgagtgtggcaaagccttccgagaaaagtcaacattcactgtacatcaaagaactcatactggagagaaaccctataaatgtacagaatgtgggaaagcctttacccaaaaatcaaaccttattgtacatcagcgaacccatgcaggaaagaaagcccatggaagaggccacactcggaagtcaaagttcatggcacattagagagctaatcagcagtatctattatggacactgaaagaaagttgtgtcaattttactcacattttaaaagtatattttgacttgtggtttaaatatgggagtaaattcagcctttcttcttttcatctcagtcataacccaaaagctacgggagaaaaagcagaagtgtaatctctgtatctgacaaaattaggagacagctgcaaccctaatgagagggctgccacaggcagaggaaatgaagcactggtgcaggagatttcagagtgagagtgctcaaggctgcaggtgcaagacagcactggtaaggactcttagctgaggttcgggatataccccgaggcgcggaaccatagatataacagtggtaacagtgcgtgggcaggtaggaggtaggatgtttcctagaccatttggggtctgaggagaaacaggctggggcctcgagaaggagtcactcagacaagccatatttttagaaagtagtctactgatgggagcaacagttatggcatgctgggggaagagaagggacttttccttgtgaagagccctacagctgcccctatttactgacttgggagaagtaaagtcagaaagaacgaacagctgtggggggaaaaaattctcagttgtcaaaaaaaaaaaaaactgatctgcttagaatgtggccctggtttcttttcccacatgaacctccagcaaatagcaagtccaggaaaaactcttctcattcaaagaggaattattcaaaagtaatcaaaaccacaaatgcatttggtttttgggccagcaattccacttctaggaatgtacatactcacacatgtacaaaatgatgaacatacagtattcattaatgcagcgtttgtgaaaacaaaagattggaagctgtttaaatgacaccatatcagggttctggttccctaaattgtggtatattcatacagcctactcctgggtagacaacaatgaataaataaggagaacttggaaaccatttatgtagtgatgtgggataaccttcagtttatgttattaggtaggaaaaataaggttgaggacagtgactgccatttgtatataaaaaggagaaaaatggtaagtacataattgtgaattcataagttatctctggaaagagacatgagaacctggtaaccctgattaccttgggaggggaaggggcagtggtggctggggggatggaattgagagggagacaactgtatcctttcatagcttttgaaaatgtgggtgtactatgtactatgtggatgtactaccttttcaaaaataaaacattt

SEQ ID NO: 169534 - protein, 224 aa, Artificial Sequence
  derived and/or modified sequence
MRLAKPKAGISRSSSQGKAYENKRKTGRQRQKWGMTIRFDSSFSRLRRSLDDKPYKCTECEKSFSQSSTLFQHQKIHTGKKSHKCADCGKSFFQSSNLIQHRRIHTGEKPYKCDECGESFKQSSNLIQHQRIHTGEKPYQCDECGRCFSQSSHLIQHQRTHTGEKPYQCSECGKCFSQSSHLRQHMKVHKEEKPRKTRGKNIRVKTHLPSWKAGTGRKSVAGLR

SEQ ID NO: 169535 - DNA, 2204 bp, Artificial Sequence
  derived and/or modified sequence
aaacgaacaacgctttcgggtgggcccgggaccatagagggtcgctccgccactttcctagagcgaccgcggcggcgccagagcgcggcgaggccctcacttccggcggcgcgggaggcgcccagcgagccagagtggtggctggtcccgcgcgaaaattctgagctgtacacctctaggaaatgaaacactagttcagaagaagcctgtaaactctcttacaaatacatttggttattcaccatgaggttagcaaagcctaaagcgggtatttctcggagctcaagccaaggaaaggcctatgagaacaagcgcaaaacaggccggcagcggcagaagtggggcatgactattcgatttgactcaagcttcagtagactcagaagaagcttggatgacaaaccctataaatgtactgaatgtgaaaagagtttcagtcagagttcaactctttttcaacaccagaagatccatactggaaagaaatcccataaatgtgctgattgtgggaaaagtttctttcagagttctaatctcattcagcatcgacggatccatacgggggaaaagccctacaaatgtgatgagtgtggagaaagcttcaaacagagctcaaatctcattcagcaccagagaattcatactggagaaaaaccctatcagtgtgatgagtgtggccggtgtttcagccagagctcccaccttattcaacatcagagaacccacactggggagaaaccctaccagtgcagtgaatgtggcaaatgtttcagtcagagctctcatctgaggcagcacatgaaggtgcataaagaagagaagcctcgtaaaacccggggcaaaaatatcagggtgaagactcacttaccctcttggaaagctggtacaggaaggaagtctgtggctggtctccgttaagtatagggctttttgacagctttttgagacctcttaagaaaaaataaaaagtaaaaaatgaaaggaatcttttttagaaatagagatgctttatagtagatcacttaaatactggatcttttgctagtgtgaaaacattgggaatttaatgacattattgagctgaaagaaattacatgagtccagctaccctcatttcttttttatgtgacatggagcacaaagaactgaaaatatgttttgagggagcatgacatccttgacctcatttgaaattacttccattttcaaaaaccatcatgttttgtagatacattttgagaaaaaccatcatgttttgaggatacatttgtgaaagtgcaggcatgccaatgactactcagttttaggactttctgtggaagaaaaaagggagaagaaatcaattccactacttttgaagttctgcaacagatgagattttgtttgtaaagttttgtagtatattaaccattggtttatcactctagattcaacatattaaaatgtattcaagctcacagatttttaatcagtaaggcctatctatattagttgtcttttatttcttctccttgtggacagttgttaatgaaaggagtaaggatttccctttttttgttttgtttgttttgttttttttaaccaaattcttagagatactatagaatccaaatgagaactgaattggacctcaagtcttctattcctactaatagagttctttgtgatggtaactgctgtgtcgtttgttttccacaagttgggatggattcatgtcgatacatccccatgcccttgacctcttctggcattctcctgtgctctgacaaactgagccagccttttagatctacatgaataaacaaactattttaccaagaaaaatctcagcttgcttactgcttaattaaaaacctacaatttacacacctccctgccttcaagactgtgagctttggatagccctgcttaaatgtttgtcaacaacaagagtcgtaatgtgtcagtacattgtagctcctttgaaatttaactctttctgtgttacatgaattgttttaaggagtccggcaaacatgtttcttcacttccatgagaatggtgccaagtgtcagactctaatgagccctcagctcaggttttaatttctattgaatgctaacattcttctgattttttggtatcttttataatcatatcggtttctgctgtattaatgacaattattcatgaaaataaaaaatgaaatattttgtatactacta

SEQ ID NO: 169536 - DNA, 675 bp, Artificial Sequence
  derived and/or modified sequence
atgagactggccaagcccaaggccggcatcagcagaagcagcagccagggcaaggcctacgagaacaagagaaagaccggcagacagagacagaagtggggcatgaccatcagattcgacagcagcttcagcagactgagaagaagcctggacgacaagccctacaagtgcaccgagtgcgagaagagcttcagccagagcagcaccctgttccagcaccagaagatccacaccggcaagaagagccacaagtgcgccgactgcggcaagagcttcttccagagcagcaacctgatccagcacagaagaatccacaccggcgagaagccctacaagtgcgacgagtgcggcgagagcttcaagcagagcagcaacctgatccagcaccagagaatccacaccggcgagaagccctaccagtgcgacgagtgcggcagatgcttcagccagagcagccacctgatccagcaccagagaacccacaccggcgagaagccctaccagtgcagcgagtgcggcaagtgcttcagccagagcagccacctgagacagcacatgaaggtgcacaaggaggagaagcccagaaagaccagaggcaagaacatcagagtgaagacccacctgcccagctggaaggccggcaccggcagaaagagcgtggccggcctgagatag

SEQ ID NO: 169537 - DNA, 675 bp, Artificial Sequence
  derived and/or modified sequence
atgcgcctggccaaacctaaggcaggcatctcgcggagcagctcacaggggaaagcatatgaaaacaaaagaaagacagggcgccagagacagaagtggggcatgacaattaggttcgattcatctttctcaaggctgcgaaggagcttagacgacaagccctataagtgtaccgagtgcgagaagtccttctcacagagttctactctgtttcagcatcagaaaattcatacagggaagaaatctcacaagtgcgccgactgcggaaagtcttttttccagagctctaatctcatccagcatcgccgaatccataccggggagaagccctataaatgcgacgaatgtggggagagctttaagcaaagctccaatctcattcagcatcaacggatccacaccggggaaaagccttaccagtgtgacgagtgcggccgctgtttttcccagtcctcccacctcatacagcaccaaagaacacacacgggagaaaagccgtaccagtgctccgaatgcggcaagtgcttcagccagtcatcccacctcagacagcatatgaaagtgcacaaggaagagaaacctagaaaaacccgaggtaagaacatccgagtcaaaacacatctcccgagctggaaggctggaactggacggaaaagtgtggccggcttgaggtag

SEQ ID NO: 169538 - DNA, 675 bp, Artificial Sequence
  derived and/or modified sequence
atgaggctggccaagcccaaggccggcatcagccgcagcagcagccagggcaaggcctatgagaacaagaggaagacaggccggcagaggcagaagtggggcatgaccatccgctttgacagcagcttcagccggctgcggcgcagcctggatgacaagccctacaagtgcacagaatgtgagaagagcttcagccagagcagcaccctcttccagcaccagaagatccacacaggcaagaagagccacaagtgtgccgactgtgggaagagcttcttccagagcagcaacctgatccagcaccggcgcatccacactggagagaagccctacaagtgtgatgaatgtggggagagcttcaagcagagcagcaacctgatccagcaccagaggatccacactggagagaagccctaccagtgtgatgaatgtggccgctgcttcagccagagcagccacctgatccagcaccagaggacccacactggagagaagccctaccagtgcagtgaatgtgggaagtgcttcagccagagcagccacctgcggcagcacatgaaggtgcacaaggaggagaagcccaggaagacccggggcaagaacatccgggtgaagacccacctgcccagctggaaggccggcactggaaggaagtctgtggccggcctgaggtag

SEQ ID NO: 169539 - DNA, 675 bp, Artificial Sequence
  derived and/or modified sequence
atgcggctggccaagcccaaggccggcatcagccggagcagcagccaggggaaggcttacgagaacaaaaggaaaaccgggagacaacggcaaaagtgggggatgactattagatttgattctagttttagccggctcagacgtagcctggatgacaaaccctacaagtgcaccgaatgtgaaaaaagcttctctcagagctccactcttttccagcaccagaagattcacacgggaaagaagagtcacaagtgtgctgattgcggaaaaagctttttccagtcttcaaatcttatccagcatcggcgtatccatactggagagaagccctacaaatgcgacgagtgcggggagagcttcaaacagtcctccaatctgatccagcaccagcggattcatactggggaaaagccctatcagtgcgacgaatgcggaaggtgttttagtcaatcaagccacctgattcagcatcaacgcacacacactggtgagaagccctaccagtgctctgaatgcgggaagtgcttctctcagtcgagtcaccttagacagcacatgaaggtgcacaaggaagagaaacctcgtaagactcggggtaaaaatatcagagttaaaacccacctgccctcttggaaagccggcactggccgtaaatccgtggcaggcctgagatag

SEQ ID NO: 169540 - DNA, 675 bp, Artificial Sequence
  derived and/or modified sequence
atgagactcgccaagccaaaggccggaatttctcgcagctcaagccagggtaaggcctacgagaataagcgtaagacaggcaggcagcgccagaaatgggggatgacaattcgttttgatagcagcttttctcggctgaggcgatcattggatgacaaaccatacaagtgcacggagtgcgagaagtcatttagccagagctctaccttgttccaacatcagaagatccacacaggcaaaaagtctcataaatgtgcagattgcggcaagtctttttttcagtcctccaaccttattcagcaccggcgtattcacaccggagagaagccttataaatgtgatgagtgtggtgagtcatttaaacaatcctccaacttaattcaacatcagcgtattcacaccggggagaagccatatcagtgtgatgaatgtggcagatgcttttcacagtctagtcaccttatccagcatcagcggacccatactggcgagaagccctatcaatgctcagaatgtggcaaatgcttttctcagtcctcacaccttcgccagcacatgaaagttcataaagaagaaaagccaagaaagaccagaggcaaaaacattagggtcaagacccacctcccctcttggaaggctggtacgggcagaaagagtgtggctgggcttcggtag

SEQ ID NO: 169541 - DNA, 2551 bp, Artificial Sequence
  derived and/or modified sequence
gaaatcagactttggagccacaaagaaccattccaattctgggtcgtccgcttacacacggtgaacggagcacatttcttctctgagccttggttcctttcctgtaaatggagtataaccactcccatcttgcaggagctttttggtgataattaaggtgacttcgtgaaaagtaccagggtctcaaaaatctcaaaatttgtggaaagtatgcagtttctaggttggagaggctagagtttggtttcaaaagcctcgaccacacacaggggcggttacagctcttgaggtcccgggggtcacaggacgccttccgagttggggggaggagaaaacaaaaccacaggaagaaacgaacaacgctttcgggtgggcccgggaccatagagggtcgctccgccactttcctagagcgaccgcggcggcgccagagcgcggcgaggccctcacttccggcggcgcgggaggcgcccagcgagccagagtggtggctggtcccgcgcgaaaattctgagctgtacacctctaggaaatgaaacactagttcagaagaagcctgtaaactctcttacaaatacatttggttattcaccatgaggttagcaaagcctaaagcgggtatttctcggagctcaagccaaggaaaggcctatgagaacaagcgcaaaacaggccggcagcggcagaagtggggcatgactattcgatttgactcaagcttcagtagactcagaagaagcttggatgacaaaccctataaatgtactgaatgtgaaaagagtttcagtcagagttcaactctttttcaacaccagaagatccatactggaaagaaatcccataaatgtgctgattgtgggaaaagtttctttcagagttctaatctcattcagcatcgacggatccatacgggggaaaagccctacaaatgtgatgagtgtggagaaagcttcaaacagagctcaaatctcattcagcaccagagaattcatactggagaaaaaccctatcagtgtgatgagtgtggccggtgtttcagccagagctcccaccttattcaacatcagagaacccacactggggagaaaccctaccagtgcagtgaatgtggcaaatgtttcagtcagagctctcatctgaggcagcacatgaaggtgcataaagaagagaagcctcgtaaaacccggggcaaaaatatcagggtgaagactcacttaccctcttggaaagctggtacaggaaggaagtctgtggctggtctccgttaagtatagggctttttgacagctttttgagacctcttaagaaaaaataaaaagtaaaaaatgaaaggaatcttttttagaaatagagatgctttatagtagatcacttaaatactggatcttttgctagtgtgaaaacattgggaatttaatgacattattgagctgaaagaaattacatgagtccagctaccctcatttcttttttatgtgacatggagcacaaagaactgaaaatatgttttgagggagcatgacatccttgacctcatttgaaattacttccattttcaaaaaccatcatgttttgtagatacattttgagaaaaaccatcatgttttgaggatacatttgtgaaagtgcaggcatgccaatgactactcagttttaggactttctgtggaagaaaaaagggagaagaaatcaattccactacttttgaagttctgcaacagatgagattttgtttgtaaagttttgtagtatattaaccattggtttatcactctagattcaacatattaaaatgtattcaagctcacagatttttaatcagtaaggcctatctatattagttgtcttttatttcttctccttgtggacagttgttaatgaaaggagtaaggatttccctttttttgttttgtttgttttgttttttttaaccaaattcttagagatactatagaatccaaatgagaactgaattggacctcaagtcttctattcctactaatagagttctttgtgatggtaactgctgtgtcgtttgttttccacaagttgggatggattcatgtcgatacatccccatgcccttgacctcttctggcattctcctgtgctctgacaaactgagccagccttttagatctacatgaataaacaaactattttaccaagaaaaatctcagcttgcttactgcttaattaaaaacctacaatttacacacctccctgccttcaagactgtgagctttggatagccctgcttaaatgtttgtcaacaacaagagtcgtaatgtgtcagtacattgtagctcctttgaaatttaactctttctgtgttacatgaattgttttaaggagtccggcaaacatgtttcttcacttccatgagaatggtgccaagtgtcagactctaatgagccctcagctcaggttttaatttctattgaatgctaacattcttctgattttttggtatcttttataatcatatcggtttctgctgtattaatgacaattattcatgaaaataaaaaatgaaatattttgtatacta

SEQ ID NO: 169542 - protein, 368 aa, Artificial Sequence
  derived and/or modified sequence
MSAQSVEEDSILIIPTPDEEEKILRVKLEEDPDGEEGSSIPWNHLPDPEIFRQRFRQFGYQDSPGPREAVSQLRELCRLWLRPETHTKEQILELVVLEQFVAILPKELQTWVRDHHPENGEEAVTVLEDLESELDDPGQPVSLRRRKREVLVEDMVSQEEAQGLPSSELDAVENQLKWASWELHSLRHCDDDGRTENGALAPKQELPSALESHEVPGTLNMGVPQIFKYGETCFPKGRFERKRNPSRKKQHICDECGKHFSQGSALILHQRIHSGEKPYGCVECGKAFSRSSILVQHQRVHTGEKPYKCLECGKAFSQNSGLINHQRIHTGEKPYECVQCGKSYSQSSNLFRHQRRHNAEKLLNVVKV

SEQ ID NO: 169543 - DNA, 6311 bp, Artificial Sequence
  derived and/or modified sequence
cagcccgcgccgggggcttctgggaaaaggcttgtgaacggcgtttctgcgtctgccgtggacagcgaagctgctgcggttcctgagccggaggtttgcgccggagtgcctgtgaagaaaacggggtattgccctgaggcttatattctgcctcagttgtcttttcttgaaatattataaatcagaatgtctgcacagtcagtggaagaagattcaatacttatcatcccaactccagatgaagaggaaaaaattctgagagtgaagttggaggaggatcctgatggcgaagagggatcaagtatcccctggaaccatctcccagacccagagattttccgacagcgattcaggcagtttggataccaggattcacctgggccccgtgaggctgtgagccagctccgagaactttgccgtctgtggctcaggccagagacgcacacaaaagaacaaatcttggagctggtagtgctggagcagtttgttgccatcctacccaaagagctacagacttgggttcgagatcatcatccagagaatggagaggaggcagtgacagtgctggaggatttggagagtgaacttgatgaccctggacaaccggtttctctccgtcgacgaaaacgggaagtactagtagaagacatggtatctcaagaagaagctcagggattaccaagttctgagcttgatgctgtggagaaccagctcaagtgggcatcctgggagctccattccctaaggcactgtgatgatgatggtaggactgaaaatggagcactagctccaaagcaggagcttccttcagcattagaatcccatgaagttcctggcactctcaatatgggtgttcctcaaatttttaaatatggagaaacctgtttccccaagggcaggtttgaaagaaagagaaatccctctcgaaagaaacaacatatatgtgatgaatgtggaaaacacttcagtcagggctcagcccttattcttcatcaaagaattcacagtggggagaaaccttatggatgtgttgagtgtgggaaagcattcagccgaagttccattcttgtgcaacaccagagagtccacactggagaaaaaccttacaaatgtcttgaatgtgggaaagcctttagccagaattcggggcttattaatcatcagagaatccatactggggagaaaccttatgaatgcgttcagtgtgggaaatcgtatagtcaaagctcaaatctttttagacatcagagaagacacaatgcagaaaaacttctgaatgttgtgaaagtttaagaaattgaaaaaaaaaaaagaatcagcactcaggtctttttcttcagaaatgaagacaaaatttaaaatatgaaatgatgcagaatagttttttccctattgactgtcagaaaatccactgggaaatgtaaaaatcttcactcaccattatgatatttatcttgaaagaaatggtgtcatacctgcctagaaactgaaattttaaacttaattcaggtcttaatgcctaaattttccatgtgatgtttatagtctgtattacttctccaaataatgaactacctgattcattgtccctttcttgaaagtttcttttttaagacaaatacattatttctgcattgatcattgaaatgttctttatatggatacattcccttatatattaaaaggcaacaggaattacaaagtctgaaaaccattttaaaccatcttttaaaaatttacccttatttccttttacctaatttgaatatgcatttgagaaaataagaggataaaggatggctaagagcctcaaaatgaaccataagatctcagataagaagtgatggtgataaaacatcaaaaagtgaatggaacaccttgattggggaagatatgcaaatactttgatctaagaattgaaatgtatcaagaatttatattttgcctgcaggaaaattcaaaagctactcatcctctctataatttggagtcatcttactaatgaaaataatgttttcccatatattattaaaaagcatacagtctaaataataaacagttgtaaaataatgaaggtagaaattataacactagggaaaaatttgtagcggatggcagtgttgaaggcaaatgtaaacataagggtaatggtctgtcatggcttttagaaaaagatgatagagttcatcattattttgccttcatctttgttaaggacagaaaattccctgacaggtgggcaagtatcaggttacctattttttattcctttggtacaaaagggttgaacgtcaggctaaaaaagcagccatgcatttattattaaacattttctaccgacaaggcactgtgctaggtactgtaatcctaccataagtaggtaggtatttcttccactgtaaatcataggggtttgctgttttatgtgagttagcctcttccccttgtctgagcattcctcaggggaggtcacctgtgaggttcccagaactgtagttttttttaccagggtgttgtatttggagggggaggaggactcggctcaaaagagctagctggctctccagtgttcagaggtgagtccacgatactcttaccacaatttggaagtttgtgaatctttttaaagaactaatcaatctctaatagcattgaggttgtacctacatattaagttgaatggactgttctatttaaaaaataaacaactagacaattaactagtttattaacctatcacaattgaatttttttttaattttcagtcttaacacattttttaaaatgtattaaagtaatacattgtagtagtaggattatatactccttggctgagaattccaagtactgtggttctactgtttagtggaaaactctggaagttaaaatatagaatatgagaggaggcttttttataatgggcatcattgtgtggaaaatgacccatgtgaatacaaatatttcctagttcagagattttggttatatctggtgcttggatcaagtttaaaaatggaaggtgagattttgcatgagcctattaaaaagcatagtaataaatgcaaggccagctggtggaaaagtgaggcagaatggagcttgtttataggttttctgataacaattataaaaaatgtgctttatagattaagatttattgaagtataaatatgtagtaatgatataatgtattttaagttatacaagaaaatgtagggacttttgtttgggtctttttctctttgtggctgaggggaaacaagtcagtgtccaataaagctgtaaactcctctgctctaagataaatgatgtgatttatttatttataactggcttctttccaagtaggttttcaggtggcatatttggaagacggctggaatgacagaattcttgtatcagagtaggtaagaagggagcaacctctcaatggctattatgtcatgctttttaagatcgtatgcggttcctatatacaaggaagcttccctgtggtagatttgtcataaatgccaaagatatttggtaatgtgagtgtagaaaaagtagtatgagggttggcaaatactgtttttgtcttggcagctctaatatctgcattgttcagaaaggattctgaggctaaggcaaagctctgtgggaaaaagggactggaccaaaaaaaactggatggtggcacacaagaagaggaaatgatgagatgtgtactttctatctctggttaggcttagtccccactagacaaattgattttaaatactatgtagtgatttttaaattccatccacacattcattacccacacagataatcatagaaatttgggggagtgcctagcttctgatgaagtggtgatatggcagtgccaagcagtggcatcgccagagtatctgtttggttagcaaatgagcagtcattttaggtcatgcagattgctgatatctgcccagtagccactgagcatttgctggttttttcttctggctttcttggaggttaagctctctgtagtcatacccagttggtacttgatctttagcaatatgtctcatattcatgtaaattgaagggagggttacatgtactgaaataatctgcatgctaggcattggcttagacaccgtacctatctcacttagatttgtggactaggaaagcaagattcagagatcatgtgacttgcatgtggcctagagataaaattcaaatctggttctgtagactccagggacatattcaccatgccatgggtggtggctattaaaccttgataaatttgtgtttatggttaacaaatgtgaaagctattaaacattgctggtttgaattttttacagtgcagaaatgtaaaatgaaaaaggatatttcctttcacagtgttaccgagaagtcatgataatttcgtttgttcttccagatttaggcatatacttatttaatcaataatgtgttaacagctgacacctgtggttgctgtgacaggcactatttgaagtgctttatcatggattaactcttaatcctcagctaccgtataaagtaggacataaccccatttcacatgcactacactgagacttgcctcctctccccccacattgaagatgttcttttttcataactatatactattccattgcatgaatattctgtaatttatttaatcccctatggattgataattaggttcattatagatagaagtgtaattaacattcctgtacatgtattttgctacttgtgtgggtatttctgtaggatgaataactagaaatttattggatcaggtttcacatttgcagttttgaaaactactaccaaaaagatttcaccaatttacaactccatcattagtaagaatgcctgtttgcctatagtctgccaaccctgaatccttaaaaatttttgccaatctggtaggcaaaatttctttcttttctttgaatattaatgaggaggaacatcttttcatgtttcttggccatttgcatttcctattatgaattgcttttgcccattttcctttttttaattatgaaagtctaatgactaccttctcattgtataaaaaacacagttctttgaatagagagacccttttctccaatgctaccaatcacattccacttaccacagtttaacatacatcctctagtcacctttccgtacgaatatacatacacataaaaacactttttacataaataggatctcatattctgtagctttttaaaattttggtctcaaaaaaagataacaggtctttaaatttctttaatggttgaatatgattaaatactatgaaaatgccattatttattcccttaatttttttcctctcgctattacattgccaaagtaaacatcctattcagatgtctttgtgcatgtgtgtgaatatttctttagtctggagtccagtaaggtggatttttggatcaaagggtttgttctctgtccaccttcagtcttcccaaaggccttcataactgtattttcaccaagtgtatggagaatgttcatttccccatataaccatacctacacttgatagtttttatctgttgggcgaaaaagaaccttttcttattttgcatttccctgattataaaaaaaaatggtgagattggggttattttcatgtttattggccatttatagtttactgtggattgtttgtatcccttacctgctttctattgggttatgtgtggatatattgtttttatttgttcagcatctccttccccatcttctggtaacacaacctttatttatttgtggggaacctattccctgtggcttaggtgagcatgtgaccaggcctggcctcctgagtcccacagcttcctagccacagtgataaaagaatgggtatataacttaagccaggctaaggaaagcccttaacagaacttctgctggaactactggaaagaaggctttatggagatcccaggaaccaaggaccatgtaagcctgaatttgtgccatgtggagagagtctgtctgaggagaaactcggatgctagcagaaatggaaagagaactaagttctgatgtcatttttctggaggccctagatccagctgtgcctaaagcctgccctacctccggactttaaagttttgtgagccaataaagtccctttcttgtttaagataattgaattgagtttctgttctgattaatataggttatttgtattttcttattgatttgtagaaaacctttgtaattttaaattctagactttatgcactatataagttaataaaattagcatggccttccatgatttggcctgtgtc

SEQ ID NO: 169544 - DNA, 1107 bp, Artificial Sequence
  derived and/or modified sequence
atgagcgcccagagcgtggaggaggacagcatcctgatcatccccacccccgacgaggaggagaagatcctgagagtgaagctggaggaggaccccgacggcgaggagggcagcagcatcccctggaaccacctgcccgaccccgagatcttcagacagagattcagacagttcggctaccaggacagccccggccccagagaggccgtgagccagctgagagagctgtgcagactgtggctgagacccgagacccacaccaaggagcagatcctggagctggtggtgctggagcagttcgtggccatcctgcccaaggagctgcagacctgggtgagagaccaccaccccgagaacggcgaggaggccgtgaccgtgctggaggacctggagagcgagctggacgaccccggccagcccgtgagcctgagaagaagaaagagagaggtgctggtggaggacatggtgagccaggaggaggcccagggcctgcccagcagcgagctggacgccgtggagaaccagctgaagtgggccagctgggagctgcacagcctgagacactgcgacgacgacggcagaaccgagaacggcgccctggcccccaagcaggagctgcccagcgccctggagagccacgaggtgcccggcaccctgaacatgggcgtgccccagatcttcaagtacggcgagacctgcttccccaagggcagattcgagagaaagagaaaccccagcagaaagaagcagcacatctgcgacgagtgcggcaagcacttcagccagggcagcgccctgatcctgcaccagagaatccacagcggcgagaagccctacggctgcgtggagtgcggcaaggccttcagcagaagcagcatcctggtgcagcaccagagagtgcacaccggcgagaagccctacaagtgcctggagtgcggcaaggccttcagccagaacagcggcctgatcaaccaccagagaatccacaccggcgagaagccctacgagtgcgtgcagtgcggcaagagctacagccagagcagcaacctgttcagacaccagagaagacacaacgccgagaagctgctgaacgtggtgaaggtgtag

SEQ ID NO: 169545 - DNA, 1107 bp, Artificial Sequence
  derived and/or modified sequence
atgtctgcccaaagcgttgaggaagacagcatcttaatcatccctacccctgatgaagaagagaaaattctaagggttaagttagaagaggatccggacggcgaggaaggatcctccatcccctggaaccacctgcctgaccccgaaattttcagacaacgattcaggcagtttgggtaccaagactcccctggccccagagaagctgtatcacagctgcgcgagctgtgtagactttggcttagaccagagactcacactaaggagcagattctcgagctggtagtgctagaacagtttgtggccatcctgccaaaggagctgcagacctgggtgcgggatcatcatcccgagaatggagaagaggccgtaaccgtgctggaagatctggaatccgagctggacgacccgggccagcctgttagcctcagacgaagaaagagggaggtgctcgtggaagatatggtgagccaagaggaggctcagggtcttccatcttctgagctagacgctgttgaaaaccagttgaaatgggcctcctgggaactgcatagcctgagacactgcgacgatgacgggcgcaccgagaatggcgccctcgctcctaagcaggaactaccaagcgccctggaaagccatgaggtaccggggactctgaacatgggtgttccccaaatatttaagtacggagaaacatgctttcctaaaggtcgctttgagcggaaacgcaacccctcaagaaagaaacagcacatatgcgacgagtgtggtaaacacttctcccagggctccgctctcattctgcatcagaggattcacagcggtgaaaaaccttatggctgcgtggaatgtggtaaggcattctccagatcgagtatcttggttcagcaccagcgagtacacacaggcgaaaagccttacaagtgcctagagtgtggaaaggcattctcccagaactctgggctgattaatcaccagcggatccatacaggggaaaaaccgtacgagtgcgtgcagtgtgggaaatcctattctcaatcttccaatctgttccgccatcaaagacggcacaatgccgagaaactgctcaacgtggtaaaggtttag

SEQ ID NO: 169546 - DNA, 1107 bp, Artificial Sequence
  derived and/or modified sequence
atgtccgcgcagagcgtggaggaggatagcattctgatcataccaactcctgacgaagaggagaaaatcctgcgcgttaaactggaggaggaccccgacggtgaggagggatcctccatcccgtggaaccacctacccgaccccgagatctttcgccaacgtttcaggcagtttggttaccaggacagccccgggcctagagaggctgtgtctcagctgagggaactgtgtagactgtggctgcggccagagacccatactaaagaacagatcctggagctcgtggtactggaacagtttgttgccatcctcccgaaagagctgcagacatgggttagggaccaccaccctgaaaacggagaggaggcagtgacagtgttagaggacctggagagtgagcttgacgatcccggacagcccgtaagccttcggcggcgaaagcgcgaagtcttggttgaggacatggtgtcacaggaggaggcccaaggactgccaagctcagagctcgatgccgttgagaaccagctgaaatgggcttcttgggagctgcattcattacggcactgtgacgatgacggacgaaccgaaaatggtgctcttgcccctaaacaggagctcccgagcgcactggaaagccatgaggtgccaggcactctcaatatgggggtgccacagatattcaagtacggggagacctgctttcctaaaggcagattcgagcgcaaaagaaacccttctagaaagaagcaacacatctgcgacgagtgcggcaaacattttagccagggtagcgccttgatcctacatcagagaatacactccggggagaaaccatacggttgcgttgaatgtgggaaagccttctctcgcagcagcattttggtacagcatcagagggttcacactggagagaaaccttacaagtgtctggagtgtggcaaagccttttcacagaattcaggcctgatcaaccaccagagaatccacaccggggagaaaccctacgaatgtgtccagtgtggcaaaagttacagtcagtccagtaacctttttagacatcaacgtcgccacaatgccgaaaaactgctgaatgttgtgaaggtgtag

SEQ ID NO: 169547 - DNA, 1107 bp, Artificial Sequence
  derived and/or modified sequence
atgtctgcccagagcgtggaggaggacagcatcctgatcatccccaccccagatgaggaggagaagatcctgcgggtgaagctggaggaggaccctgatggagaggagggcagcagcatcccctggaaccacctgcctgaccctgagatcttccggcagcgcttccggcagtttggctaccaggacagccctggcccccgggaggccgtgtcccagctgcgggagctgtgccgcctgtggctgcggcctgagacccacaccaaggagcagatcctggagctggtggtgctggagcagtttgtggccatcctgcccaaggagctgcagacctgggtgcgggaccaccacccagaaaatggagaggaggccgtgacagtgctggaggacctggagagcgagctggatgatcctggccagcctgtgtccctgcggcggaggaagcgggaggtgctggtggaggacatggtgtcccaggaggaggcccagggcctgcccagcagcgagctggatgctgtggagaaccagctgaagtgggcctcctgggagctgcacagcctgcggcactgtgatgatgatggccgcacagaaaatggagccctggcccccaagcaggagctgcccagcgccctggagagccatgaggtgcccggcaccctgaacatgggcgtgccccagatcttcaagtatggagagacctgcttccccaagggccgctttgagaggaagaggaaccccagcaggaagaagcagcacatctgtgatgaatgtgggaagcacttcagccagggcagcgccctgatcctgcaccagaggatccacagcggggagaagccctacggctgtgtggagtgtgggaaggccttcagccgcagcagcatcctggtgcagcaccagagggtgcacactggagagaagccctacaagtgcctggagtgtgggaaggccttcagccagaacagcggcctcatcaaccaccagaggatccacactggagagaagccctatgaatgtgtgcagtgtgggaagagctacagccagagcagcaacctcttccgccaccagaggaggcacaatgctgagaagctgctgaatgtggtgaaggtgtag

SEQ ID NO: 169548 - DNA, 1107 bp, Artificial Sequence
  derived and/or modified sequence
atgagcgcccagagcgtggaggaggacagcatcctgatcatccccacaccggatgaagaggaaaaaattctgcgcgtaaaactggaggaggatccagatggggaagagggctccagtataccttggaatcacctgcccgacccagaaatcttccggcagcggtttcgccagttcggttaccaggacagccctggaccacgggaggcggtgagccaactgcgggagttatgcaggctgtggctgagaccagagacacacactaaggagcaaatcctcgagctggtcgtcctggaacagtttgtcgcgatcttaccgaaagagttgcagacctgggtgcgggaccaccatccagagaatggcgaggaggccgtgactgttctggaggatctcgagagtgagctggatgatccaggacagccagtgtccttgcgccgcaggaagagagaagtgttggtagaggatatggtgtcacaggaggaagctcaggggttacccagcagcgagttggacgcagtagaaaaccaactcaagtgggccagctgggagctccacagcctccgccattgcgacgatgatggcaggacagagaacggcgcgcttgcccctaaacaggaactgcctagcgcactcgagtctcacgaagtaccaggtaccctcaacatgggtgttcctcagattttcaagtacggggagacttgctttccaaaaggacggtttgagcggaaaaggaatccaagccgcaagaagcagcacatctgcgatgaatgtggaaagcacttttctcaaggtagcgcactaatcctgcaccagaggattcactccggagagaagccctatggctgcgtggaatgtggtaaggcattctcaagatcatcgattctggtgcagcatcagcgcgtccacacaggagagaagccatataaatgcttggagtgcggcaaggctttcagtcaaaatagcgggttaattaatcaccaacgtatacacaccggcgaaaaaccgtacgagtgcgtccagtgcggaaagtcatacagccagagctccaatttgttccgtcatcagcggcgccataatgccgaaaagttgctgaacgtggtgaaggtttag

SEQ ID NO: 169549 - DNA, 1107 bp, Artificial Sequence
  derived and/or modified sequence
atgagcgcccagagcgtggaggaggacagcatcctgatcatccccacacccgatgaggaagaaaaaatccttcgagtgaaactagaggaagatccagacggcgaggaaggatcttccataccatggaaccaccttcctgatccagaaatattccgccagagattccgccagtttggatatcaagatagtcccggaccccgcgaggcagtgtcacagctccgagaactttgtcgattgtggctcagacccgagacgcatactaaagagcaaattctagagctggttgtcttagaacaatttgtggcaatactgcctaaggagctgcagacctgggtccgggatcatcaccccgagaatggtgaagaggccgttacggtgcttgaagatctcgagtcagagctggacgatccaggacagccagtttccttgcgcaggagaaaaagggaggtcctcgtggaggacatggtgagtcaagaagaggcccagggtctgccgtcaagcgaactggatgccgtggagaaccagctgaagtgggcctcctgggagctgcactctctaaggcactgtgacgatgacgggcgcaccgaaaatggggctctggctcctaaacaggagctgcctagcgccctggagtcccatgaagtgccggggactcttaacatgggggtgccacaaatattcaaatatggagaaacatgctttcctaaaggaagatttgagcgaaagcggaacccctcacgtaaaaagcagcacatttgtgacgaatgcggaaagcacttctcccagggatcggccttgatactgcatcagagaatccacagtggagaaaaaccctacgggtgcgtggagtgcgggaaagccttcagccgctcctccattctggtacagcaccaacgcgtgcacactggagagaaaccatataagtgcttggaatgcggaaaagccttttctcagaatagcggactgatcaatcatcaaagaattcatacgggtgagaagccttatgagtgcgtgcagtgtggaaaatcctactcccagtctagcaacctctttcgccaccagagacgacataatgccgaaaaattgctgaacgtggttaaggtgtag

SEQ ID NO: 169550 - DNA, 1107 bp, Artificial Sequence
  derived and/or modified sequence
atgtctgcacagtctgttgaggaagatagcatactcataatcccgactcccgacgaggaggaaaaaatccttcgcgtgaaattagaggaggatcccgatggagaagaaggctcgtcgattccctggaaccatcttcccgatcccgagattttccgccaaagattcagacagtttggctatcaggattctcctggcccaagagaggcggtctctcagctccgggaactgtgtaggttgtggctcagaccagagacccacactaaggagcagattctcgagttagtggtgctggaacagttcgtagcaattctcccaaaagagctccagacctgggtgagagaccatcatccagagaatggcgaggaagccgtgacagtcctggaagacttggagtcggagttggatgacccaggacagcctgttagcttgcggcgaagaaagcgggaggtgctggtagaagacatggtgtcccaggaggaagctcagggactgccctcatcagagttggacgcggtggaaaaccagctgaagtgggcctcatgggaactgcattccctccgacattgtgacgatgacggaaggaccgaaaacggggcactcgctcccaagcaagaactaccttcagccctggaatcccacgaggtgcccggtactctcaacatgggagtgccacagattttcaagtatggcgagacatgttttcctaaaggccgattcgagagaaaacgcaacccatcaagaaaaaagcagcacatctgcgacgaatgcggaaaacatttcagtcagggctcagcactaatactccaccagcggatccattctggagaaaagccttacggctgcgtggagtgtggtaaggctttcagcaggtcatctatcctggtgcaacaccagcgcgtccacactggcgaaaaaccctacaaatgtctggaatgtggtaaagccttcagccagaatagcggccttatcaatcaccaaaggatacatactggtgaaaaaccctacgagtgcgtccagtgcgggaagtcgtatagccaatccagtaatctgttccggcaccagcgccgtcacaacgctgaaaaacttcttaatgtcgtcaaagtatag

SEQ ID NO: 169551 - DNA, 1107 bp, Artificial Sequence
  derived and/or modified sequence
atgtctgcacaaagcgtggaggaggatagcattcttattattcccacacccgacgaggaagagaagatactgcgagttaagttggaggaagatcccgatggtgaggagggatcttccataccctggaatcacctgcccgatcccgagatttttaggcagagattcaggcagtttgggtatcaggattcccccggtcccagggaagctgtgtcccagttgcgagagctttgtcggttatggcttaggccagaaacccacaccaaggagcagattttagagctagtggtgctcgaacagttcgtcgcaatcctcccaaaggagctacaaacatgggtgagggaccaccaccctgagaatggcgaggaggccgtgaccgtcctagaagacctggaaagtgagctggatgatccaggtcagcccgtcagcttgagaagaagaaagcgtgaagtcttggtggaggatatggtcagtcaagaagaagctcaaggtttgcccagcagcgagctagacgcggtcgaaaatcagctgaaatgggcctcatgggagctccatagcttaagacactgtgacgatgatggcagaactgagaatggagcgctggcccctaaacaggaactaccatcggccctagaatcacacgaggttcccggtacactgaatatgggtgtgccccagattttcaagtatggagaaacttgttttccaaagggaaggttcgagagaaagcgtaatccgtctagaaagaagcagcatatttgtgatgaatgcggaaagcacttttcacagggcagcgccctgattctccaccagagaattcactctggcgagaagccttacggctgcgtggagtgtggaaaagccttctcccgatcctccatcttggttcagcaccaacgggtgcatacaggagagaagccgtataagtgccttgaatgtgggaaagcattctcacagaactcggggctgattaaccatcagcgaatccacacgggcgagaaaccctacgagtgcgtccagtgcgggaagtcctactcccaaagctcaaacctttttaggcatcaaaggagacataacgccgagaaattgttaaacgtcgtgaaggtatag

SEQ ID NO: 169552 - DNA, 6307 bp, Artificial Sequence
  derived and/or modified sequence
gcgccgggggcttctgggaaaaggcttgtgaacggcgtttctgcgtctgccgtggacagcgaagctgctgcggttcctgagccggaggtttgcgccggagtgcctgtgaagaaaacggggtattgccctgaggcttatattctgcctcagttgtcttttcttgaaatattataaatcagaatgtctgcacagtcagtggaagaagattcaatacttatcatcccaactccagatgaagaggaaaaaattctgagagtgaagttggaggaggatcctgatggcgaagagggatcaagtatcccctggaaccatctcccagacccagagattttccgacagcgattcaggcagtttggataccaggattcacctgggccccgtgaggctgtgagccagctccgagaactttgccgtctgtggctcaggccagagacgcacacaaaagaacaaatcttggagctggtagtgctggagcagtttgttgccatcctacccaaagagctacagacttgggttcgagatcatcatccagagaatggagaggaggcagtgacagtgctggaggatttggagagtgaacttgatgaccctggacaaccggtttctctccgtcgacgaaaacgggaagtactagtagaagacatggtatctcaagaagaagctcagggattaccaagttctgagcttgatgctgtggagaaccagctcaagtgggcatcctgggagctccattccctaaggcactgtgatgatgatggtaggactgaaaatggagcactagctccaaagcaggagcttccttcagcattagaatcccatgaagttcctggcactctcaatatgggtgttcctcaaatttttaaatatggagaaacctgtttccccaagggcaggtttgaaagaaagagaaatccctctcgaaagaaacaacatatatgtgatgaatgtggaaaacacttcagtcagggctcagcccttattcttcatcaaagaattcacagtggggagaaaccttatggatgtgttgagtgtgggaaagcattcagccgaagttccattcttgtgcaacaccagagagtccacactggagaaaaaccttacaaatgtcttgaatgtgggaaagcctttagccagaattcggggcttattaatcatcagagaatccatactggggagaaaccttatgaatgcgttcagtgtgggaaatcgtatagtcaaagctcaaatctttttagacatcagagaagacacaatgcagaaaaacttctgaatgttgtgaaagtttaagaaattgaaaaaaaaaaaagaatcagcactcaggtctttttcttcagaaatgaagacaaaatttaaaatatgaaatgatgcagaatagttttttccctattgactgtcagaaaatccactgggaaatgtaaaaatcttcactcaccattatgatatttatcttgaaagaaatggtgtcatacctgcctagaaactgaaattttaaacttaattcaggtcttaatgcctaaattttccatgtgatgtttatagtctgtattacttctccaaataatgaactacctgattcattgtccctttcttgaaagtttcttttttaagacaaatacattatttctgcattgatcattgaaatgttctttatatggatacattcccttatatattaaaaggcaacaggaattacaaagtctgaaaaccattttaaaccatcttttaaaaatttacccttatttccttttacctaatttgaatatgcatttgagaaaataagaggataaaggatggctaagagcctcaaaatgaaccataagatctcagataagaagtgatggtgataaaacatcaaaaagtgaatggaacaccttgattggggaagatatgcaaatactttgatctaagaattgaaatgtatcaagaatttatattttgcctgcaggaaaattcaaaagctactcatcctctctataatttggagtcatcttactaatgaaaataatgttttcccatatattattaaaaagcatacagtctaaataataaacagttgtaaaataatgaaggtagaaattataacactagggaaaaatttgtagcggatggcagtgttgaaggcaaatgtaaacataagggtaatggtctgtcatggcttttagaaaaagatgatagagttcatcattattttgccttcatctttgttaaggacagaaaattccctgacaggtgggcaagtatcaggttacctattttttattcctttggtacaaaagggttgaacgtcaggctaaaaaagcagccatgcatttattattaaacattttctaccgacaaggcactgtgctaggtactgtaatcctaccataagtaggtaggtatttcttccactgtaaatcataggggtttgctgttttatgtgagttagcctcttccccttgtctgagcattcctcaggggaggtcacctgtgaggttcccagaactgtagttttttttaccagggtgttgtatttggagggggaggaggactcggctcaaaagagctagctggctctccagtgttcagaggtgagtccacgatactcttaccacaatttggaagtttgtgaatctttttaaagaactaatcaatctctaatagcattgaggttgtacctacatattaagttgaatggactgttctatttaaaaaataaacaactagacaattaactagtttattaacctatcacaattgaatttttttttaattttcagtcttaacacattttttaaaatgtattaaagtaatacattgtagtagtaggattatatactccttggctgagaattccaagtactgtggttctactgtttagtggaaaactctggaagttaaaatatagaatatgagaggaggcttttttataatgggcatcattgtgtggaaaatgacccatgtgaatacaaatatttcctagttcagagattttggttatatctggtgcttggatcaagtttaaaaatggaaggtgagattttgcatgagcctattaaaaagcatagtaataaatgcaaggccagctggtggaaaagtgaggcagaatggagcttgtttataggttttctgataacaattataaaaaatgtgctttatagattaagatttattgaagtataaatatgtagtaatgatataatgtattttaagttatacaagaaaatgtagggacttttgtttgggtctttttctctttgtggctgaggggaaacaagtcagtgtccaataaagctgtaaactcctctgctctaagataaatgatgtgatttatttatttataactggcttctttccaagtaggttttcaggtggcatatttggaagacggctggaatgacagaattcttgtatcagagtaggtaagaagggagcaacctctcaatggctattatgtcatgctttttaagatcgtatgcggttcctatatacaaggaagcttccctgtggtagatttgtcataaatgccaaagatatttggtaatgtgagtgtagaaaaagtagtatgagggttggcaaatactgtttttgtcttggcagctctaatatctgcattgttcagaaaggattctgaggctaaggcaaagctctgtgggaaaaagggactggaccaaaaaaaactggatggtggcacacaagaagaggaaatgatgagatgtgtactttctatctctggttaggcttagtccccactagacaaattgattttaaatactatgtagtgatttttaaattccatccacacattcattacccacacagataatcatagaaatttgggggagtgcctagcttctgatgaagtggtgatatggcagtgccaagcagtggcatcgccagagtatctgtttggttagcaaatgagcagtcattttaggtcatgcagattgctgatatctgcccagtagccactgagcatttgctggttttttcttctggctttcttggaggttaagctctctgtagtcatacccagttggtacttgatctttagcaatatgtctcatattcatgtaaattgaagggagggttacatgtactgaaataatctgcatgctaggcattggcttagacaccgtacctatctcacttagatttgtggactaggaaagcaagattcagagatcatgtgacttgcatgtggcctagagataaaattcaaatctggttctgtagactccagggacatattcaccatgccatgggtggtggctattaaaccttgataaatttgtgtttatggttaacaaatgtgaaagctattaaacattgctggtttgaattttttacagtgcagaaatgtaaaatgaaaaaggatatttcctttcacagtgttaccgagaagtcatgataatttcgtttgttcttccagatttaggcatatacttatttaatcaataatgtgttaacagctgacacctgtggttgctgtgacaggcactatttgaagtgctttatcatggattaactcttaatcctcagctaccgtataaagtaggacataaccccatttcacatgcactacactgagacttgcctcctctccccccacattgaagatgttcttttttcataactatatactattccattgcatgaatattctgtaatttatttaatcccctatggattgataattaggttcattatagatagaagtgtaattaacattcctgtacatgtattttgctacttgtgtgggtatttctgtaggatgaataactagaaatttattggatcaggtttcacatttgcagttttgaaaactactaccaaaaagatttcaccaatttacaactccatcattagtaagaatgcctgtttgcctatagtctgccaaccctgaatccttaaaaatttttgccaatctggtaggcaaaatttctttcttttctttgaatattaatgaggaggaacatcttttcatgtttcttggccatttgcatttcctattatgaattgcttttgcccattttcctttttttaattatgaaagtctaatgactaccttctcattgtataaaaaacacagttctttgaatagagagacccttttctccaatgctaccaatcacattccacttaccacagtttaacatacatcctctagtcacctttccgtacgaatatacatacacataaaaacactttttacataaataggatctcatattctgtagctttttaaaattttggtctcaaaaaaagataacaggtctttaaatttctttaatggttgaatatgattaaatactatgaaaatgccattatttattcccttaatttttttcctctcgctattacattgccaaagtaaacatcctattcagatgtctttgtgcatgtgtgtgaatatttctttagtctggagtccagtaaggtggatttttggatcaaagggtttgttctctgtccaccttcagtcttcccaaaggccttcataactgtattttcaccaagtgtatggagaatgttcatttccccatataaccatacctacacttgatagtttttatctgttgggcgaaaaagaaccttttcttattttgcatttccctgattataaaaaaaaatggtgagattggggttattttcatgtttattggccatttatagtttactgtggattgtttgtatcccttacctgctttctattgggttatgtgtggatatattgtttttatttgttcagcatctccttccccatcttctggtaacacaacctttatttatttgtggggaacctattccctgtggcttaggtgagcatgtgaccaggcctggcctcctgagtcccacagcttcctagccacagtgataaaagaatgggtatataacttaagccaggctaaggaaagcccttaacagaacttctgctggaactactggaaagaaggctttatggagatcccaggaaccaaggaccatgtaagcctgaatttgtgccatgtggagagagtctgtctgaggagaaactcggatgctagcagaaatggaaagagaactaagttctgatgtcatttttctggaggccctagatccagctgtgcctaaagcctgccctacctccggactttaaagttttgtgagccaataaagtccctttcttgtttaagataattgaattgagtttctgttctgattaatataggttatttgtattttcttattgatttgtagaaaacctttgtaattttaaattctagactttatgcactatataagttaataaaattagcatggccttccatgatttggcctgtgtcaa

SEQ ID NO: 169553 - DNA, 1255 bp, Artificial Sequence
  derived and/or modified sequence
gaacggcgtttctgcgtctgccgtggacagcgaagctgctgcggttcctgagccggaggagtgcctgtgaagaaaacggggtattgccctgaggcttatattctgcctcagttgtcttttcttgaaatattataaatcagaatgtctgcacagtcagtggaagaagattcaatacttatcatcccaactccagatgaagaggaaaaaattctgagagtgaagttggaggaggatcctgatggcgaagagggatcaagtatcccctggaaccatctcccagacccagagattttccgacagcgattcaggcagtttggataccaggattcacctgggccccgtgaggctgtgagccagctccgagaactttgccgtctgtggctcaggccagagacgcacacaaaagaacaaatcttggagctggtagtgctggagcagtttgttgccatcctacccaaagagctacagacttgggttcgagatcatcatccagagaatggagaggaggcagtgacagtgctggaggatttggagagtgaacttgatgaccctggacaaccggtttctctccgtcgacgaaaacgggaagtactagtagaagacatggtatctcaagaagaagctcagggattaccaagttctgagcttgatgctgtggagaaccagctcaagtgggcatcctgggagctccattccctaaggcactgtgatgatgatggtaggactgaaaatggagcactagctccaaagcaggagcttccttcagcattagaatcccatgaagttcctggcactctcaatatgggtgttcctcaaatttttaaatatggagaaacctgtttccccaagggcaggtttgaaagaaagagaaatccctctcgaaagaaacaacatatatgtgatgaatgtggaaaacacttcagtcagggctcagcccttattcttcatcaaagaattcacagtggggagaaaccttatggatgtgttgagtgtgggaaagcattcagccgaagttccattcttgtgcaacaccagagagtccacactggagaaaaaccttacaaatgtcttgaatgtgggaaagcctttagccagaattcggggcttattaatcatcagagaatccatactggggagaaaccttatgaatgcgttcagtgtgggaaatcgtatagtcaaagctcaaatctttttagacatcagagaagacacaatgcagaaaaacttctgaatgttgtgaaagtttaagaaattg

SEQ ID NO: 169554 - protein, 626 aa, Artificial Sequence
  derived and/or modified sequence
MPCVQAQYSPSPPGSSYAAQTYSSEYTTEIMNPDYTKLTMDLGSTEITATATTSLPSISTFVEGYSSNYELKPSCVYQMQRPLIKVEEGRAPSYHHHHHHHHHHHHHHQQQHQQPSIPPASSPEDEVLPSTSMYFKQSPPSTPTTPAFPPQAGALWDEALPSAPGCIAPGPLLDPPMKAVPTVAGARFPLFHFKPSPPHPPAPSPAGGHHLGYDPTAAAALSLPLGAAAAAGSQAAALESHPYGLPLAKRAAPLAFPPLGLTPSPTASSLLGESPSLPSPPSRSSSSGEGTCAVCGDNAACQHYGVRTCEGCKGFFKRTVQKNAKYVCLANKNCPVDKRRRNRCQYCRFQKCLSVGMVKEVVRTDSLKGRRGRLPSKPKSPLQQEPSQPSPPSPPICMMNALVRALTDSTPRDLDYSRYCPTDQAAAGTDAEHVQQFYNLLTASIDVSRSWAEKIPGFTDLPKEDQTLLIESAFLELFVLRLSIRSNTAEDKFVFCNGLVLHRLQCLRGFGEWLDSIKDFSLNLQSLNLDIQALACLSALSMITERHGLKEPKRVEELCNKITSSLKDHQSKGQALEPTESKVLGALVELRKICTLGLQRIFYLKLEDLVSPPSIIDKLFLDTLPF

SEQ ID NO: 169555 - protein, 228 aa, Artificial Sequence
  derived and/or modified sequence
MASTASEIIAFMVSISGWVLVSSTLPTDYWKVSTIDGTVITTATYWANLWKACVTDSTGVSNCKDFPSMLALDGYIQACRGLMIAAVSLGFFGSIFALFGMKCTKVGGSDKAKAKIACLAGIVFILSGLCSMTGCSLYANKITTEFFDPLFVEQKYELGAALFIGWAGASLCIIGGVIFCFSISDNNKTPRYTYNGATSVMSSRTKYHGGEDFKTTNPSKQFDKNAYV

SEQ ID NO: 169556 - DNA, 949 bp, Artificial Sequence
  derived and/or modified sequence
ggagagcgagcgcggctgcagccggcggcatggctagcacggcttcggagatcatcgccttcatggtctccatctcaggctgggtactggtgtcctccacgctgcccaccgactactggaaggtgtctaccatcgacggcacggtcatcacaaccgccacctattgggccaacctgtggaaggcgtgcgttaccgactccacgggcgtctccaactgcaaggacttcccctccatgctggcgctggacggttatatacaggcatgtagaggacttatgatcgctgctgtcagcctgggcttctttggttccatatttgcgctctttggaatgaagtgtaccaaagtcggaggctccgataaagccaaagctaaaattgcttgtttggctgggattgtattcatactgtcagggctgtgctcaatgactggatgttccctatatgcaaacaaaatcacaacggaattctttgatcctctctttgttgagcaaaagtatgaattaggagccgctctgtttattggatgggcaggagcctcactgtgcataattggtggtgtcatattttgcttttcaatatctgacaacaacaaaacacccagatacacatacaacggggccacatctgtcatgtcttctcggacaaagtatcatggtggagaagattttaaaacaacaaacccttcaaaacagtttgataaaaatgcttatgtctaaaagagctcgctggcaagctgcctcttgagtttgttataaaagcgaactgttcacaaaatgatcccatcaaggccctcccataattaacactcaaaactatttttaaaatatgcatttgaagcatctgttgattgtatggatgtaagtgttcttacatagttagttatatactaatcattttctgttgtggctttctataaaaaataaacagtttatttacaggatttgtaaaa

SEQ ID NO: 169557 - DNA, 687 bp, Artificial Sequence
  derived and/or modified sequence
atggccagcaccgccagcgagatcatcgccttcatggtgagcatcagcggctgggtgctggtgagcagcaccctgcccaccgactactggaaggtgagcaccatcgacggcaccgtgatcaccaccgccacctactgggccaacctgtggaaggcctgcgtgaccgacagcaccggcgtgagcaactgcaaggacttccccagcatgctggccctggacggctacatccaggcctgcagaggcctgatgatcgccgccgtgagcctgggcttcttcggcagcatcttcgccctgttcggcatgaagtgcaccaaggtgggcggcagcgacaaggccaaggccaagatcgcctgcctggccggcatcgtgttcatcctgagcggcctgtgcagcatgaccggctgcagcctgtacgccaacaagatcaccaccgagttcttcgaccccctgttcgtggagcagaagtacgagctgggcgccgccctgttcatcggctgggccggcgccagcctgtgcatcatcggcggcgtgatcttctgcttcagcatcagcgacaacaacaagacccccagatacacctacaacggcgccaccagcgtgatgagcagcagaaccaagtaccacggcggcgaggacttcaagaccaccaaccccagcaagcagttcgacaagaacgcctacgtgtag

SEQ ID NO: 169558 - DNA, 687 bp, Artificial Sequence
  derived and/or modified sequence
atggccagtacggcctccgaaattattgcattcatggtgagcatttcaggctgggttctggtctcctccactctgccgaccgattattggaaggtgagtacaatcgatggcaccgtcattacaacagctacctattgggccaacttatggaaggcatgtgtcaccgactccaccggagtttccaactgtaaagattttcccagtatgctggccctggatggttacatccaggcatgtcgtggattgatgattgctgcagtgagtttaggattttttggctccatctttgcgctctttggcatgaaatgcaccaaagtgggggggtcggataaggcaaaggccaagattgcgtgccttgccggtatcgtctttatactaagcggactttgctctatgaccggctgcagtctctacgccaataaaattactaccgaattttttgatccactgtttgtcgagcagaagtacgagttgggggccgccctatttattggctgggctggagccagcttgtgtatcatcgggggcgtcatcttctgtttcagcatatccgacaacaacaagacccctcgttatacctataatggagccacctccgtcatgtcctctcggacaaagtatcatggaggagaagattttaaaacgaccaacccaagcaaacagtttgacaagaacgcgtacgtctag

SEQ ID NO: 169559 - DNA, 687 bp, Artificial Sequence
  derived and/or modified sequence
atggccagcacagccagcgagatcatcgccttcatggtgtccatcagcggctgggtgctggtgagcagcaccctgcccacagactactggaaggtgtccaccattgatggcaccgtcatcaccacagccacctactgggccaacctgtggaaggcctgtgtgacagacagcactggagtgagcaactgcaaggacttccccagcatgctggccctggatggctacatccaggcctgccggggcctgatgattgctgctgtgtccctgggcttcttcggcagcatctttgccctgtttggcatgaagtgcaccaaggtgggcggcagtgacaaggccaaggccaagatcgcctgcctggccggcatcgtgttcatcctgagcggcctgtgcagcatgacaggctgcagcctgtatgccaacaagatcaccacagagttctttgaccccctgtttgtggagcagaagtatgagctgggcgccgccctcttcatcggctgggccggggccagcctgtgcatcatcggcggcgtcatcttctgcttcagcatcagtgacaacaacaagaccccccgctacacctacaatggagccacctctgtgatgagcagcaggaccaagtaccacggcggggaggacttcaagaccaccaaccccagcaagcagtttgacaagaatgcctacgtgtag

SEQ ID NO: 169560 - DNA, 687 bp, Artificial Sequence
  derived and/or modified sequence
atggccagcaccgccagcgagatcatcgccttcatggtgagcatcagcggctgggtgctggtgagctcaaccttgccaacagactactggaaggtgtcgactatcgacgggactgtgattacgaccgccacctactgggctaacttgtggaaagcctgcgtgacagactccaccggggtttctaattgcaaagatttcccaagcatgctggctttggacggctatattcaggcctgcaggggattgatgatcgccgcagttagcctgggtttcttcggctcaatcttcgctctttttgggatgaagtgcactaaagttggagggtcagacaaagctaaggccaagattgcatgtctggccggcatcgtgtttattctgtcagggctgtgttccatgacgggatgttctctgtacgccaacaaaattacgactgaattctttgaccctctgtttgtcgagcagaagtatgagctgggtgctgctctttttatcgggtgggccggtgcaagcctgtgcattatcgggggcgtaattttctgtttttctatctctgataataacaagaccccaagatacacctataatggcgcgacctccgtcatgagctccagaacgaagtaccatggtggtgaagactttaaaaccactaatcccagtaagcagttcgataagaatgcatatgtttag

SEQ ID NO: 169561 - DNA, 687 bp, Artificial Sequence
  derived and/or modified sequence
atggcaagcacagcaagcgaaatcatcgctttcatggtttccatcagcggctgggtactggtgtcctccacactgccgaccgattactggaaggtttcaacgatcgatgggaccgtgataaccaccgcaacgtattgggccaatctgtggaaggcatgcgtcactgattctacaggagtgagcaattgcaaggatttcccctccatgctggctctcgacggttacatacaggcttgccgcggactcatgatagcagccgtgtcactaggcttcttcggcagtattttcgctttgtttggcatgaagtgtactaaagttggcggttccgataaggccaaagcaaaaattgcgtgtctcgcgggaatcgtgttcattttgtctggcttatgtagcatgactgggtgttccctgtatgccaataaaatcaccactgagttcttcgatccactatttgtcgagcagaaatatgaactcggcgcagcactgttcatcgggtgggccggagcgagtttgtgtataattggtggcgttatcttttgtttctcaattagcgataacaataagactccccgatacacatataacggcgctacttcagtgatgagctccaggactaaatatcatggaggagaggacttcaaaactacaaaccctagcaaacagttcgacaagaacgcttatgtttag

SEQ ID NO: 169562 - protein, 967 aa, Artificial Sequence
  derived and/or modified sequence
MQRAVPEGFGRRKLGSDMGNAERAPGSRSFGPVPTLLLLAAALLAVSDALGRPSEEDEELVVPELERAPGHGTTRLRLHAFDQQLDLELRPDSSFLAPGFTLQNVGRKSGSETPLPETDLAHCFYSGTVNGDPSSAAALSLCEGVRGAFYLLGEAYFIQPLPAASERLATAAPGEKPPAPLQFHLLRRNRQGDVGGTCGVVDDEPRPTGKAETEDEDEGTEGEDEGAQWSPQDPALQGVGQPTGTGSIRKKRFVSSHRYVETMLVADQSMAEFHGSGLKHYLLTLFSVAARLYKHPSIRNSVSLVVVKILVIHDEQKGPEVTSNAALTLRNFCNWQKQHNPPSDRDAEHYDTAILFTRQDLCGSQTCDTLGMADVGTVCDPSRSCSVIEDDGLQAAFTTAHELGHVFNMPHDDAKQCASLNGVNQDSHMMASMLSNLDHSQPWSPCSAYMITSFLDNGHGECLMDKPQNPIQLPGDLPGTSYDANRQCQFTFGEDSKHCPDAASTCSTLWCTGTSGGVLVCQTKHFPWADGTSCGEGKWCINGKCVNKTDRKHFDTPFHGSWGMWGPWGDCSRTCGGGVQYTMRECDNPVPKNGGKYCEGKRVRYRSCNLEDCPDNNGKTFREEQCEAHNEFSKASFGSGPAVEWIPKYAGVSPKDRCKLICQAKGIGYFFVLQPKVVDGTPCSPDSTSVCVQGQCVKAGCDRIIDSKKKFDKCGVCGGNGSTCKKISGSVTSAKPGYHDIITIPTGATNIEVKQRNQRGSRNNGSFLAIKAADGTYILNGDYTLSTLEQDIMYKGVVLRYSGSSAALERIRSFSPLKEPLTIQVLTVGNALRPKIKYTYFVKKKKESFNAIPTFSAWVIEEWGECSKSCELGWQRRLVECRDINGQPASECAKEVKPASTRPCADHPCPQWQLGEWSSCSKTCGKGYKKRSLKCLSHDGGVLSHESCDPLKKPKHFIDFCTMAECS

SEQ ID NO: 169563 - DNA, 2904 bp, Artificial Sequence
  derived and/or modified sequence
atgcaacgcgccgtccccgaggggtttggccggcgaaaacttgggtccgacatgggtaacgccgaaagagctcccgggtccaggagttttggacctgtgccaacccttctgctactagccgcggccttgctcgccgtcagtgacgccttgggtaggcccagtgaggaggatgaagaactggtggtgcccgagctggagagggcgcccggtcatggcactaccaggttacggttgcatgcattcgatcaacagctcgacttggaactcagacccgactcttcatttcttgctcccgggtttactctgcagaatgtggggcgaaagagcgggtccgaaacaccgctcccagagacagacctggctcattgcttttactctgggacagtcaatggcgatccgagcagcgcagccgccctgagtctatgcgagggcgtgcggggggccttttacttgttaggcgaggcatacttcatacagccccttccagctgctagtgagaggctggcaaccgccgcacctggcgagaaaccccctgctcctctgcagttccatctgctgcgacggaatcgacagggggatgtggggggtacatgcggggtagtggatgatgagcctcgccccaccggcaaagccgagactgaagacgaagacgagggaactgaaggagaagatgagggggcccagtggtccccacaggatcccgctctgcaaggtgtgggtcagccaacgggaacgggcagcatacgaaagaagcgcttcgtgtcttcacacagatacgttgagactatgttggttgcggaccagagtatggctgagttccacgggtccggattgaaacactacctgctgacattgttcagcgtcgcggcacgactgtacaagcatccatccattcggaatagcgtgagtctcgtagtggtgaaaatcctcgttattcatgacgagcagaaagggccggaggtaaccagcaacgctgccctgacactgagaaatttctgtaactggcagaagcagcacaaccctccaagtgatagggacgctgaacattatgacaccgctattctgtttactagacaagatttatgcgggtcccagacttgcgacaccctgggtatggcagacgtaggaactgtgtgcgatccaagccgcagttgcagcgtgattgaggacgatggacttcaggccgccttcacgaccgcccacgagctaggacacgtattcaacatgccccatgacgacgcaaaacagtgcgcatccctgaacggcgtcaatcaggactctcacatgatggcaagcatgctgtccaatctcgatcattctcagccctggtcaccctgtagcgcctatatgatcacatccttcctggacaatgggcacggcgaatgcctgatggataagccgcagaacccaatccagttgcccggagatcttccaggcacctcatatgacgcgaatcggcagtgtcagttcacgtttggagaggatagtaaacactgtcccgatgctgcgagtacgtgcagtactttgtggtgcacgggcaccagtggcggcgtgctggtctgtcaaacgaagcactttccctgggcggacggcaccagctgcggtgagggcaaatggtgcatcaacggtaaatgtgttaacaaaactgaccggaagcactttgacactccgttccatggctcatggggtatgtggggcccatggggagattgctccagaacgtgcggagggggcgtgcagtatacaatgagggagtgcgacaaccctgtgccgaaaaacggcggcaagtactgtgagggaaaaagggtcagatatagatcctgcaaccttgaggattgccctgataacaacggcaaaacatttagagaagagcagtgtgaagcacacaacgagtttagtaaggccagcttcgggagcggccccgctgtcgaatggataccaaagtacgccggagtctcccccaaggaccggtgtaagctaatttgccaggcaaagggaatcggctatttttttgtcttacagcctaaagtagtagatggtactccatgttcaccagactccacgtcggtctgtgtccaagggcagtgcgtcaaggctggctgcgataggattattgactccaagaagaaatttgataagtgcggagtgtgcggaggcaatgggtcaacctgcaagaagatcagtgggtccgtcacttcagcaaaacccggttaccatgatattatcaccatcccaaccggagctaccaacatcgaggtgaagcagcgtaaccagcgtggctcacgcaataacggttcgtttctcgcgatcaaggcggctgatggaacttacattttgaatggagattatacgcttagcaccctggagcaggatatcatgtataaaggtgtcgtgctccgatactccggttcctccgcagcattagagaggatacgctctttttccccactgaaagaaccccttactattcaggtcctaaccgtgggtaatgctctgcggccaaaaatcaagtatacatatttcgtaaaaaaaaagaaggaatcctttaacgcgataccaaccttctccgcctgggtgattgaagaatggggggagtgctctaaaagttgcgaactgggatggcaaagaagactggtggagtgtcgggacatcaatggccagccagccagcgagtgtgcgaaagaagtgaaacctgcatccacacgcccatgtgcagatcacccttgccctcaatggcagctgggcgaatggagtagttgctctaagacatgtggcaaagggtataaaaaaagaagtctgaaatgcttatcacacgacggcggggtgttgtcacatgagagttgtgatccactcaaaaagccaaaacacttcatcgacttctgcaccatggccgaatgcagttag

SEQ ID NO: 169564 - DNA, 2904 bp, Artificial Sequence
  derived and/or modified sequence
atgcagagagctgtgcctgagggctttggaagaaggaagctgggcagtgacatgggaaatgctgagcgggcccctggcagccgcagctttggacctgtgcccaccctgctgctgctggccgccgccctgctggccgtgtctgatgccctgggccggcccagcgaggaggatgaggagctggtggtgcctgagctggagcgggcccctggccacggcaccacccggctgcggctgcacgcctttgaccagcagctggacctggagctgcggccagacagcagcttcctggcccctggcttcaccctgcagaatgtgggcaggaagagcggcagcgagacccccctgcctgagacagacctggcccactgcttctacagcggcaccgtgaatggagaccccagcagcgctgctgccctgagcctgtgtgagggcgtgcggggggccttctacctgctgggggaggcctacttcatccagcccctgcctgctgccagcgagcggctggccacagctgcccctggagagaagcccccagcccccctgcagttccacctgctgcggaggaaccggcagggagatgtgggcggcacctgtggggtggtggatgatgagccccggcccaccgggaaggccgagacagaagatgaagatgagggcacagaaggagaagatgagggcgcccagtggagcccccaggaccctgccctgcagggcgtgggccagcccactggaacaggcagcatcaggaagaagagatttgtgagcagccacagatatgtggagaccatgctggtggccgaccagagcatggccgagttccacggcagcggcctgaagcactacctgctgaccctcttctctgtggccgcccggctgtacaagcaccccagcatcagaaattctgtgtccctggtggtggtgaagatcctggtgattcatgatgagcagaagggccctgaggtgaccagcaatgctgccctgaccctgaggaacttctgcaactggcagaagcagcacaaccccccaagtgacagagatgctgagcactatgacacagccatcctcttcacccggcaggacctgtgtggcagccagacctgtgacaccctgggcatggctgatgtgggcaccgtgtgtgaccccagccgcagctgcagcgtgattgaagatgatggcctgcaggccgccttcaccacagcccacgagctgggccacgtgttcaacatgcctcatgatgatgccaagcagtgtgccagcctgaatggagtgaaccaggacagccacatgatggcctccatgctgagcaacctggaccacagccagccctggagcccctgcagcgcctacatgatcaccagcttcctggacaatggacatggagaatgtctgatggacaagccccagaaccccatccagctgcccggggacctgcccggcaccagctatgatgccaaccggcagtgccagttcaccttcggggaggacagcaagcactgcccagatgctgccagcacctgcagcaccctgtggtgcaccggcaccagcggaggagtgctggtgtgccagaccaagcacttcccctgggcagatggcaccagctgtggggagggcaagtggtgcatcaacgggaaatgtgtgaacaagacagacaggaagcactttgacacccccttccacggctcctggggcatgtggggcccctggggagactgcagcaggacctgtggcggcggcgtgcagtacaccatgagagaatgtgacaaccctgtgcccaagaatggaggcaagtactgtgagggcaagagggtgcgctaccgcagctgcaacctggaggactgcccagacaacaacgggaagaccttccgggaggagcagtgtgaggcccacaatgagttcagcaaggccagctttggaagtggccctgctgtggagtggatccccaagtatgctggggtgagccccaaggaccgctgcaagctgatctgccaggccaagggcatcggctacttctttgtgctgcagcccaaggtggtggatggcaccccctgcagcccagacagcacctctgtgtgtgtgcagggccagtgtgtgaaggccggctgtgaccgcatcatcgacagcaagaagaagtttgataaatgtggggtgtgtggcggcaatggcagcacctgcaagaagatcagcggctctgtgaccagcgccaagccaggctaccatgacatcatcaccatccccaccggggccaccaacatcgaggtgaagcagaggaaccagaggggcagcaggaacaacggcagcttcctggccatcaaggctgctgatggcacctacatcctgaatggagactacaccctgagcaccctggagcaggacatcatgtacaagggcgtggtgctgcgctacagcggcagcagcgctgccctggagcgcatccgctccttcagccccctgaaggagcccctgaccatccaggtgctgactgtgggcaatgccctgcggcccaagatcaagtacacctactttgtgaagaagaagaaggagagcttcaatgccatccccaccttcagcgcctgggtgattgaggagtggggagaatgttccaagagctgtgagctgggctggcagaggcggctggtggagtgccgggacatcaatggccagcctgcctctgaatgtgccaaggaggtgaagccagccagcacccggccctgtgccgaccacccctgcccccagtggcagctgggggagtggagcagctgcagcaagacctgtgggaagggctacaagaagaggagcctgaagtgcctgagccatgatggaggagtgctgagccatgagagctgtgaccccctgaagaagcccaagcacttcatcgacttctgcaccatggctgaatgttcctag

SEQ ID NO: 169565 - DNA, 2904 bp, Artificial Sequence
  derived and/or modified sequence
atgcagcgggccgtgcccgagggcttcggccggcggaagctgggcagtgacatgggaaacgctgaaagggcgcccggcagcagatcctttggccctgtgcccacactgcttctcctagctgccgctctcctcgccgtgagtgacgccttaggccgcccttccgaggaggatgaagagttagtcgtcccagaactggaaagggcccccggccacggaacgaccagactgagacttcatgcctttgatcaacagttggacctggagctcagacccgatagttcatttctggcccctgggtttacactccagaacgtagggaggaagagtggttctgagaccccactgccggaaaccgacttggcccattgcttctactctggcaccgtcaatggcgaccccagctccgcagccgctctatccttgtgtgagggcgtgcgcggcgctttttatttgctgggcgaagcctactttattcagccattgccagccgcctcagagcgtctagcgactgctgcacctggagagaaaccgcctgcgcctctccaattccatctgctgagaagaaacagacagggtgatgttgggggcacatgcggagtagtggatgacgaaccccgccccacaggcaaggctgaaacggaagatgaggacgagggaacggagggtgaggatgagggcgcccagtggtcccctcaagaccctgcccttcagggagtaggacaacctacaggaaccggcagcattaggaaaaagcgctttgtctcctctcacagatacgtggaaaccatgctggtcgcagatcagtctatggcagagtttcacgggtctggcctgaagcactatctgttgactttgttctcagttgcagcacggctgtacaagcacccatcaattcgcaactctgtgagcctggtggtggtgaagattctagtgatccacgacgagcagaaaggcccggaagtgacatccaatgccgctctgaccctccgtaacttttgtaactggcagaaacaacataaccctccatctgatcgtgatgcagagcactatgatactgccattttgtttacgaggcaggacctgtgcggatcgcagacctgcgacaccctcggcatggctgacgtgggaaccgtgtgtgatcctagccggagttgttccgtgattgaggatgacgggttgcaggccgcatttacgactgcacacgaattgggccatgtctttaatatgccacatgatgatgctaaacagtgcgcttcgttgaatggcgtcaatcaagattcccacatgatggccagcatgctaagcaacctggatcattcacagccatggagcccctgcagtgcttatatgatcactagctttttagacaacggccacggggagtgcctaatggacaagccacagaacccaatacaactgcctggggaccttccgggcacaagctatgacgccaaccgacagtgccagttcactttcggcgaagatagcaagcactgtcccgacgcagcaagtacttgtagtacattgtggtgtaccggcacatctggtggggtgcttgtctgccaaaccaagcatttcccctgggccgacgggacctcctgcggagagggaaagtggtgtattaatggcaaatgtgtgaataaaacagatagaaagcacttcgacaccccctttcatggaagctggggcatgtgggggccctggggggattgttccagaacctgcggcggcggggtgcagtatactatgagggaatgcgataatccagttcccaaaaatggaggtaagtactgcgagggaaagcgggtgcgttatcgttcttgtaacttggaagattgcccagataataacggaaagacatttcgcgaggaacaatgtgaggcacacaatgagttctcgaaagcctcatttggcagtggccctgccgtggagtggatccccaagtatgccggcgtcagcccaaaagaccgatgcaagctgatttgtcaggctaagggcatcggctactttttcgtattgcagcccaaagtggtggacggaacgccctgctcacccgattctaccagtgtttgcgtccaaggccaatgtgttaaagcaggatgtgaccgcattattgactcgaaaaagaaatttgataagtgtggtgtgtgcggcggcaacgggtcaacctgtaagaagatttccgggtccgttacctcagccaagcctggctatcatgatattatcacaatacctacaggcgctaccaatattgaagtcaagcaaagaaaccagagaggcagcagaaataacggctcttttttagctatcaaagccgctgacggcacttatatcctaaacggagactacaccctaagtaccctcgaacaagacattatgtacaagggagttgttctgcgctatagcggttcttccgcagcgcttgaacggatccgaagcttctcgccactgaaggagcccctgacgattcaggttctgactgtgggcaacgcgctgcggcccaaaattaaatacacttatttcgtgaagaaaaagaaagagagcttcaacgccatcccaaccttcagcgcttgggtcatcgaagaatggggcgagtgctcgaagtcatgtgaattgggctggcaaagacgccttgtggagtgtagagatattaatggacagccggcttccgagtgtgccaaggaggtaaagcccgcttccactcggccctgtgcggatcacccctgccctcaatggcagctgggagaatggtcttcatgctcaaagacttgtggaaagggatacaagaagcggagtctaaagtgtctgagtcatgacggaggggtgctctctcacgaaagctgtgacccactaaagaagcctaaacatttcatcgatttctgcacaatggcagaatgttcatag

SEQ ID NO: 169566 - DNA, 2904 bp, Artificial Sequence
  derived and/or modified sequence
atgcagagagccgtaccagagggtttcgggcgtcggaagcttggtagcgatatgggtaatgcggaaagagcgcctgggtcacggtcttttggccctgttcccacactcttgctcctcgctgcggcattattggcagtctcagacgccctgggacgaccttccgaggaagacgaagagctcgttgtgccagaattggaacgggctcccggtcatggaacaacgagactcagattgcacgcctttgaccaacagctggacctcgagctgcgtccagattctagcttcctggccccaggattcactcttcagaacgttggaagaaaaagtggttcagaaacccccttgcccgagacagacctggctcactgtttctacagtggcactgtaaacggagacccctcttcagctgcagcattgtccctttgtgagggggtgaggggagctttctacttgctcggtgaggcttacttcatacagcctctgcctgcggcatccgaaagacttgctaccgcagctcccggtgagaagcctcctgcacccttgcaattccacctgttgcgccgaaataggcaaggagacgtgggcggaacatgcggcgtcgtggacgatgaaccacgacccacaggaaaggcagagacagaggatgaagatgaaggcacagaaggagaagacgagggcgctcagtggagccctcaggatcccgcacttcagggagtcggccaacctacaggcactgggagtataagaaagaaacggttcgtttcttcacacagatacgtcgaaacaatgcttgttgctgatcagtcaatggctgaattccatggatccggcctgaagcattacctgcttactctgttttctgtcgccgctcggctctacaagcatccctccattagaaactctgtgagccttgttgtggtgaagatcctggtcattcatgacgaacagaaggggcctgaggtgaccagcaatgccgctctgaccttacggaatttctgcaactggcaaaaacagcataacccaccatctgaccgcgacgccgagcattacgacacggcaattttatttacacggcaggacctttgcgggtctcaaacatgtgacacactgggcatggccgacgtggggactgtgtgtgatccaagccgctcttgttctgtaattgaagacgacggcctgcaggccgcatttaccacagcgcatgaactcgggcatgtattcaacatgcctcacgacgacgccaaacagtgcgcgagcctaaacggtgtcaaccaggatagccacatgatggcttctatgctaagcaatttggaccactcccagccttggtcaccttgctctgcttacatgattacgagtttcctggataatggacatggagagtgcttaatggacaaaccgcagaatcctatccaacttcctggcgacctgcctggtacctcatatgacgccaaccgacagtgtcagttcacatttggagaggatagcaagcactgccctgacgccgcatcaacatgctcaactctttggtgcacgggtactagtggcggtgttttggtgtgccagaccaagcattttccgtgggctgacggcacgtcctgcggggagggcaaatggtgtatcaacggtaaatgcgtgaacaaaaccgacagaaaacacttcgatacaccctttcacggctcgtggggaatgtggggaccttggggagattgctccagaacttgcggagggggagtgcaatacactatgcgagaatgcgacaatcctgttccgaagaatggcggtaagtattgcgagggaaaacgcgtccggtatagaagctgcaatctggaagactgcccggacaacaatggaaaaacatttcgcgaagaacaatgcgaagcacacaatgaattctccaaggccagtttcggatctggtccagccgtcgagtggatcccaaaatatgctggcgttagtcccaaggaccggtgcaagctgatttgtcaggcaaaaggtatagggtatttttttgtcctccagcctaaggtggtagacgggaccccatgcagtcccgacagcacttcggtctgcgtgcaaggccagtgtgtgaaagccggttgtgaccggatcattgactcaaagaaaaagtttgataagtgtggagtatgtggtgggaatggttcaacctgcaagaaaatatcaggttccgtaaccagcgccaagcctggataccatgatattataacgatccctaccggcgctacaaacatagaagtcaagcagagaaatcagcgaggaagtaggaataacggaagctttctagccatcaaggccgctgacggcacctacattctcaatggcgattacacactgtccactcttgagcaggatattatgtataagggggttgtgctccgatacagcggctcctctgccgcactcgaacggatccgttctttcagtccactgaaagagccattaactatccaggtactgacagtggggaatgcgttaagaccgaagattaaatacacatatttcgtgaagaagaagaaggagagttttaacgccatacccacattctccgcctgggtgatcgaagagtggggtgagtgcagtaagtcctgcgagcttggctggcagcgaaggctggtggagtgtcgggacattaatggacagcccgcatcagaatgtgctaaggaggttaagcctgccagcactaggccctgtgctgaccatccctgcccacaatggcagttgggggaatggtcaagctgctctaagacctgcggcaaaggttacaagaaacggtcactcaaatgcttgtcccacgacgggggagttctctcccatgagagctgtgatccattgaagaagcctaaacactttatcgatttttgtaccatggccgagtgtagttag

SEQ ID NO: 169567 - DNA, 2904 bp, Artificial Sequence
  derived and/or modified sequence
atgcagagagccgtgcccgagggcttcggcagaagaaagctgggcagcgacatgggcaacgccgagagagcccccggcagcagaagcttcggccccgtgcccaccctgctgctgctggccgccgccctgctggccgtgagcgacgccctgggcagacccagcgaggaggacgaggagctggtggtgcccgagctggagagagcccccggccacggcaccaccagactgagactgcacgccttcgaccagcagctggacctggagctgagacccgacagcagcttcctggcccccggcttcaccctgcagaacgtgggcagaaagagcggcagcgagacccccctgcccgagaccgacctggcccactgcttctacagcggcaccgtgaacggcgaccccagcagcgccgccgccctgagcctgtgcgagggcgtgagaggcgccttctacctgctgggcgaggcctacttcatccagcccctgcccgccgccagcgagagactggccaccgccgcccccggcgagaagccccccgcccccctgcagttccacctgctgagaagaaacagacagggcgacgtgggcggcacctgcggcgtggtggacgacgagcccagacccaccggcaaggccgagaccgaggacgaggacgagggcaccgagggcgaggacgagggcgcccagtggagcccccaggaccccgccctgcagggcgtgggccagcccaccggcaccggcagcatcagaaagaagagattcgtgagcagccacagatacgtggagaccatgctggtggccgaccagagcatggccgagttccacggcagcggcctgaagcactacctgctgaccctgttcagcgtggccgccagactgtacaagcaccccagcatcagaaacagcgtgagcctggtggtggtgaagatcctggtgatccacgacgagcagaagggccccgaggtgaccagcaacgccgccctgaccctgagaaacttctgcaactggcagaagcagcacaacccccccagcgacagagacgccgagcactacgacaccgccatcctgttcaccagacaggacctgtgcggcagccagacctgcgacaccctgggcatggccgacgtgggcaccgtgtgcgaccccagcagaagctgcagcgtgatcgaggacgacggcctgcaggccgccttcaccaccgcccacgagctgggccacgtgttcaacatgccccacgacgacgccaagcagtgcgccagcctgaacggcgtgaaccaggacagccacatgatggccagcatgctgagcaacctggaccacagccagccctggagcccctgcagcgcctacatgatcaccagcttcctggacaacggccacggcgagtgcctgatggacaagccccagaaccccatccagctgcccggcgacctgcccggcaccagctacgacgccaacagacagtgccagttcaccttcggcgaggacagcaagcactgccccgacgccgccagcacctgcagcaccctgtggtgcaccggcaccagcggcggcgtgctggtgtgccagaccaagcacttcccctgggccgacggcaccagctgcggcgagggcaagtggtgcatcaacggcaagtgcgtgaacaagaccgacagaaagcacttcgacacccccttccacggcagctggggcatgtggggcccctggggcgactgcagcagaacctgcggcggcggcgtgcagtacaccatgagagagtgcgacaaccccgtgcccaagaacggcggcaagtactgcgagggcaagagagtgagatacagaagctgcaacctggaggactgccccgacaacaacggcaagaccttcagagaggagcagtgcgaggcccacaacgagttcagcaaggccagcttcggcagcggccccgccgtggagtggatccccaagtacgccggcgtgagccccaaggacagatgcaagctgatctgccaggccaagggcatcggctacttcttcgtgctgcagcccaaggtggtggacggcaccccctgcagccccgacagcaccagcgtgtgcgtgcagggccagtgcgtgaaggccggctgcgacagaatcatcgacagcaagaagaagttcgacaagtgcggcgtgtgcggcggcaacggcagcacctgcaagaagatcagcggcagcgtgaccagcgccaagcccggctaccacgacatcatcaccatccccaccggcgccaccaacatcgaggtgaagcagagaaaccagagaggcagcagaaacaacggcagcttcctggccatcaaggccgccgacggcacctacatcctgaacggcgactacaccctgagcaccctggagcaggacatcatgtacaagggcgtggtgctgagatacagcggcagcagcgccgccctggagagaatcagaagcttcagccccctgaaggagcccctgaccatccaggtgctgaccgtgggcaacgccctgagacccaagatcaagtacacctacttcgtgaagaagaagaaggagagcttcaacgccatccccaccttcagcgcctgggtgatcgaggagtggggcgagtgcagcaagagctgcgagctgggctggcagagaagactggtggagtgcagagacatcaacggccagcccgccagcgagtgcgccaaggaggtgaagcccgccagcaccagaccctgcgccgaccacccctgcccccagtggcagctgggcgagtggagcagctgcagcaagacctgcggcaagggctacaagaagagaagcctgaagtgcctgagccacgacggcggcgtgctgagccacgagagctgcgaccccctgaagaagcccaagcacttcatcgacttctgcaccatggccgagtgcagctag

SEQ ID NO: 169568 - DNA, 4651 bp, Artificial Sequence
  derived and/or modified sequence
gcactcgctggaaagcggctccgagccaggggctattgcaaagccagggtgcgctaccggacggagaggggagagccctgagcagagtgagcaacatcgcagccaaggcggaggccgaagaggggcgccaggcaccaatctccgcgttgcctcagccccggaggcgccccagagcgcttcttgtcccagcagagccactctgcctgcgcctgcctctcagtgtctccaactttgcgctggaagaaaaacttcccgcgcgccggcagaactgcagcgcctccttttagtgactccgggagcttcggctgtagccggctctgcgcgcccttccaacgaataatagaaattgttaattttaacaatccagagcaggccaacgaggctttgctctcccgacccgaactaaaggtccctcgctccgtgcgctgctacgagcggtgtctcctggggctccaatgcagcgagctgtgcccgaggggttcggaaggcgcaagctgggcagcgacatggggaacgcggagcgggctccggggtctcggagctttgggccagtacccacgctgctgctgctcgccgcggcgctactggccgtgtcggacgcactcgggcgcccctccgaggaggacgaggagctagtggtgccggagctggagcgcgccccgggacacgggaccacgcgcctccgcctgcacgcctttgaccagcagctggatctggagctgcggcccgacagcagctttttggcgcccggcttcacgctccagaacgtggggcgcaaatccgggtccgagacgccgcttccggaaaccgacctggcgcactgcttctactccggcaccgtgaatggcgatcccagctcggctgccgccctcagcctctgcgagggcgtgcgcggcgccttctacctgctgggggaggcgtatttcatccagccgctgcccgccgccagcgagcgcctcgccaccgccgccccaggggagaagccgccggcaccactacagttccacctcctgcggcggaatcggcagggcgacgtcggcggcacgtgcggggtcgtggacgacgagccccggccgactgggaaagcggagaccgaagacgaggacgaagggactgagggcgaggacgaaggggctcagtggtcgccgcaggacccggcactgcaaggcgtaggacagcccacaggaactggaagcataagaaagaagcgatttgtgtccagtcaccgctatgtggaaaccatgcttgtggcagaccagtcgatggcagaattccacggcagtggtctaaagcattaccttctcacgttgttttcggtggcagccagattgtacaaacaccccagcattcgtaattcagttagcctggtggtggtgaagatcttggtcatccacgatgaacagaaggggccggaagtgacctccaatgctgccctcactctgcggaacttttgcaactggcagaagcagcacaacccacccagtgaccgggatgcagagcactatgacacagcaattcttttcaccagacaggacttgtgtgggtcccagacatgtgatactcttgggatggctgatgttggaactgtgtgtgatccgagcagaagctgctccgtcatagaagatgatggtttacaagctgccttcaccacagcccatgaattaggccacgtgtttaacatgccacatgatgatgcaaagcagtgtgccagccttaatggtgtgaaccaggattcccacatgatggcgtcaatgctttccaacctggaccacagccagccttggtctccttgcagtgcctacatgattacatcatttctggataatggtcatggggaatgtttgatggacaagcctcagaatcccatacagctcccaggcgatctccctggcacctcgtacgatgccaaccggcagtgccagtttacatttggggaggactccaaacactgccccgatgcagccagcacatgtagcaccttgtggtgtaccggcacctctggtggggtgctggtgtgtcaaaccaaacacttcccgtgggcggatggcaccagctgtggagaagggaaatggtgtatcaacggcaagtgtgtgaacaaaaccgacagaaagcattttgatacgccttttcatggaagctggggaatgtgggggccttggggagactgttcgagaacgtgcggtggaggagtccagtacacgatgagggaatgtgacaacccagtcccaaagaatggagggaagtactgtgaaggcaaacgagtgcgctacagatcctgtaaccttgaggactgtccagacaataatggaaaaacctttagagaggaacaatgtgaagcacacaacgagttttcaaaagcttcctttgggagtgggcctgcggtggaatggattcccaagtacgctggcgtctcaccaaaggacaggtgcaagctcatctgccaagccaaaggcattggctacttcttcgttttgcagcccaaggttgtagatggtactccatgtagcccagattccacctctgtctgtgtgcaaggacagtgtgtaaaagctggttgtgatcgcatcatagactccaaaaagaagtttgataaatgtggtgtttgcgggggaaatggatctacttgtaaaaaaatatcaggatcagttactagtgcaaaacctggatatcatgatatcatcacaattccaactggagccaccaacatcgaagtgaaacagcggaaccagaggggatccaggaacaatggcagctttcttgccatcaaagctgctgatggcacatatattcttaatggtgactacactttgtccaccttagagcaagacattatgtacaaaggtgttgtcttgaggtacagcggctcctctgcggcattggaaagaattcgcagctttagccctctcaaagagcccttgaccatccaggttcttactgtgggcaatgcccttcgacctaaaattaaatacacctacttcgtaaagaagaagaaggaatctttcaatgctatccccactttttcagcatgggtcattgaagagtggggcgaatgttctaagtcatgtgaattgggttggcagagaagactggtagaatgccgagacattaatggacagcctgcttccgagtgtgcaaaggaagtgaagccagccagcaccagaccttgtgcagaccatccctgcccccagtggcagctgggggagtggtcatcatgttctaagacctgtgggaagggttacaaaaaaagaagcttgaagtgtctgtcccatgatggaggggtgttatctcatgagagctgtgatcctttaaagaaacctaaacatttcatagacttttgcacaatggcagaatgcagttaagtggtttaagtggtgttagctttgagggcaaggcaaagtgaggaagggctggtgcagggaaagcaagaaggctggagggatccagcgtatcttgccagtaaccagtgaggtgtatcagtaaggtgggattatgggggtagatagaaaaggagttgaatcatcagagtaaactgccagttgcaaatttgataggatagttagtgaggattattaacctctgagcagtgatatagcataataaagccccgggcattattattattatttcttttgttacatctattacaagtttagaaaaaacaaagcaattgtcaaaaaaagttagaactattacaacccctgtttcctggtacttatcaaatacttagtatcatgggggttgggaaatgaaaagtaggagaaaagtgagattttactaagacctgttttactttacctcactaacaatggggggagaaaggagtacaaataggatctttgaccagcactgtttatggctgctatggtttcagagaatgtttatacattatttctaccgagaattaaaacttcagattgttcaacatgagagaaaggctcagcaacgtgaaataacgcaaatggcttcctctttccttttttggaccatctcagtctttatttgtgtaattcattttgaggaaaaaacaactccatgtatttattcaagtgcattaaagtctacaatggaaaaaaagcagtgaagcattagatgctggtaaaagctagaggagacacaatgagcttagtacctccaacttcctttctttcctaccatgtaaccctgctttgggaatatggatgtaaagaagtaacttgtgtctcatgaaaatcagtacaatcacacaaggaggatgaaacgccggaacaaaaatgaggtgtgtagaacagggtcccacaggtttggggacattgagatcacttgtcttgtggtggggaggctgctgaggggtagcaggtccatctccagcagctggtccaacagtcgtatcctggtgaatgtctgttcagctcttctgtgagaatatgattttttccatatgtatatagtaaaatatgttactataaattacatgtactttataagtattggtttgggtgttccttccaagaaggactatagttagtaataaatgcctataataacatatttatttttatacatttatttctaatgaaaaaaacttttaaattatatcgcttttgtggaagtgcatataaaatagagtatttatacaatatatgttactagaaataaaagaacacttttggaa

SEQ ID NO: 169569 - protein, 584 aa, Artificial Sequence
  derived and/or modified sequence
MKMASSLAFLLLNFHVSLFLVQLLTPCSAQFSVLGPSGPILAMVGEDADLPCHLFPTMSAETMELRWVSSSLRQVVNVYADGKEVEDRQSAPYRGRTSILRDGITAGKAALRIHNVTASDSGKYLCYFQDGDFYEKALVELKVAALGSDLHIEVKGYEDGGIHLECRSTGWYPQPQIKWSDTKGENIPAVEAPVVADGVGLYAVAASVIMRGSSGGGVSCIIRNSLLGLEKTASISIADPFFRSAQPWIAALAGTLPISLLLLAGASYFLWRQQKEKIALSRETEREREMKEMGYAATEQEISLREKLQEELKWRKIQYMARGEKSLAYHEWKMALFKPADVILDPDTANAILLVSEDQRSVQRAEEPRDLPDNPERFEWRYCVLGCENFTSGRHYWEVEVGDRKEWHIGVCSKNVERKKGWVKMTPENGYWTMGLTDGNKYRALTEPRTNLKLPEPPRKVGIFLDYETGEISFYNATDGSHIYTFPHASFSEPLYPVFRILTLEPTALTICPIPKEVESSPDPDLVPDHSLETPLTPGLANESGEPQAEVTSLLLPAHPGAEVSPSATTNQNHKLQARTEALY

SEQ ID NO: 169570 - protein, 542 aa, Artificial Sequence
  derived and/or modified sequence
MVGEDADLPCHLFPTMSAETMELRWVSSSLRQVVNVYADGKEVEDRQSAPYRGRTSILRDGITAGKAALRIHNVTASDSGKYLCYFQDGDFYEKALVELKVAALGSDLHIEVKGYEDGGIHLECRSTGWYPQPQIKWSDTKGENIPAVEAPVVADGVGLYAVAASVIMRGSSGGGVSCIIRNSLLGLEKTASISIADPFFRSAQPWIAALAGTLPISLLLLAGASYFLWRQQKEKIALSRETEREREMKEMGYAATEQEISLREKLQEELKWRKIQYMARGEKSLAYHEWKMALFKPADVILDPDTANAILLVSEDQRSVQRAEEPRDLPDNPERFEWRYCVLGCENFTSGRHYWEVEVGDRKEWHIGVCSKNVERKKGWVKMTPENGYWTMGLTDGNKYRALTEPRTNLKLPEPPRKVGIFLDYETGEISFYNATDGSHIYTFPHASFSEPLYPVFRILTLEPTALTICPIPKEVESSPDPDLVPDHSLETPLTPGLANESGEPQAEVTSLLLPAHPGAEVSPSATTNQNHKLQARTEALY

SEQ ID NO: 169571 - protein, 138 aa, Artificial Sequence
  derived and/or modified sequence
MKMASSLAFLLLNFHVSLFLVQLLTPCSAQFSVLGPSGPILAMVGEDADLPCHLFPTMSAETMELRWVSSSLRQVVNVYADGKEVEDRQSAPYRGRTSILRDGITAGKAALRIHNVTASDSGKYLCYFQDGDFYEKAL

SEQ ID NO: 169572 - protein, 238 aa, Artificial Sequence
  derived and/or modified sequence
MKMASSLAFLLLNFHVSLFLVQLLTPCSAQFSVLGPSGPILAMVGEDADLPCHLFPTMSAETMELRWVSSSLRQVVNVYADGKEVEDRQSAPYRGRTSILRDGITAGKAALRIHNVTASDSGKYLCYFQDGDFYEKALVELKVAALGSDLHIEVKGYEDGGIHLECRSTGWYPQPQIKWSDTKGENIPAVEAPVVADGVGLYAVAASVIMRGSSGGGVSCIIRNSLLGLEKTASISIA

SEQ ID NO: 169573 - DNA, 1755 bp, Artificial Sequence
  derived and/or modified sequence
atgaagatggcgtcttctcttgcattcctgcttttgaatttccacgtgtcattatttctggtgcagctgctgacaccctgctctgcccagttcagcgtgttgggaccgtccggacctatccttgccatggtgggagaggacgctgatctgccttgtcaccttttcccaaccatgtccgccgaaactatggagctacgatgggtctctagcagtttgcgtcaagttgttaatgtgtacgcagatggaaaggaggtggaggatcgtcagagtgccccttatcgcggacggacctccattctgcgggacgggatcacagccggtaaggccgcactacggatccacaacgttaccgcctcggattccggtaagtatctgtgttatttccaggatggggacttttatgagaaggccctggtggagttaaaagtggccgccctggggagcgacctgcatattgaggtgaaaggatacgaggatggcggaatccacctcgaatgcagatcaactggatggtacccccagccacagatcaagtggagcgacaccaaaggtgagaacattcccgccgtggaagctcctgttgttgccgacggcgttgggttgtacgcagttgccgcaagcgtgattatgcggggttccagtggaggcggggtgtcctgtatcatcaggaactctctgctcggtttggagaagactgcttctatctcaatcgccgacccctttttccgatccgcccagccctggatcgctgccctcgccggtacccttcccatcagccttctgctgctcgccggcgcgtcatacttcctgtggagacagcagaaagagaaaattgccctgtctcgggagaccgagcgagagagggagatgaaagaaatgggttatgcagccaccgagcaggagataagcctgcgagagaagttgcaggaggaactgaagtggcgcaaaattcagtatatggcaagaggtgaaaagtccctcgcttaccacgagtggaaaatggccctgtttaaacctgcggatgttatcctggatcctgacaccgcaaatgcgattcttctggtgagcgaagatcagcgttctgtacaacgcgcggaggagcctagggatcttccagacaatccggagaggtttgagtggcggtactgcgtgctgggatgtgagaatttcacatcagggagacactattgggaggtcgaagtgggtgaccggaaggagtggcacattggcgtgtgttcgaagaacgttgagagaaagaaagggtgggtgaaaatgactccggagaatggctactggacaatgggcttgacggatggcaataaatatcgtgccctcaccgagcctcgaacaaatttaaagctaccagagccgccgcggaaagtgggtattttccttgattatgagactggtgaaattagtttttacaatgccactgacggtagtcacatctacacatttccccatgcctctttttcagaacctctctatcctgtatttcgcatcctgaccttagaaccgaccgcactgactatctgtcccataccaaaagaggtggagtccagccctgatcctgatttggtgccagatcattctctggaaacccccctgacccctggtctggcgaacgaatctggggaaccgcaagcagaggtaacctcccttctactgcccgcacatcccggagccgaggtgtctccctctgctacaactaatcagaaccataaactgcaagctcggacagaggccctctactag

SEQ ID NO: 169574 - DNA, 1629 bp, Artificial Sequence
  derived and/or modified sequence
atggttggcgaggacgctgatcttccctgtcatctgttcccaaccatgtccgctgagaccatggagcttcgttgggtatcctcctcacttcggcaggtcgtgaatgtgtatgccgacggtaaggaagtggaagaccgacagagtgctccatatcgagggcgcacaagcatcctaagagacggtattacggcaggtaaagccgcactgagaattcataatgtgacagctagcgattcaggcaagtatctgtgttattttcaggatggggatttctacgaaaaggctctagttgagttgaaagtcgccgccctgggctcagacttgcacatagaggtcaaaggatatgaagatggcggaattcacttggagtgtcggagcactggctggtacccacagccacaaatcaagtggagcgataccaaaggcgaaaacatacctgcggttgaggcgcctgttgtggctgatggagtgggcctgtacgcggtagcagcctccgtgattatgcggggatcctctggagggggagtgtcatgtattatcagaaattccttactaggtctagaaaaaacggccagtatttccatagccgatcccttcttccggagcgcccaaccttggatcgccgctctagctggtacattgccaattagtcttctactgctggccggagcgtcctactttctctggaggcaacagaaggaaaaaatcgctctctccagggagacggagcgcgagcgggagatgaaagaaatggggtacgccgctacagaacaggagatctcactaagggagaagttacaagaagagctcaagtggcgcaagatccagtacatggcacgaggggaaaaatccttagcttatcatgagtggaagatggctctgttcaagcccgccgacgtgattctagatcccgacaccgccaacgcaatattactagtctccgaagaccagaggagcgtccagcgcgctgaggagccaagagatttgccagacaatccagaaaggttcgaatggcggtactgcgtcctcggatgcgaaaattttacatcagggaggcattactgggaggtcgaagtgggggatcgcaaggagtggcacataggggtctgctccaagaacgtcgagcgaaagaaaggatgggttaagatgacccctgaaaatggctactggacaatgggtttgactgacggtaataaatacagggccctgacagagcccaggacaaacttgaagctgcccgagcccccgcggaaggtgggaatcttcctggactatgagactggagagatctccttctacaatgccactgacggctcccacatctataccttcccccacgctagtttctccgagcccttataccctgtgttccggatcctgaccttagagccaaccgctttgacaatttgtccaataccaaaggaggtggagtcatccccagaccctgacctcgtgcccgaccacagtctcgagactccactaactcctgggctcgccaacgagtctggcgaacctcaagctgaggtaacaagtttactgttgccagcccatcctggggccgaagtctccccctctgccactacgaaccaaaatcataagctgcaggcacgtacagaagccctctattag

SEQ ID NO: 169575 - DNA, 717 bp, Artificial Sequence
  derived and/or modified sequence
atgaagatggccagctccctcgcgtttctgctgttgaatttccacgtgtcactgtttctcgttcagctactcactccctgttctgcccagtttagcgttctgggaccaagtggcccaattctggcaatggttggggaagacgccgacctgccttgccaccttttccccacaatgagcgctgagactatggaattgcggtgggtctcttctagtctgcgacaagttgtgaatgtgtacgctgatggaaaggaggtggaagacagacagtccgctccctaccgcggaaggacaagtatcctcagagatggtatcacagctggcaaggcagcattgcggatccacaacgtgaccgcatccgattcggggaagtatctttgctactttcaagacggggatttttacgagaaggctttagtcgagcttaaggtcgcagccttgggatcagacctgcacatcgaagtgaaagggtacgaagacggcggaatccaccttgagtgtaggagcactggctggtacccacagccacagataaagtggagcgataccaaaggagagaatattccggctgtagaggctccagtggtggctgacggggtgggcttgtacgccgtcgctgcatcggtgataatgcgcggttcgagtggggggggcgtgagctgcataattcgcaactctctgctgggattagagaaaacggcctctattagcattgcttag

SEQ ID NO: 169576 - DNA, 1755 bp, Artificial Sequence
  derived and/or modified sequence
atgaagatggccagcagcctggccttcctgctgctgaacttccacgtgtccctcttcctggtgcagctgctgaccccctgcagcgcccagttctctgtgctgggccccagcggccccatcctggccatggtgggggaggatgctgacctgccctgccacctgttccccaccatgtctgctgagaccatggagctgcgctgggtgagcagcagcctgcggcaggtggtgaatgtgtatgcagatggcaaggaggtggaggaccggcagagcgccccctaccggggccgcaccagcatcctgagagatggcatcacagctgggaaggccgccctgcgcatccacaacgtgacagccagtgacagcggcaagtacctgtgctacttccaggatggagacttctatgagaaggccctggtggagctgaaggtggccgccctgggcagtgacctgcacatcgaggtgaagggctatgaagatggcggcatccacctggagtgccgcagcacaggctggtacccccagccccagatcaagtggagcgacaccaagggggagaacatcccagctgtggaggcccctgtggtggctgatggagtgggcctgtatgctgtggccgccagcgtcatcatgaggggcagcagcggcggcggcgtgtcctgcatcatccggaacagcctgctgggcctggagaagacagccagcatcagcattgctgaccccttcttccgcagcgcccagccctggattgctgccctggccggcaccctgcccatcagcctgctgctgctggccggggccagctacttcctgtggaggcagcagaaggagaagatcgccctgagccgggagacagagcgggagcgggagatgaaggagatgggctacgccgccacagagcaggagatcagcctgcgggagaagctgcaggaggagctgaagtggaggaagatccagtacatggcccggggggagaagagcctggcctaccacgagtggaagatggccctcttcaagccagcagatgtgatcctggaccctgacacagccaatgccatcctgctggtgtctgaggaccagaggtctgtgcagagagctgaggagccccgggacctgcctgacaaccctgagagatttgagtggagatactgtgtgctgggctgtgagaacttcaccagcggccgccactactgggaggtggaggtgggggacaggaaggagtggcacatcggcgtgtgcagcaagaatgtggagaggaagaagggctgggtgaagatgaccccagaaaatggctactggaccatgggcctgacagatggcaacaagtaccgggccctgacagagcccaggaccaacctgaagctgcctgagccccccaggaaggtgggcatcttcctggactatgaaacaggagagatctccttctacaatgccacagatggcagccacatctacaccttcccccacgccagcttcagcgagcccctgtaccctgtgttccgcatcctgaccctggagcccacagccctgaccatctgccccatccccaaggaggtggagagcagcccagaccctgacctggtgcctgaccacagcctggagacccccctgaccccaggcctggccaatgaaagtggagagccccaggccgaggtgaccagcctgctgctgcctgcccaccctggagctgaggtgagccccagcgccaccaccaaccagaaccacaagctgcaggccaggacagaggccctgtactag

SEQ ID NO: 169577 - DNA, 1629 bp, Artificial Sequence
  derived and/or modified sequence
atggtgggggaggatgctgacctgccctgccacctgttccccaccatgtctgctgagaccatggagctgcgctgggtgagcagcagcctgcggcaggtggtgaatgtgtatgcagatggcaaggaggtggaggaccggcagagcgccccctaccggggccgcaccagcatcctgagagatggcatcacagctgggaaggccgccctgcgcatccacaacgtgacagccagtgacagcggcaagtacctgtgctacttccaggatggagacttctatgagaaggccctggtggagctgaaggtggccgccctgggcagtgacctgcacatcgaggtgaagggctatgaagatggcggcatccacctggagtgccgcagcacaggctggtacccccagccccagatcaagtggagcgacaccaagggggagaacatcccagctgtggaggcccctgtggtggctgatggagtgggcctgtatgctgtggccgccagcgtcatcatgaggggcagcagcggcggcggcgtgtcctgcatcatccggaacagcctgctgggcctggagaagacagccagcatcagcattgctgaccccttcttccgcagcgcccagccctggattgctgccctggccggcaccctgcccatcagcctgctgctgctggccggggccagctacttcctgtggaggcagcagaaggagaagatcgccctgagccgggagacagagcgggagcgggagatgaaggagatgggctacgccgccacagagcaggagatcagcctgcgggagaagctgcaggaggagctgaagtggaggaagatccagtacatggcccggggggagaagagcctggcctaccacgagtggaagatggccctcttcaagccagcagatgtgatcctggaccctgacacagccaatgccatcctgctggtgtctgaggaccagaggtctgtgcagagagctgaggagccccgggacctgcctgacaaccctgagagatttgagtggagatactgtgtgctgggctgtgagaacttcaccagcggccgccactactgggaggtggaggtgggggacaggaaggagtggcacatcggcgtgtgcagcaagaatgtggagaggaagaagggctgggtgaagatgaccccagaaaatggctactggaccatgggcctgacagatggcaacaagtaccgggccctgacagagcccaggaccaacctgaagctgcctgagccccccaggaaggtgggcatcttcctggactatgaaacaggagagatctccttctacaatgccacagatggcagccacatctacaccttcccccacgccagcttcagcgagcccctgtaccctgtgttccgcatcctgaccctggagcccacagccctgaccatctgccccatccccaaggaggtggagagcagcccagaccctgacctggtgcctgaccacagcctggagacccccctgaccccaggcctggccaatgaaagtggagagccccaggccgaggtgaccagcctgctgctgcctgcccaccctggagctgaggtgagccccagcgccaccaccaaccagaaccacaagctgcaggccaggacagaggccctgtactag

SEQ ID NO: 169578 - DNA, 717 bp, Artificial Sequence
  derived and/or modified sequence
atgaagatggccagcagcctggccttcctgctgctgaacttccacgtgtccctcttcctggtgcagctgctgaccccctgcagcgcccagttctctgtgctgggccccagcggccccatcctggccatggtgggggaggatgctgacctgccctgccacctgttccccaccatgtctgctgagaccatggagctgcgctgggtgagcagcagcctgcggcaggtggtgaatgtgtatgcagatggcaaggaggtggaggaccggcagagcgccccctaccggggccgcaccagcatcctgagagatggcatcacagctgggaaggccgccctgcgcatccacaacgtgacagccagtgacagcggcaagtacctgtgctacttccaggatggagacttctatgagaaggccctggtggagctgaaggtggccgccctgggcagtgacctgcacatcgaggtgaagggctatgaagatggcggcatccacctggagtgccgcagcacaggctggtacccccagccccagatcaagtggagcgacaccaagggggagaacatcccagctgtggaggcccctgtggtggctgatggagtgggcctgtatgctgtggccgccagcgtcatcatgaggggcagcagcggcggcggcgtgtcctgcatcatccggaacagcctgctgggcctggagaagacagccagcatcagcatcgcctag

SEQ ID NO: 169579 - DNA, 1755 bp, Artificial Sequence
  derived and/or modified sequence
atgaagatggccagcagcctggccttcctgctgctgaacttccacgtgtccctctttctggtgcaactgctgaccccatgtagcgcccagttctccgtgctgggtccatcaggcccaatccttgcgatggtcggtgaggacgccgacctgccatgtcatttattccctacaatgtcagccgaaactatggaactgcgctgggtgtcctcctcgctgcggcaggtggtgaacgtgtatgctgacgggaaagaggtggaggatcggcagtccgcaccctatcgcggcagaacaagtatcctgcgagatggaataactgccgggaaagccgcgctgaggattcacaacgtgactgcctctgacagtggcaaatacttatgctattttcaagacggggatttctacgaaaaggctctggtggagctgaaagtggctgctctcggttcggacttacacattgaagttaagggttatgaagacggcgggatccacttagagtgtcgcagtaccgggtggtatcctcagccgcagatcaaatggtcggacaccaagggcgagaacattcctgcagtggaggcgcctgtcgtcgccgacggagtaggtctctatgctgtggcggctagcgtcatcatgcggggatccagcgggggcggggtgtcctgcattatcagaaatagccttctgggactggaaaaaacggcgtccattagcatcgccgacccattttttagatctgcacagccatggatcgccgcacttgccgggacgctcccaatttctctcctgctcttggccggagcaagttacttcctttggcgacagcaaaaagagaagatcgctctgagccgcgagaccgaacgcgaaagggaaatgaaggagatggggtacgctgctacggagcaggagatctctttacgagagaaactgcaggaggagctcaagtggagaaagatccaatacatggcgaggggagagaagagtcttgcgtaccatgaatggaaaatggctctctttaaaccagccgacgtgatcctggacccagacacagccaatgccattttactggtctcagaggaccagaggtccgtgcagagagcagaagagccgagggatctgccagataacccggaacgcttcgagtggcgatattgtgtcctggggtgtgaaaatttcacgtctggccggcactactgggaggttgaggtgggcgacagaaaagagtggcatatcggagtctgcagtaagaacgtagagcgcaagaaaggctgggtgaagatgacgcctgaaaacggatattggacgatgggactcaccgatgggaacaaatacagggctcttactgagccaaggaccaatctgaagttgccagagcccccaaggaaggttggcatcttcctggactacgaaacgggcgaaatctcattctacaatgcgactgacggaagtcacatttacactttccctcacgcctcattcagcgaaccgctgtatccagtatttcggatcctgacgctggagcctacggcccttacgatatgcccaattcccaaggaggtggagtctagccccgatccggacctcgtgccagatcattccttggagaccccactcacacctggactggctaacgagagtggggaaccccaagccgaggtgacaagcctgctgctcccagctcacccaggggctgaggtgtctccaagcgcaaccacaaaccagaatcataaattgcaagcgcgaaccgaagcactgtattag

SEQ ID NO: 169580 - DNA, 1629 bp, Artificial Sequence
  derived and/or modified sequence
atggtgggcgaggacgccgacctgccctgccacctgttccccaccatgagtgcggagaccatggaattacgatgggtatcaagttcattgaggcaggtagtcaatgtttacgctgatgggaaggaagtagaagacaggcagtcagccccttatagaggcaggacgagcatattgagagacggcataaccgccggcaaggctgcactcaggattcataatgttaccgcctcagacagcggcaagtatctgtgttactttcaggacggagacttttacgagaaggcgctggttgaactgaaggtggctgcccttgggagcgatctgcacatcgaagtcaagggttacgaagatggcggaatccaccttgaatgtcgatcaacaggatggtacccccagccgcaaatcaagtggtccgatactaagggggaaaacattcccgccgttgaggcgcctgtcgtagctgacggagtgggcctgtatgcggtggctgcctctgtgatcatgcgtgggtcctctggagggggagtgtcctgtatcatcagaaactcactcttgggcctcgagaaaactgcatcaatttcaatcgctgacccattctttcgctcggctcagccctggatagccgccttagcgggcaccctgcccataagtcttctcctgttagcgggggcgtcatactttctctggcgtcagcagaaagagaaaattgccttatcacgggaaactgaaagagagcgcgaaatgaaggagatgggctacgccgctaccgaacaagagattagcctaagggagaagctacaggaggaattaaagtggagaaaaattcaatatatggctagaggcgagaagtccttggcctaccatgaatggaaaatggccctgtttaaaccggccgatgtgatactggatccggacaccgcaaatgccatcttactcgtcagcgaagaccagcgatcagtccagcgcgctgaggaaccacgagacctaccagacaaccccgagcgttttgaatggcgatattgcgtgttgggttgcgagaatttcacttcaggacgccattactgggaagtcgaggtgggcgacagaaaagaatggcatattggcgtgtgttctaaaaacgttgagcgcaagaaaggatgggtgaagatgacgccagaaaacgggtattggaccatgggccttacagacgggaataagtatcgcgctctcaccgaaccaagaaccaatttgaagctgcccgaacccccaaggaaggtcggcatattcctggactacgaaacaggtgaaatatcattttataacgcaacagatgggagtcatatctatacctttccacatgcttccttcagtgagccactgtatcccgtgttcagaattttaacactcgagccaacggccctgactatttgtccgattcccaaggaggtggagagcagtcccgaccctgacctcgtcccagatcatagcctggaaacgcccctgacccctggtctggctaatgaaagtggtgaaccccaggccgaggtgacctcccttctgttaccagcccaccctggagccgaggtgagcccttcagccactactaatcagaaccataaactacaggccaggaccgaggcgctgtactag

SEQ ID NO: 169581 - DNA, 717 bp, Artificial Sequence
  derived and/or modified sequence
atgaagatggccagcagcctggccttcctgctgctgaacttccacgtctccctgtttctggtgcagctgctcacgccgtgttccgctcagtttagcgtcctgggaccctcaggccctatactggccatggtgggggaagatgccgatttgccatgccacctgtttccaaccatgtctgccgaaacgatggaattaaggtgggtgtcatcatcattaaggcaagtggtgaacgtgtatgcggatggtaaggaagtggaggacagacaatccgcaccatacaggggacggacctccattctccgtgatggcattacggccggtaaagcagccctgagaattcacaatgtgacggcctccgattctggaaaatacctctgttattttcaggatggggacttttatgaaaaggctctcgtggaacttaaggtagcagccctgggcagcgatctgcatatcgaggtgaaggggtatgaagacggggggatccatttggagtgtaggtcaacaggttggtatcctcaaccgcagatcaaatggagtgatactaagggcgaaaatatccccgcggtggaggcccctgtagttgcagacggggtgggactttacgccgtggcagcgtctgtcatcatgaggggaagcagcggcggcggcgtatcatgcatcatcaggaacagtttgttgggattagagaaaacagctagcatatcaatagcttag

SEQ ID NO: 169582 - DNA, 1755 bp, Artificial Sequence
  derived and/or modified sequence
atgaagatggctagctcactggcctttcttctgctgaattttcacgtctcattattcctggtgcagctgctgacgccgtgcagtgcccagttcagcgttctgggcccttcagggccaattctagccatggttggagaagatgcggacctcccttgccacctgttcccaaccatgagtgccgagactatggaactgcgctgggtctcttcctcgctccggcaagttgttaacgtctacgcagatggcaaagaagtggaggatcgccaaagcgccccatatagaggacggacttctatcctgcgagacgggattacagccggtaaagcggctcttagaatacacaacgtgactgccagcgactcagggaaatatctgtgctatttccaggacggagacttttatgaaaaggcgctcgtcgagttaaaagtcgcagctctgggttctgacctgcacatcgaggtcaagggatacgaagacgggggaatacatctggagtgtcgctcaaccggctggtatccccaaccacagattaaatggagcgacactaagggcgagaacattccggcagttgaagccccagtggtggccgatggcgtcgggttgtatgccgtggccgcaagcgttattatgagggggtcttccggcggtggcgtgtcctgtatcattagaaactctctgctcggactggagaaaactgcctcaatttcaattgcagaccctttctttcgttccgcccaaccttggatcgcggctttagccggtaccctccctatttctctgcttctgcttgcgggagcctcttacttcttatggcgtcagcagaaagagaagattgccttatctcgcgagactgaacgtgaacgcgagatgaaggagatgggctatgctgcgaccgagcaggaaattagcctgcgagaaaagctccaggaagaactaaagtggcgtaagattcagtatatggccaggggagagaagagtctggcctaccacgagtggaagatggcactgtttaagccagccgatgtcattttagatccagatactgccaacgccatccttctagtaagtgaggatcagcgatctgtccaaagggcagaggaacctagagacctgcctgacaaccccgagcggtttgagtggcggtattgtgtactaggttgtgaaaatttcacaagtggacggcactattgggaggtggaggtcggcgatcgcaaggaatggcatattggcgtttgctccaagaacgtggaacgcaagaaagggtgggtcaagatgactcccgagaatggttactggactatgggcctgacggatggcaataaataccgagccctgactgagcccaggactaatctgaagctcccggagccccctagaaaagtcgggattttcctggattatgagaccggagagatctcattctacaatgcaactgatggaagccatatctatactttcccacacgcctcctttagcgagccgctgtaccccgtcttccggattctcacgctggaacctacagcactcaccatctgccccatcccaaaagaagtggaatcctctccagatcctgatctggtgcctgaccatagcctggagacgccgctcacccctgggctagccaacgagtccggggaaccgcaggctgaagtcacgtcacttttgctgccggcacatcctggagccgaggttagccccagcgcaaccactaatcaaaaccacaagctacaggctagaaccgaggccctttattag

SEQ ID NO: 169583 - DNA, 1629 bp, Artificial Sequence
  derived and/or modified sequence
atggttggagaggatgccgatctcccatgccacctgtttcctactatgtctgcagagacaatggagctgaggtgggtgtccagcagtctgagacaggtggttaatgtgtatgctgacggcaaggaggtggaggaccggcagtctgcaccttaccgcggacgaaccagcattttacgtgacggaatcaccgccggaaaggcagcactcaggattcacaatgtgacagcctctgacagtggcaagtacttgtgctattttcaggacggcgatttctacgaaaaggcactggtggaacttaaggtcgcagctctggggagtgacctgcacattgaggtcaagggctacgaggacggtggtatccacctcgagtgtcgctccactggctggtacccgcagccccaaatcaagtggtccgacacgaaaggagaaaacatccccgctgtagaagctcctgtggtcgccgatggtgtggggctgtatgctgtcgcggcttctgtgattatgcgcggatcgtcaggaggcggagttagctgcataatcagaaacagtcttctgggcctagaaaaaaccgctagcatctctatcgcggatccattcttccgcagtgcacagccgtggatcgccgctctggccggaaccttaccaatcagcctcctgctgctggccggagcaagctactttttgtggcgacagcagaaggagaagatcgccctctcacgcgaaactgaaagggagcgcgagatgaaggaaatgggctacgcagccaccgagcaagagattagcctgcgcgaaaaattgcaggaggaactgaagtggcgcaagatccaatacatggccagaggcgagaagagtctggcgtatcacgaatggaagatggccctgtttaagcccgctgatgtgatccttgaccctgacaccgctaatgcaatcctcctggttagcgaggatcagcggagcgtccagagggctgaagaacctcgtgacctcccagacaaccccgaaaggtttgaatggcgctattgcgtgctcggttgcgagaatttcactagtggccgacactattgggaggtggaagtgggagaccgcaaggaatggcacataggtgtgtgcagtaaaaacgtcgagagaaagaaggggtgggtcaaaatgacgccagagaacggctattggacgatgggcctcaccgatggcaacaaataccgggctctgacggaacccagaactaatctgaaactaccagaacccccacggaaggttggcattttcctggactacgaaaccggagagatctctttctacaatgcaacggacggctcacacatctacacctttccacacgccagtttctccgaacccctttatcctgtttttcggattctaaccctggagccaacagcactcacaatttgccccatcccaaaagaggtggaaagctcccccgatcccgatctggtgcccgatcacagcctggagacccctttaacaccgggtctcgcaaatgaaagcggagagccgcaggccgaagtaacctcccttcttctacctgctcaccctggcgctgaggtgtcgcccagcgcgaccaccaaccaaaatcataagctgcaggcgagaaccgaagccctgtactag

SEQ ID NO: 169584 - DNA, 717 bp, Artificial Sequence
  derived and/or modified sequence
atgaagatggccagttcccttgccttcctcttgctgaattttcatgtgtctctttttctggtccagctgctgaccccatgctctgcacaattctctgtgcttgggccttctggtcccatcctcgccatggtgggggaggatgcggatttgccatgtcatttatttccaaccatgtccgccgagacgatggaactgagatgggtttcctcctccttgagacaggtcgttaacgtctacgctgacggcaaggaggtcgaggacaggcagagcgctccgtatcgcggacggacctctattctgagagacggcatcacagcgggtaaagccgcactacgaatacacaatgttaccgccagtgattcaggcaagtacctgtgctactttcaggatggagacttctacgagaaggctcttgtggagctcaaagtcgcagccctgggaagcgatttacacattgaagtgaagggttacgaagacggcggaattcatttagagtgtcgcagcacaggctggtatccacagccacagatcaagtggtctgacaccaaaggcgaaaacattcctgccgtggaagcaccggtggtggcagacggggttggcctgtacgcagtggccgcttccgtaattatgcggggatcttccggcggtggagtgagctgcatcataagaaattccctcttaggcctggagaagacagcctccatctctattgcttag

SEQ ID NO: 169585 - DNA, 2294 bp, Artificial Sequence
  derived and/or modified sequence
cttccaaaaagagattgttattattcctcacaataaccagatagcctctgctttctttttcctttcttcggaatgagagactcaaccataatagaaagaatggagaactattaaccaccattcttcagtgggctgtgattttcagaggggaatactaagaaatggttttccatactggaacccaaaggtaaagacactcaaggacagacatttttggcagagctgctcactccttgctcagctcagttttctgtgcttggaccctctgggcccatcctggccatggtgggtgaagacgctgatctgccctgtcacctgttcccgaccatgagtgcagagaccatggagctgaggtgggtgagttccagcctaaggcaggtggtgaacgtgtatgcagatggaaaggaagtggaagacaggcagagtgcaccgtatcgagggagaacttcgattctgcgggatggcatcactgcagggaaggctgctctccgaatacacaacgtcacagcctctgacagtggaaagtacttgtgttatttccaagatggtgacttctacgaaaaagccctggtggagctgaaggttgcagcattgggttctgatcttcacattgaagtgaagggttatgaggatggagggatccatctggagtgcaggtccactggctggtacccccaaccccaaataaagtggagcgacaccaagggagagaacatcccggctgtggaagcacctgtggttgcagatggagtgggcctgtatgcagtagcagcatctgtgatcatgagaggcagctctggtgggggtgtatcctgcatcatcagaaattccctcctcggcctggaaaagacagccagcatatccatcgcagaccccttcttcaggagcgcccagccctggatcgcggccctggcagggaccctgcctatctcgttgctgcttctcgcaggagccagttacttcttgtggagacaacagaaggaaaaaattgctctgtccagggagacagaaagagagcgagagatgaaagaaatgggatacgctgcaacagagcaagaaataagcctaagagagtggaggaaaatccagtacatggctcgtggagagaagtctttggcctatcatgaatggaaaatggccctcttcaaacctgcggatgtgattctggatccagacacggcaaacgccatcctccttgtttctgaggaccagaggagtgtgcagcgtgctgaagagccgcgggatctgccagacaaccctgagagatttgaatggcgttactgtgtccttggctgtgaaaacttcacatcagggagacattactgggaggtggaagtgggggacagaaaagagtggcatattggggtatgtagtaagaacgtggagaggaaaaaaggttgggtcaaaatgacaccggagaacggatactggactatgggcctgactgatgggaataagtatcgggctctcactgagcccagaaccaacctgaaacttcctgagcctcctaggaaagtggggatcttcctggactatgagactggagagatctcgttctataatgccacagatggatctcatatctacacctttccgcacgcctctttctctgagcctctatatcctgttttcagaattttgaccttggagcccactgccctgaccatttgcccaataccaaaagaagtagagagttcccccgatcctgacctagtgcctgatcattccctggagacaccactgaccccgggcttagctaatgaaagtggggagcctcaggctgaagtaacatctctgcttctccctgcccaccctggagctgaggtctccccttctgcaacaaccaatcagaaccataagctacaggcacgcactgaagcactttactgatattcattccattattccatatgacagttgttttgagtttcgtaccaccttattgtccccttatacagataaggaaactggggtgcagaaaggtgaattaactttacaaagtagacatgacaagtgaacagcagagctgggatctaaacagcaataactaacattaacagagaatttaaaatgttcttagtgctgtgttataagctttggtggatgtcactcctttaatcctcacaacaccctgtcgggtagtcatattttgcaagtatggaagctgaggcagggcaacatgaagtaacttacataactcatacagtaatttgtgcagttgggagatgttcagccttagtccctggctaattgcctgttcttttccagcctgattttttttcccacaggaagag

SEQ ID NO: 169586 - DNA, 3002 bp, Artificial Sequence
  derived and/or modified sequence
aatcaaaaaactaattcttccaaaaagagattgttattattcctcacaataaccagatagcctctgctttctttttcctttcttcggaatgagagactcaaccataatagaaagaatggagaactattaaccaccattcttcagtgggctgtgattttcagaggggaatactaagaaatggttttccatactggaacccaaaggtaaagacactcaaggacagacatttttggcagagcatagatgaaaatggcaagttccctggctttccttctgctcaactttcatgtctccctcttcttggtccagctgctcactccttgctcagctcagttttctgtgcttggaccctctgggcccatcctggccatggtgggtgaagacgctgatctgccctgtcacctgttcccgaccatgagtgcagagaccatggagctgaggtgggtgagttccagcctaaggcaggtggtgaacgtgtatgcagatggaaaggaagtggaagacaggcagagtgcaccgtatcgagggagaacttcgattctgcgggatggcatcactgcagggaaggctgctctccgaatacacaacgtcacagcctctgacagtggaaagtacttgtgttatttccaagatggtgacttctacgaaaaagccctggtggagctgaaggttgcagcattgggttctgatcttcacattgaagtgaagggttatgaggatggagggatccatctggagtgcaggtccactggctggtacccccaaccccaaataaagtggagcgacaccaagggagagaacatcccggctgtggaagcacctgtggttgcagatggagtgggcctgtatgcagtagcagcatctgtgatcatgagaggcagctctggtgggggtgtatcctgcatcatcagaaattccctcctcggcctggaaaagacagccagcatatccatcgcagaccccttcttcaggagcgcccagccctggatcgcggccctggcagggaccctgcctatctcgttgctgcttctcgcaggagccagttacttcttgtggagacaacagaaggaaaaaattgctctgtccagggagacagaaagagagcgagagatgaaagaaatgggatacgctgcaacagagcaagaaataagcctaagagagaagctccaggaggaactcaagtggaggaaaatccagtacatggctcgtggagagaagtctttggcctatcatgaatggaaaatggccctcttcaaacctgcggatgtgattctggatccagacacggcaaacgccatcctccttgtttctgaggaccagaggagtgtgcagcgtgctgaagagccgcgggatctgccagacaaccctgagagatttgaatggcgttactgtgtccttggctgtgaaaacttcacatcagggagacattactgggaggtggaagtgggggacagaaaagagtggcatattggggtatgtagtaagaacgtggagaggaaaaaaggttgggtcaaaatgacaccggagaacggatactggactatgggcctgactgatgggaataagtatcgggctctcactgagcccagaaccaacctgaaacttcctgagcctcctaggaaagtggggatcttcctggactatgagactggagagatctcgttctataatgccacagatggatctcatatctacacctttccgcacgcctctttctctgagcctctatatcctgttttcagaattttgaccttggagcccactgccctgaccatttgcccaataccaaaagaagtagagagttcccccgatcctgacctagtgcctgatcattccctggagacaccactgaccccgggcttagctaatgaaagtggggagcctcaggctgaagtaacatctctgcttctccctgcccaccctggagctgaggtctccccttctgcaacaaccaatcagaaccataagctacaggcacgcactgaagcactttactgatattcattccattattccatatgacagttgttttgagtttcgtaccaccttattgtccccttatacagataaggaaactggggtgcagaaaggtgaattaactttacaaagtagacatgacaagtgaacagcagagctgggatctaaacagcaataactaacattaacagagaatttaaaatgttcttagtgctgtgttataagctttggtggatgtcactcctttaatcctcacaacaccctgtcgggtagtcatattttgcaagtatggaagctgaggcagggcaacatgaagtaacttacataactcatacagtaatttgtgcagttgggagatgttcagccttagtccctggctaattgcctgttcttttccagcctgattttttttcccacaggaagagcccacatgtagccctgaggtttccttcccaggacagctgcagggtagagatcattttaagtgcttgtggagttgacatccctattgactctttcccagctgatatcagagacttagacccagcactccttggattagctctgcagagtgtcttggttgagagaataacctcatagtaccaacatgacatgtgacttggaaagagactagaggccacacttgataaatcatggggcacagatatgttcccacccaacaaatgtgataagtgattgtgcagccagagccagccttccttcaatcaaggtttccaggcagagcaaataccctagagattctctgtgatataggaaatttggatcaaggaagctaaaagaattacagggatgtttttaatcccactatggactcagtctcctggaaataggtctgtccactcctggtcattggtggatgttaaacccatattcctttcaactgctgcctgctagggaaaactgctcctcattatcatcactattattgctcaccactgtatcccctctacttggcaagtggttgtcaagttctagttgttcaataaatgtgttaataatgctta

SEQ ID NO: 169587 - DNA, 2930 bp, Artificial Sequence
  derived and/or modified sequence
aatcaaaaaactaattcttccaaaaagagattgttattattcctcacaataaccagatagcctctgctttctttttcctttcttcggaatgagagactcaaccataatagaaagaatggagaactattaaccaccattcttcagtgggctgtgattttcagaggggaatactaagaaatggttttccatactggaacccaaaggtaaagacactcaaggacagacatttttggcagagctgctcactccttgctcagctcagttttctgtgcttggaccctctgggcccatcctggccatggtgggtgaagacgctgatctgccctgtcacctgttcccgaccatgagtgcagagaccatggagctgaggtgggtgagttccagcctaaggcaggtggtgaacgtgtatgcagatggaaaggaagtggaagacaggcagagtgcaccgtatcgagggagaacttcgattctgcgggatggcatcactgcagggaaggctgctctccgaatacacaacgtcacagcctctgacagtggaaagtacttgtgttatttccaagatggtgacttctacgaaaaagccctggtggagctgaaggttgcagcattgggttctgatcttcacattgaagtgaagggttatgaggatggagggatccatctggagtgcaggtccactggctggtacccccaaccccaaataaagtggagcgacaccaagggagagaacatcccggctgtggaagcacctgtggttgcagatggagtgggcctgtatgcagtagcagcatctgtgatcatgagaggcagctctggtgggggtgtatcctgcatcatcagaaattccctcctcggcctggaaaagacagccagcatatccatcgcagaccccttcttcaggagcgcccagccctggatcgcggccctggcagggaccctgcctatctcgttgctgcttctcgcaggagccagttacttcttgtggagacaacagaaggaaaaaattgctctgtccagggagacagaaagagagcgagagatgaaagaaatgggatacgctgcaacagagcaagaaataagcctaagagagaagctccaggaggaactcaagtggaggaaaatccagtacatggctcgtggagagaagtctttggcctatcatgaatggaaaatggccctcttcaaacctgcggatgtgattctggatccagacacggcaaacgccatcctccttgtttctgaggaccagaggagtgtgcagcgtgctgaagagccgcgggatctgccagacaaccctgagagatttgaatggcgttactgtgtccttggctgtgaaaacttcacatcagggagacattactgggaggtggaagtgggggacagaaaagagtggcatattggggtatgtagtaagaacgtggagaggaaaaaaggttgggtcaaaatgacaccggagaacggatactggactatgggcctgactgatgggaataagtatcgggctctcactgagcccagaaccaacctgaaacttcctgagcctcctaggaaagtggggatcttcctggactatgagactggagagatctcgttctataatgccacagatggatctcatatctacacctttccgcacgcctctttctctgagcctctatatcctgttttcagaattttgaccttggagcccactgccctgaccatttgcccaataccaaaagaagtagagagttcccccgatcctgacctagtgcctgatcattccctggagacaccactgaccccgggcttagctaatgaaagtggggagcctcaggctgaagtaacatctctgcttctccctgcccaccctggagctgaggtctccccttctgcaacaaccaatcagaaccataagctacaggcacgcactgaagcactttactgatattcattccattattccatatgacagttgttttgagtttcgtaccaccttattgtccccttatacagataaggaaactggggtgcagaaaggtgaattaactttacaaagtagacatgacaagtgaacagcagagctgggatctaaacagcaataactaacattaacagagaatttaaaatgttcttagtgctgtgttataagctttggtggatgtcactcctttaatcctcacaacaccctgtcgggtagtcatattttgcaagtatggaagctgaggcagggcaacatgaagtaacttacataactcatacagtaatttgtgcagttgggagatgttcagccttagtccctggctaattgcctgttcttttccagcctgattttttttcccacaggaagagcccacatgtagccctgaggtttccttcccaggacagctgcagggtagagatcattttaagtgcttgtggagttgacatccctattgactctttcccagctgatatcagagacttagacccagcactccttggattagctctgcagagtgtcttggttgagagaataacctcatagtaccaacatgacatgtgacttggaaagagactagaggccacacttgataaatcatggggcacagatatgttcccacccaacaaatgtgataagtgattgtgcagccagagccagccttccttcaatcaaggtttccaggcagagcaaataccctagagattctctgtgatataggaaatttggatcaaggaagctaaaagaattacagggatgtttttaatcccactatggactcagtctcctggaaataggtctgtccactcctggtcattggtggatgttaaacccatattcctttcaactgctgcctgctagggaaaactgctcctcattatcatcactattattgctcaccactgtatcccctctacttggcaagtggttgtcaagttctagttgttcaataaatgtgttaataatgctt

SEQ ID NO: 169588 - DNA, 1002 bp, Artificial Sequence
  derived and/or modified sequence
agagattgttattattcctcacaataaccagatagcctctgctttctttttcctttcttcggaatgagagactcaaccataatagaaagaatggagaactattaaccaccattcttcagtgggctgtgattttcagaggggaatactaagaagtaagtggggaatgttgattagagcctgggctacaatgcctgggaggacaagagctgaatcgctgagagtgatggttttccatactggaacccaaaggtaaagacactcaaggacagacatttttggcagagcatagatgaaaatggcaagttccctggctttccttctgctcaactttcatgtctccctcttcttggtccagctgctcactccttgctcagctcagttttctgtgcttggaccctctgggcccatcctggccatggtgggtgaagacgctgatctgccctgtcacctgttcccgaccatgagtgcagagaccatggagctgaggtgggtgagttccagcctaaggcaggtggtgaacgtgtatgcagatggaaaggaagtggaagacaggcagagtgcaccgtatcgagggagaacttcgattctgcgggatggcatcactgcagggaaggctgctctccgaatacacaacgtcacagcctctgacagtggaaagtacttgtgttatttccaagatggtgacttctacgaaaaagccctggtggagctgaaggttgcagcattgggttctgatcttcacattgaagtgaagggttatgaggatggagggatccatctggagtgcaggtccactggctggtacccccaaccccaaataaagtggagcgacaccaagggagagaacatcccggctgtggaagcacctgtggttgcagatggagtgggcctgtatgcagtagcagcatctgtgatcatgagaggcagctctggtgggggtgtatcctgcatcatcagaaattccctcctcggcctggaaaagacagccagcatatccatcgc

SEQ ID NO: 169589 - DNA, 1755 bp, Artificial Sequence
  derived and/or modified sequence
atgaagatggccagcagcctggccttcctgctgctgaacttccacgtgagcctgttcctggtgcagctgctgaccccctgcagcgcccagttcagcgtgctgggccccagcggccccatcctggccatggtgggcgaggacgccgacctgccctgccacctgttccccaccatgagcgccgagaccatggagctgagatgggtgagcagcagcctgagacaggtggtgaacgtgtacgccgacggcaaggaggtggaggacagacagagcgccccctacagaggcagaaccagcatcctgagagacggcatcaccgccggcaaggccgccctgagaatccacaacgtgaccgccagcgacagcggcaagtacctgtgctacttccaggacggcgacttctacgagaaggccctggtggagctgaaggtggccgccctgggcagcgacctgcacatcgaggtgaagggctacgaggacggcggcatccacctggagtgcagaagcaccggctggtacccccagccccagatcaagtggagcgacaccaagggcgagaacatccccgccgtggaggcccccgtggtggccgacggcgtgggcctgtacgccgtggccgccagcgtgatcatgagaggcagcagcggcggcggcgtgagctgcatcatcagaaacagcctgctgggcctggagaagaccgccagcatcagcatcgccgaccccttcttcagaagcgcccagccctggatcgccgccctggccggcaccctgcccatcagcctgctgctgctggccggcgccagctacttcctgtggagacagcagaaggagaagatcgccctgagcagagagaccgagagagagagagagatgaaggagatgggctacgccgccaccgagcaggagatcagcctgagagagaagctgcaggaggagctgaagtggagaaagatccagtacatggccagaggcgagaagagcctggcctaccacgagtggaagatggccctgttcaagcccgccgacgtgatcctggaccccgacaccgccaacgccatcctgctggtgagcgaggaccagagaagcgtgcagagagccgaggagcccagagacctgcccgacaaccccgagagattcgagtggagatactgcgtgctgggctgcgagaacttcaccagcggcagacactactgggaggtggaggtgggcgacagaaaggagtggcacatcggcgtgtgcagcaagaacgtggagagaaagaagggctgggtgaagatgacccccgagaacggctactggaccatgggcctgaccgacggcaacaagtacagagccctgaccgagcccagaaccaacctgaagctgcccgagccccccagaaaggtgggcatcttcctggactacgagaccggcgagatcagcttctacaacgccaccgacggcagccacatctacaccttcccccacgccagcttcagcgagcccctgtaccccgtgttcagaatcctgaccctggagcccaccgccctgaccatctgccccatccccaaggaggtggagagcagccccgaccccgacctggtgcccgaccacagcctggagacccccctgacccccggcctggccaacgagagcggcgagccccaggccgaggtgaccagcctgctgctgcccgcccaccccggcgccgaggtgagccccagcgccaccaccaaccagaaccacaagctgcaggccagaaccgaggccctgtactag

SEQ ID NO: 169590 - DNA, 1629 bp, Artificial Sequence
  derived and/or modified sequence
atggtgggcgaggacgccgacctgccctgccacctgttccccaccatgagcgccgagaccatggagctgagatgggtgagcagcagcctgagacaggtggtgaacgtgtacgccgacggcaaggaggtggaggacagacagagcgccccctacagaggcagaaccagcatcctgagagacggcatcaccgccggcaaggccgccctgagaatccacaacgtgaccgccagcgacagcggcaagtacctgtgctacttccaggacggcgacttctacgagaaggccctggtggagctgaaggtggccgccctgggcagcgacctgcacatcgaggtgaagggctacgaggacggcggcatccacctggagtgcagaagcaccggctggtacccccagccccagatcaagtggagcgacaccaagggcgagaacatccccgccgtggaggcccccgtggtggccgacggcgtgggcctgtacgccgtggccgccagcgtgatcatgagaggcagcagcggcggcggcgtgagctgcatcatcagaaacagcctgctgggcctggagaagaccgccagcatcagcatcgccgaccccttcttcagaagcgcccagccctggatcgccgccctggccggcaccctgcccatcagcctgctgctgctggccggcgccagctacttcctgtggagacagcagaaggagaagatcgccctgagcagagagaccgagagagagagagagatgaaggagatgggctacgccgccaccgagcaggagatcagcctgagagagaagctgcaggaggagctgaagtggagaaagatccagtacatggccagaggcgagaagagcctggcctaccacgagtggaagatggccctgttcaagcccgccgacgtgatcctggaccccgacaccgccaacgccatcctgctggtgagcgaggaccagagaagcgtgcagagagccgaggagcccagagacctgcccgacaaccccgagagattcgagtggagatactgcgtgctgggctgcgagaacttcaccagcggcagacactactgggaggtggaggtgggcgacagaaaggagtggcacatcggcgtgtgcagcaagaacgtggagagaaagaagggctgggtgaagatgacccccgagaacggctactggaccatgggcctgaccgacggcaacaagtacagagccctgaccgagcccagaaccaacctgaagctgcccgagccccccagaaaggtgggcatcttcctggactacgagaccggcgagatcagcttctacaacgccaccgacggcagccacatctacaccttcccccacgccagcttcagcgagcccctgtaccccgtgttcagaatcctgaccctggagcccaccgccctgaccatctgccccatccccaaggaggtggagagcagccccgaccccgacctggtgcccgaccacagcctggagacccccctgacccccggcctggccaacgagagcggcgagccccaggccgaggtgaccagcctgctgctgcccgcccaccccggcgccgaggtgagccccagcgccaccaccaaccagaaccacaagctgcaggccagaaccgaggccctgtactag

SEQ ID NO: 169591 - DNA, 717 bp, Artificial Sequence
  derived and/or modified sequence
atgaagatggccagcagcctggccttcctgctgctgaacttccacgtgagcctgttcctggtgcagctgctgaccccctgcagcgcccagttcagcgtgctgggccccagcggccccatcctggccatggtgggcgaggacgccgacctgccctgccacctgttccccaccatgagcgccgagaccatggagctgagatgggtgagcagcagcctgagacaggtggtgaacgtgtacgccgacggcaaggaggtggaggacagacagagcgccccctacagaggcagaaccagcatcctgagagacggcatcaccgccggcaaggccgccctgagaatccacaacgtgaccgccagcgacagcggcaagtacctgtgctacttccaggacggcgacttctacgagaaggccctggtggagctgaaggtggccgccctgggcagcgacctgcacatcgaggtgaagggctacgaggacggcggcatccacctggagtgcagaagcaccggctggtacccccagccccagatcaagtggagcgacaccaagggcgagaacatccccgccgtggaggcccccgtggtggccgacggcgtgggcctgtacgccgtggccgccagcgtgatcatgagaggcagcagcggcggcggcgtgagctgcatcatcagaaacagcctgctgggcctggagaagaccgccagcatcagcatcgcctag

SEQ ID NO: 169592 - protein, 497 aa, Artificial Sequence
  derived and/or modified sequence
MDVPGPVSRRAAAAAATVLLRTARVRRECWFLPTALLCAYGFFASLRPSEPFLTPYLLGPDKNLTEREVFNEIYPVWTYSYLVLLFPVFLATDYLRYKPVVLLQGLSLIVTWFMLLYAQGLLAIQFLEFFYGIATATEIAYYSYIYSVVDLGMYQKVTSYCRSATLVGFTVGSVLGQILVSVAGWSLFSLNVISLTCVSVAFAVAWFLPMPQKSLFFHHIPSTCQRVNGIKVQNGGIVTDTPASNHLPGWEDIESKIPLNMEEPPVEEPEPKPDRLLVLKVLWNDFLMCYSSRPLLCWSVWWALSTCGYFQVVNYTQGLWEKVMPSRYAAIYNGGVEAVSTLLGAVAVFAVGYIKISWSTWGEMTLSLFSLLIAAAVYIMDTVGNIWVCYASYVVFRIIYMLLITIATFQIAANLSMERYALVFGVNTFIALALQTLLTLIVVDASGLGLEITTQFLIYASYFALIAVVFLASGAVSVMKKCRKLEDPQSSSQVTTS

SEQ ID NO: 169593 - protein, 459 aa, Artificial Sequence
  derived and/or modified sequence
MDVPGPVSRRAAAAAATVLLRTARVRRECWFLPTALLCAYGFFASLRPSEPFLTPYLLGPDKNLTEREVFNEIYPVWTYSYLVLLFPVFLATDYLRYKPVVLLQGLSLIVTWFMLLYAQGLLAIQFLEFFYGIATATEIAYYSYIYSVVDLGMYQKVTSYCRSATLVGFTVGSVLGQILVSVAGWSLFSLNVISLTCVSVAFAVAWFLPMPQKSLFFHHIPSTCQRVNGIKEPKPDRLLVLKVLWNDFLMCYSSRPLLCWSVWWALSTCGYFQVVNYTQGLWEKVMPSRYAAIYNGGVEAVSTLLGAVAVFAVGYIKISWSTWGEMTLSLFSLLIAAAVYIMDTVGNIWVCYASYVVFRIIYMLLITIATFQIAANLSMERYALVFGVNTFIALALQTLLTLIVVDASGLGLEITTQFLIYASYFALIAVVFLASGAVSVMKKCRKLEDPQSSSQVTTS

SEQ ID NO: 169594 - DNA, 1494 bp, Artificial Sequence
  derived and/or modified sequence
atggatgtgcccgggcctgtgagtagacgcgctgccgcagccgcggctactgttctgctgcgcactgccagggttaggcgagagtgctggttcctcccaacggcgctattgtgtgcttacggattttttgcctccctgcgtccatcagagccttttttgactccgtatctgctgggccccgacaagaatctgaccgaacgagaagtgttcaacgagatctacccggtctggacctacagttacctggtcttgttgtttccagtatttctcgcaaccgattacctgcgctacaaacccgtagtgcttctgcagggtctgagcctcatcgtgacatggttcatgctgttgtatgcccagggactactggccatacagtttcttgagttcttctatggcatagccaccgcaactgagatcgcctattattcttacatttatagtgtggtggatctcggcatgtatcagaaagtgacctcttactgcaggagtgcgacattggtcgggttcaccgtcggctcggtccttggccagattctcgtaagtgtagccggatggagtctgtttagcctgaacgtaatctccctgacctgtgtgtccgtggcttttgccgtggcctggttcctgcccatgccccagaagtcccttttctttcaccacattccatctacctgccagcgggtgaacggtatcaaagtgcagaacggcggcattgtcactgacaccccagcgagcaaccatttgcccggttgggaggacattgaaagcaaaataccattgaatatggaggaaccccctgtggaagagccggaaccaaaaccggaccgtctcctcgttttgaaagtgctgtggaacgatttcctaatgtgttattcgagtcgccccttgttgtgctggagcgtttggtgggccctctccacatgtggatacttccaggtggtcaactacacacaaggcctctgggagaaggtcatgcctagtcgctatgccgcgatttataatggcggagtggaggcagtctccacactgctgggcgccgtggccgtcttcgcggtcgggtacattaagatcagttggtccacgtggggggagatgaccctctccctgttcagtctcctaatcgcagccgcagtgtatataatggatacggtggggaatatctgggtgtgctatgctagctatgtggtgtttcgaatcatctacatgctgttgatcacaatcgctacctttcagattgctgccaacctgtctatggagcgatatgcactagtcttcggcgtgaatactttcatcgccctggcccttcagacactactaacacttattgtcgttgacgcttcagggctggggctggaaattactacccagtttcttatctacgcctcctactttgctctgatagccgtggtcttcctggcctccggagcggtgtccgtgatgaagaagtgcaggaagctggaagaccctcagagcagcagccaggtgacaaccagctag

SEQ ID NO: 169595 - DNA, 1380 bp, Artificial Sequence
  derived and/or modified sequence
atggacgttcctggtccagtatcccgcagagccgctgctgccgccgctactgtgctactgcggaccgctagggtgagaagggaatgctggttcctccccactgccttactttgtgcttacggcttttttgcatccctgcgcccatccgaaccatttctgaccccttatctgttgggtcccgataagaacctgacggagagagaagtcttcaacgagatatacccagtctggacttattcctacctggtgttactgttcccagtattcttggctaccgattatctgcgctataaacctgtcgtgctcctgcaaggtctgtccctcatcgtcacatggttcatgctgttatacgcccaggggcttctcgcaattcagttcctggaatttttttatggaatcgcaaccgcgaccgagatcgcctattattcctacatttattcagtggtcgatctcgggatgtatcagaaggtgactagctactgtaggagtgcaacactcgttggcttcactgtgggctccgtattaggccaaattctcgtgagcgtcgctggttggagtttattctctttgaatgtcatctctctgacgtgtgtcagtgtcgcatttgcagtggcttggttcctgcccatgcctcagaagagcctgttcttccatcacatcccttctacctgtcagagggtgaacggtattaaggagcctaagcccgatcggctgttggtccttaaagtgctgtggaacgattttctaatgtgttacagttctcgccccctgctgtgctggagtgtttggtgggcgctgagcacatgcggctattttcaggtggtcaactatactcagggcctttgggaaaaggtgatgccgagtcggtacgcggctatttataatgggggggtcgaagcagtgtctaccctgcttggggccgtggctgtgttcgcagtgggatacattaaaatctcttggtctacctggggtgagatgacactcagcttgttctctctcctgattgctgccgccgtgtacataatggatacagtgggtaacatatgggtgtgttacgcatcttatgtggtcttccgaattatttacatgctcctgataacaattgcaacctttcagatcgccgcgaacctttctatggagaggtatgcccttgtgtttggcgtcaacacatttatagctctcgctctgcagacactgctgactctcatagtcgtggatgcctctgggttaggactcgagattacgacacagtttcttatctacgcaagctactttgcgttgatagccgtggtgttcctggcgtccggcgcagtaagcgtgatgaagaagtgtcggaaactcgaggatccccagtccagttcgcaggtgaccacctcctag

SEQ ID NO: 169596 - DNA, 1494 bp, Artificial Sequence
  derived and/or modified sequence
atggatgtgcccggccctgtgtccagaagagctgctgctgctgctgccaccgtgctgctgaggacagcccgggtgcggcgggagtgctggttcctgcccacagccctgctgtgtgcctacggcttctttgccagcctgcggcccagcgagcccttcctgaccccctacctgctgggccctgacaagaacctgacagagcgggaggtgttcaatgagatctaccctgtgtggacctacagctacctggtgctgctcttccctgtgttcctggccacagactacctgcgctacaagcctgtggtgctgctgcagggcctgagcctgattgtgacctggttcatgctgctgtatgcccagggcctgctggccatccagttcctggagttcttctatggaattgccacagccacagaaattgcctactacagctacatctacagcgtggtggacctgggcatgtaccagaaggtgaccagctactgccgcagcgccaccctggtgggcttcaccgtgggctctgtgctgggccagatcctggtgtctgtggccggctggagcctcttcagcctgaatgtcatcagcctgacctgtgtgtctgtggcctttgctgtggcctggttcctgcccatgccccagaagagcctcttcttccaccacatccccagcacctgccagagggtgaatggcatcaaggtgcagaatggaggcatcgtgacagacaccccagccagcaaccacctgcccggctgggaggacatcgagagcaagatccccctgaacatggaggagccccctgtggaggagcctgagcccaagccagaccggctgctggtgctgaaggtgctgtggaatgacttcctgatgtgctacagcagccggcccctgctgtgctggagcgtgtggtgggccctgagcacctgtggctacttccaggtggtgaactacacccagggcctgtgggagaaggtgatgcccagccgctatgctgccatctacaatggaggagtggaggccgtgtccaccctgctgggcgctgtggccgtgtttgctgtgggctacatcaagatctcctggagcacctggggcgagatgaccctgagcctcttcagcctgctgattgctgctgctgtgtacatcatggacacagtgggcaacatctgggtgtgctacgccagctatgtggtgttccgcatcatctacatgctgctgatcaccatcgccaccttccagattgctgccaacctgtccatggagagatatgccctggtgtttggagtgaacaccttcatcgccctggccctgcagaccctgctgaccctgattgtggtggatgccagcggcctgggcctggagatcaccacccagttcctgatctatgccagctactttgccctgattgctgtggtgttcctggccagcggggctgtgtctgtgatgaagaagtgcaggaagctggaggacccccagagcagcagccaggtgaccaccagctag

SEQ ID NO: 169597 - DNA, 1380 bp, Artificial Sequence
  derived and/or modified sequence
atggatgtgcccggccctgtgtccagaagagctgctgctgctgctgccaccgtgctgctgaggacagcccgggtgcggcgggagtgctggttcctgcccacagccctgctgtgtgcctacggcttctttgccagcctgcggcccagcgagcccttcctgaccccctacctgctgggccctgacaagaacctgacagagcgggaggtgttcaatgagatctaccctgtgtggacctacagctacctggtgctgctcttccctgtgttcctggccacagactacctgcgctacaagcctgtggtgctgctgcagggcctgagcctgattgtgacctggttcatgctgctgtatgcccagggcctgctggccatccagttcctggagttcttctatggaattgccacagccacagaaattgcctactacagctacatctacagcgtggtggacctgggcatgtaccagaaggtgaccagctactgccgcagcgccaccctggtgggcttcaccgtgggctctgtgctgggccagatcctggtgtctgtggccggctggagcctcttcagcctgaatgtcatcagcctgacctgtgtgtctgtggcctttgctgtggcctggttcctgcccatgccccagaagagcctcttcttccaccacatccccagcacctgccagagggtgaatggcatcaaggagcccaagccagaccggctgctggtgctgaaggtgctgtggaatgacttcctgatgtgctacagcagccggcccctgctgtgctggagcgtgtggtgggccctgagcacctgtggctacttccaggtggtgaactacacccagggcctgtgggagaaggtgatgcccagccgctatgctgccatctacaatggaggagtggaggccgtgtccaccctgctgggcgctgtggccgtgtttgctgtgggctacatcaagatctcctggagcacctggggcgagatgaccctgagcctcttcagcctgctgattgctgctgctgtgtacatcatggacacagtgggcaacatctgggtgtgctacgccagctatgtggtgttccgcatcatctacatgctgctgatcaccatcgccaccttccagattgctgccaacctgtccatggagagatatgccctggtgtttggagtgaacaccttcatcgccctggccctgcagaccctgctgaccctgattgtggtggatgccagcggcctgggcctggagatcaccacccagttcctgatctatgccagctactttgccctgattgctgtggtgttcctggccagcggggctgtgtctgtgatgaagaagtgcaggaagctggaggacccccagagcagcagccaggtgaccaccagctag

SEQ ID NO: 169598 - DNA, 1494 bp, Artificial Sequence
  derived and/or modified sequence
atggacgtgcccggccccgtgagccggcgggccgccgccgccgccgccaccgtgttattaaggaccgctcgcgtccgcagggagtgctggttcttgcccaccgctcttctttgcgcatatggcttcttcgccagtcttaggcccagcgagcctttcctgaccccgtacctgctcggccctgataagaatctcaccgaacgggaagtctttaacgagatttatcctgtgtggacttattcctatctggtgctgctgttccctgtttttttggctacagattacttgcgctataagcccgttgtcttgctacagggactgtccttgattgtgacatggttcatgctgttatatgcccagggcctattggcgatccaatttctcgagttcttttacggaattgctacagccacagaaattgcttattactcctacatttactctgttgttgacctggggatgtatcagaaagtgacaagctattgtagaagcgctactcttgttggctttacagtgggctctgtgttaggccagatcctcgtcagcgtagctggttggtccttatttagcctgaatgttattagcttaacttgtgtctccgtggccttcgccgtcgcgtggtttctgccgatgccccagaagtccttgttcttccaccacattccctcaacttgtcagcgggtgaacgggatcaaggtccagaatggcggcatcgtgaccgataccccggcaagcaatcatttgcccggctgggaagacattgagtcgaagatccccctgaacatggaagaaccacctgttgaagagcccgagcccaagcctgacagactgctcgtgttgaaggtcctgtggaatgactttctgatgtgttacagcagccgtcccctcctgtgttggtcagtgtggtgggcgcttagcacctgtgggtattttcaagtggtcaattacactcagggtctttgggaaaaggtgatgccttcaaggtacgctgcgatatacaacggcggcgtcgaggccgtgtccacacttctgggcgccgttgccgtttttgctgtgggctatatcaagatatcctggagcacatggggcgaaatgacactttctctcttttcattactcatagctgctgctgtctacattatggatacagtagggaacatctgggtatgttacgcttcctatgtcgtattccgtatcatctatatgctcctgataacaatcgctacatttcagatcgcggcgaacctcagcatggaacggtacgccctggtttttggagtgaataccttcattgccttggctctgcaaacactgctgacccttattgtcgtggatgcctcaggtctagggctggaaatcacgacgcagttccttatctatgcctcttattttgctctcattgcagtggtctttctggcaagcggcgccgtttcagtgatgaagaagtgccggaaactcgaggacccccagagtagtagtcaggtcaccacatcatag

SEQ ID NO: 169599 - DNA, 1380 bp, Artificial Sequence
  derived and/or modified sequence
atggacgtgcccggccccgtgagccggcgggccgccgccgccgccgcaaccgtgctgctacgcactgcccgcgttagacgcgagtgttggttcttacctacagcactactgtgcgcttatggtttcttcgcatctctgagaccaagtgagccctttttgacaccatacctattgggcccagacaagaacctgacagaacgagaagtgtttaacgagatctatccggtgtggacctacagctacttagttcttctttttccagtcttcctcgccacagactatctacgctataaacctgtggttctactgcagggattgagtttgattgtgacatggttcatgctgctgtatgcacaaggtctcttagccatccagttcctcgagttcttctatggcatagctactgctactgagatcgcttactactcctatatatattccgtggtggatctgggtatgtatcaaaaagttacatcctattgcagatctgccactctcgtaggcttcactgtggggagcgtcctggggcagatcctggtgagcgtggcagggtggagtttgttcagcctcaatgtaatcagtttgacatgtgtgtctgttgccttcgcagttgcttggtttttgccaatgcctcagaagagtctattttttcaccacattcccagtacgtgccaaagagtgaatggcattaaggaaccaaagccagacaggctgctagtgctgaaagtgctttggaacgattttttaatgtgctatagctcgcgccctctgctgtgctggagtgtgtggtgggctcttagtacttgcggttacttccaagttgtgaactacacccagggcctgtgggagaaggtgatgccttcacgatacgcagccatttacaatggcggcgtggaggccgtgagcaccctgctgggtgccgtagcggtcttcgccgtgggttacatcaaaatatcctggagtacgtggggtgaaatgacgctcagtctgtttagcctcctgatcgccgccgctgtatatataatggatacagtggggaacatttgggtgtgctatgcaagctatgtggtgttccggataatttatatgcttttgatcaccatcgccaccttccagattgctgcaaacctatcaatggaaaggtatgcccttgtattcggtgtgaatacattcattgccctggctctgcaaacactcctgaccctcattgttgtagacgcttctgggcttgggctggagataactacccagtttcttatatacgccagctatttcgcactgatcgcggtagtattcttggcaagtggggcggtgtctgttatgaagaaatgtcgaaaactcgaggatccccaatcctcctcccaggtgacaacgtcttag

SEQ ID NO: 169600 - DNA, 1494 bp, Artificial Sequence
  derived and/or modified sequence
atggatgtgccagggccagtctctcgccgagcagcagcagcagcagcaacagtgctgctgcgcacagcgagggtcagaagagaatgctggttcctgcccactgccctgctgtgcgcgtatgggttcttcgcttctctgcgtccgagcgagcccttcctgaccccgtatctcttaggtcctgacaagaacctgacagaacgtgaagtttttaatgaaatatacccagtttggacttactcttatttggtactattatttccagttttcctcgctaccgattatctccgttacaaacccgtggtcctgctgcaggggctgtcactcattgttacttggtttatgctactgtacgcacagggactcctggccatccaatttctcgagttcttttatggaatcgccaccgcaactgagatcgcctactattcatatatctactctgtggttgatcttggcatgtaccagaaagttacatcctactgcagaagcgcaacactggttggctttaccgtcgggtcagtgctgggccagatccttgtgtcagttgccggttggtctctcttttcactgaatgtaatctcgctgacatgtgtgtcagtcgctttcgcagtggcatggttcctgcctatgcctcagaagagtctgttctttcaccatattccgagcacgtgccagcgtgtgaacgggatcaaagtacagaacggcggaattgtgacagatacccctgcatcaaaccatctgcctggctgggaagacattgagtccaaaatccctctgaatatggaagagccacccgtggaagagcctgagccaaagcccgatcgtctgcttgttctgaaggtgttgtggaatgactttctgatgtgttacagctctaggcctctcttgtgttggtccgtttggtgggccctatcaacctgcgggtacttccaggtggtgaactacactcagggactgtgggagaaagtgatgccatccagatatgcggctatatataatggcggagttgaagctgtgtcaactctcctcggggcagtggcagtcttcgctgtcggctacatcaagatctcatggagtacttggggagagatgacattgtccttattcagtctgcttattgcggcagcggtgtatattatggacaccgtaggtaacatctgggtttgctacgctagttatgtcgtgtttcgcattatctacatgctgttgatcacaatcgcgaccttccagattgccgctaatctgtccatggagaggtacgcactagtgttcggggtgaatacctttatcgcgttagccctgcagactttgctaacgctgatagtggtcgatgccagcggcctcgggctcgaaatcacaacacagttcctgatctacgcttcttacttcgcccttattgcagtcgtctttctcgcgtccggtgccgtttctgtgatgaagaagtgtcggaaactcgaggaccctcagtcaagcagtcaagtgaccacatcctag

SEQ ID NO: 169601 - DNA, 1380 bp, Artificial Sequence
  derived and/or modified sequence
atggatgtgcccggtcccgtcagtcggagagcagctgccgcagccgctactgtcttactgagaaccgctagagtgcgaagagagtgctggttcctacccactgctctactgtgtgcctacggcttcttcgcatccctcaggccgtccgaacccttcttgactccttacttgttgggtccagacaagaatttaaccgagagagaagtgttcaacgaaatataccctgtgtggacttatagctacctagtgttgctttttccggtttttctcgcaaccgactatctgagatacaaaccagtggtcctattacagggcttaagtctgattgtcacttggtttatgttactgtacgcccagggactcctggctatccagttcctggagttcttttacggaatcgctactgcaaccgaaattgcatactattcctacatttattccgtcgtggacttaggaatgtatcagaaagtcacaagctattgccgctcagcaacgctcgtcggatttactgtgggcagtgtgctcgggcaaatcctggtgtcagtcgcgggttggtccctattctccctgaatgttatatcccttacctgcgtgtcggtcgccttcgcagttgcatggttcctccctatgccccagaagtcccttttcttccaccacataccgtccacctgtcaacgagttaacggcatcaaggagcccaaacctgatcgcttactggtccttaaggtgctgtggaatgatttcctgatgtgctacagctccaggcctctcctctgctggtccgtttggtgggccttgagtacctgtggctacttccaggtagtcaattacacgcagggtctgtgggaaaaggtgatgccctctcggtatgccgctatttataatgggggagtcgaagctgtctccaccttgctaggggctgtggccgtatttgcagtgggatatatcaaaatctcctggtcgacttggggcgagatgaccctttctttgttctcgctactgattgcggcagccgtgtacattatggacaccgtcggaaacatttgggtgtgttacgcatcatatgtggtttttaggattatatacatgcttctgatcactattgccaccttccagattgctgctaatctgtctatggagcgctacgccctcgtattcggggttaacacctttattgcgctggcactccaaactctccttactttaatcgtggtcgacgctagtggccttgggctcgaaatcacaacgcagtttttgatctacgcaagttacttcgcattgatcgccgtcgtcttcctggcttccggggcagtgtctgtaatgaaaaagtgtcgtaagctagaagatccccagagcagctctcaggtcaccacatcctag

SEQ ID NO: 169602 - DNA, 3671 bp, Artificial Sequence
  derived and/or modified sequence
ggcagagggtgggccttaggacgggtctcccttaaactgggcgatcaggcagcgaccctagaggcgtctgtagggtaaagctgggggttctgtagccggaggcggcggcgagtccagaacgtcctggccttacagggagaaggcgtcactcgcggttacaagtgcctgaccctcactccagttggcggaggaggagaaggaaggggccgggccgggtcccctcccctcgcgccccggatggatgtgcccggcccggtgtctcggcgggcggcggcggcggcggccactgtgctcctgcggaccgctcgggtccgtcgcgaatgctggttcttgccgaccgcgctgctctgcgcctacggcttcttcgccagcctcaggccgtccgagcccttcctgaccccgtacctgctggggccggacaagaacctgaccgagagggaggtcttcaatgaaatttatccagtatggacttactcttacctggtgctactgtttcctgtgttccttgccacagactacctccgttataaacctgttgttctactgcaggggctcagccttattgttacatggtttatgctgctctatgcccagggactgctggccattcaatttctagaatttttttatggcatcgccacagccactgaaattgcctattactcttatatctacagtgtggtggacctgggcatgtaccagaaagtcacaagttactgtcgaagtgccactttggtgggctttacagtgggctctgtcctagggcaaatccttgtctcagtggcaggctggtcgctgttcagcctgaatgtcatctctcttacctgtgtttcagtggcttttgctgtggcctggtttttacctatgccacagaagagcctcttctttcaccacattccttctacctgccagagagtgaatggcatcaaggtacaaaatggtggcattgttactgacaccccagcttctaaccaccttcctggctgggaggacattgagtcaaaaatccctctaaatatggaggagcctcccgtggaggaaccggaacccaagccagaccgtctccttgtattgaaagtactatggaatgatttcctgatgtgctactcctctcgccctcttctctgctggtctgtgtggtgggccctctctacctgtggctattttcaagttgtgaactacacacagggcctgtgggagaaagtgatgccttctcgctatgctgctatctataatggtggcgtggaggccgtttcaaccttactgggtgctgttgctgtgtttgcagttggttatataaaaatatcctggtcaacttggggagaaatgacattatctctcttttctctcctgattgctgctgcagtgtatatcatggacactgtgggtaacatttgggtgtgctatgcatcctatgttgtcttcagaatcatctacatgttactcatcacgatagcaacttttcaaattgctgcaaacctcagcatggaacgctatgccctagtatttggtgtaaataccttcattgccctggcactgcagacgctgctcactctaattgtggtagatgccagtggccttggattagaaattaccactcagtttttgatctatgccagttattttgcactcatcgctgtggttttcctggccagtggtgcagtcagtgttatgaagaaatgtagaaagctggaagatccacaatcaagttctcaagtaaccacttcataatatactgctgaagggcttcttcttatagcaagaactctgcacagcaactgcctggatgtgtttgattttttaaagcgtagacatatatttatgaatgtgcatttcttgacttcacagcagccacttgactaataccttgtgttccgggaataacatgatactattcagaggagccagaagtaaagtttatttcatggattatttatgagagctaatttaaggatgactttttttctgattcaaaagtgaacttgattttaaaaaccagtcaagagcaatcaaagcagcacatggtgttgtatacttcattagcaagtgagtttggtgttttataggtcacatatgtctgtatctacttagccagatgcttggcctggtgggaccagggctccacagaggccacaaaatgttgcaagtcatgatggatggaaatatgttctaacagcatctgcctctattcaatttaattcttatttctgtgttactcatgtacattggtctttctacatagttattctatcactggcaatatttgttctggtttagtgttctgtattttaaggtgtacgtatcatttctaattttaagttattttaaaaaaattcatcatatgaatgttcttggttcccattgtgacgattatttatttctgtaaaatttgtttagaagtacgtttttgcattattcatatgcttcccagagaagctcatttagttagaaaataaggcaagttttgaagcctgctaaatgaagagacttaagaaagcttaaggtacgcttgcttgtctttaaatcttcaatatgaaggactattaattccaagattaaaagttcatatataggctaaagatgtaactaggccatttgtatttgtattcccttttatttccaaaataaaatgaaaaatctttttttaataatttcatccctatttatagtttttatattaatttgtttttcttatccaagtaaagatgtcaataggaattgcattagtccaaggcctttttcataaactgagcctcttttcaattatttcaatgggacaggaactaggatagatgtgattcctgcatttttttaccttaaatctgcctttgtttctaaaggtagatcatcttgaatatttgcttaaaattgctagtgatttcattaccaagttacttgaaaaaatgttctatatgcatttaattctgaaatcagtctaccaaggggctgctagtatatgtcagacatgaaaactattttaaagctgactttgttgccttatcttgaaaagaatctagataggtgcttttaactggggtattaacttttttagaatgacacagctgaacagtgttaataatagtgtgtcaagattgcaaagtcgacatactcatttggtttaagcaggaatcctagaagcaaatggatggggataagaataggtcattttctattcaccatcctttactattaagggaaaggaaaagaacactagctaaggaagggaaagggaagtgatatcataaaagtagcaaccttcattttacattctgtctgtttttctttttttgctttgttttgtttgtgctaatttgggaattgtgtactccgaaacaagtagaaaagtgctgtttgagggattttattaaatctttttttaatggaatgtggtacaaattgttcatgttaccaaagcaatatttccctggaatttaattcaaagtttgtggcatacaacctgagccttttcttatataagacaagaatatgttcacatcttggtatgtggccatatttatagaatgctgaactcaatgtgcaagttgtactgtatgcagttttgtaaataagtgaaaataatttgttgtactttttattcaattctgtatagattataaaattatttttattaaataaatattttacagtatattttctctttttaatcaaaa

SEQ ID NO: 169603 - DNA, 3462 bp, Artificial Sequence
  derived and/or modified sequence
ccggaggcggcggcgagtccagaacgtcctggccttacagggagaaggcgtcactcgcggttacaagtgcctgaccctcactccagttggcggaggaggagaaggaaggggccgggccgggtcccctcccctcgcgccccggatggatgtgcccggcccggtgtctcggcgggcggcggcggcggcggccactgtgctcctgcggaccgctcgggtccgtcgcgaatgctggttcttgccgaccgcgctgctctgcgcctacggcttcttcgccagcctcaggccgtccgagcccttcctgaccccgtacctgctggggccggacaagaacctgaccgagagggaggtcttcaatgaaatttatccagtatggacttactcttacctggtgctactgtttcctgtgttccttgccacagactacctccgttataaacctgttgttctactgcaggggctcagccttattgttacatggtttatgctgctctatgcccagggactgctggccattcaatttctagaatttttttatggcatcgccacagccactgaaattgcctattactcttatatctacagtgtggtggacctgggcatgtaccagaaagtcacaagttactgtcgaagtgccactttggtgggctttacagtgggctctgtcctagggcaaatccttgtctcagtggcaggctggtcgctgttcagcctgaatgtcatctctcttacctgtgtttcagtggcttttgctgtggcctggtttttacctatgccacagaagagcctcttctttcaccacattccttctacctgccagagagtgaatggcatcaaggaacccaagccagaccgtctccttgtattgaaagtactatggaatgatttcctgatgtgctactcctctcgccctcttctctgctggtctgtgtggtgggccctctctacctgtggctattttcaagttgtgaactacacacagggcctgtgggagaaagtgatgccttctcgctatgctgctatctataatggtggcgtggaggccgtttcaaccttactgggtgctgttgctgtgtttgcagttggttatataaaaatatcctggtcaacttggggagaaatgacattatctctcttttctctcctgattgctgctgcagtgtatatcatggacactgtgggtaacatttgggtgtgctatgcatcctatgttgtcttcagaatcatctacatgttactcatcacgatagcaacttttcaaattgctgcaaacctcagcatggaacgctatgccctagtatttggtgtaaataccttcattgccctggcactgcagacgctgctcactctaattgtggtagatgccagtggccttggattagaaattaccactcagtttttgatctatgccagttattttgcactcatcgctgtggttttcctggccagtggtgcagtcagtgttatgaagaaatgtagaaagctggaagatccacaatcaagttctcaagtaaccacttcataatatactgctgaagggcttcttcttatagcaagaactctgcacagcaactgcctggatgtgtttgattttttaaagcgtagacatatatttatgaatgtgcatttcttgacttcacagcagccacttgactaataccttgtgttccgggaataacatgatactattcagaggagccagaagtaaagtttatttcatggattatttatgagagctaatttaaggatgactttttttctgattcaaaagtgaacttgattttaaaaaccagtcaagagcaatcaaagcagcacatggtgttgtatacttcattagcaagtgagtttggtgttttataggtcacatatgtctgtatctacttagccagatgcttggcctggtgggaccagggctccacagaggccacaaaatgttgcaagtcatgatggatggaaatatgttctaacagcatctgcctctattcaatttaattcttatttctgtgttactcatgtacattggtctttctacatagttattctatcactggcaatatttgttctggtttagtgttctgtattttaaggtgtacgtatcatttctaattttaagttattttaaaaaaattcatcatatgaatgttcttggttcccattgtgacgattatttatttctgtaaaatttgtttagaagtacgtttttgcattattcatatgcttcccagagaagctcatttagttagaaaataaggcaagttttgaagcctgctaaatgaagagacttaagaaagcttaaggtacgcttgcttgtctttaaatcttcaatatgaaggactattaattccaagattaaaagttcatatataggctaaagatgtaactaggccatttgtatttgtattcccttttatttccaaaataaaatgaaaaatctttttttaataatttcatccctatttatagtttttatattaatttgtttttcttatccaagtaaagatgtcaataggaattgcattagtccaaggcctttttcataaactgagcctcttttcaattatttcaatgggacaggaactaggatagatgtgattcctgcatttttttaccttaaatctgcctttgtttctaaaggtagatcatcttgaatatttgcttaaaattgctagtgatttcattaccaagttacttgaaaaaatgttctatatgcatttaattctgaaatcagtctaccaaggggctgctagtatatgtcagacatgaaaactattttaaagctgactttgttgccttatcttgaaaagaatctagataggtgcttttaactggggtattaacttttttagaatgacacagctgaacagtgttaataatagtgtgtcaagattgcaaagtcgacatactcatttggtttaagcaggaatcctagaagcaaatggatggggataagaataggtcattttctattcaccatcctttactattaagggaaaggaaaagaacactagctaaggaagggaaagggaagtgatatcataaaagtagcaaccttcattttacattctgtctgtttttctttttttgctttgttttgtttgtgctaatttgggaattgtgtactccgaaacaagtagaaaagtgctgtttgagggattttattaaatctttttttaatggaatgtggtacaaattgttcatgttaccaaagcaatatttccctggaatttaattcaaagtttgtggcatacaacctgagccttttcttatataagacaagaatatgttcacatcttggtatgtggccatatttatagaatgctgaactcaatgtgcaagttgtactgtatgcagttttgtaaataagtgaaaataatttgttgtactttttattcaattctgtatagattataaaattatttttattaaataaatattttacagtatattttctctttttaatcaaaa

SEQ ID NO: 169604 - DNA, 1494 bp, Artificial Sequence
  derived and/or modified sequence
atggacgtgcccggccccgtgagcagaagagccgccgccgccgccgccaccgtgctgctgagaaccgccagagtgagaagagagtgctggttcctgcccaccgccctgctgtgcgcctacggcttcttcgccagcctgagacccagcgagcccttcctgaccccctacctgctgggccccgacaagaacctgaccgagagagaggtgttcaacgagatctaccccgtgtggacctacagctacctggtgctgctgttccccgtgttcctggccaccgactacctgagatacaagcccgtggtgctgctgcagggcctgagcctgatcgtgacctggttcatgctgctgtacgcccagggcctgctggccatccagttcctggagttcttctacggcatcgccaccgccaccgagatcgcctactacagctacatctacagcgtggtggacctgggcatgtaccagaaggtgaccagctactgcagaagcgccaccctggtgggcttcaccgtgggcagcgtgctgggccagatcctggtgagcgtggccggctggagcctgttcagcctgaacgtgatcagcctgacctgcgtgagcgtggccttcgccgtggcctggttcctgcccatgccccagaagagcctgttcttccaccacatccccagcacctgccagagagtgaacggcatcaaggtgcagaacggcggcatcgtgaccgacacccccgccagcaaccacctgcccggctgggaggacatcgagagcaagatccccctgaacatggaggagccccccgtggaggagcccgagcccaagcccgacagactgctggtgctgaaggtgctgtggaacgacttcctgatgtgctacagcagcagacccctgctgtgctggagcgtgtggtgggccctgagcacctgcggctacttccaggtggtgaactacacccagggcctgtgggagaaggtgatgcccagcagatacgccgccatctacaacggcggcgtggaggccgtgagcaccctgctgggcgccgtggccgtgttcgccgtgggctacatcaagatcagctggagcacctggggcgagatgaccctgagcctgttcagcctgctgatcgccgccgccgtgtacatcatggacaccgtgggcaacatctgggtgtgctacgccagctacgtggtgttcagaatcatctacatgctgctgatcaccatcgccaccttccagatcgccgccaacctgagcatggagagatacgccctggtgttcggcgtgaacaccttcatcgccctggccctgcagaccctgctgaccctgatcgtggtggacgccagcggcctgggcctggagatcaccacccagttcctgatctacgccagctacttcgccctgatcgccgtggtgttcctggccagcggcgccgtgagcgtgatgaagaagtgcagaaagctggaggacccccagagcagcagccaggtgaccaccagctag

SEQ ID NO: 169605 - DNA, 1380 bp, Artificial Sequence
  derived and/or modified sequence
atggacgtgcccggccccgtgagcagaagagccgccgccgccgccgccaccgtgctgctgagaaccgccagagtgagaagagagtgctggttcctgcccaccgccctgctgtgcgcctacggcttcttcgccagcctgagacccagcgagcccttcctgaccccctacctgctgggccccgacaagaacctgaccgagagagaggtgttcaacgagatctaccccgtgtggacctacagctacctggtgctgctgttccccgtgttcctggccaccgactacctgagatacaagcccgtggtgctgctgcagggcctgagcctgatcgtgacctggttcatgctgctgtacgcccagggcctgctggccatccagttcctggagttcttctacggcatcgccaccgccaccgagatcgcctactacagctacatctacagcgtggtggacctgggcatgtaccagaaggtgaccagctactgcagaagcgccaccctggtgggcttcaccgtgggcagcgtgctgggccagatcctggtgagcgtggccggctggagcctgttcagcctgaacgtgatcagcctgacctgcgtgagcgtggccttcgccgtggcctggttcctgcccatgccccagaagagcctgttcttccaccacatccccagcacctgccagagagtgaacggcatcaaggagcccaagcccgacagactgctggtgctgaaggtgctgtggaacgacttcctgatgtgctacagcagcagacccctgctgtgctggagcgtgtggtgggccctgagcacctgcggctacttccaggtggtgaactacacccagggcctgtgggagaaggtgatgcccagcagatacgccgccatctacaacggcggcgtggaggccgtgagcaccctgctgggcgccgtggccgtgttcgccgtgggctacatcaagatcagctggagcacctggggcgagatgaccctgagcctgttcagcctgctgatcgccgccgccgtgtacatcatggacaccgtgggcaacatctgggtgtgctacgccagctacgtggtgttcagaatcatctacatgctgctgatcaccatcgccaccttccagatcgccgccaacctgagcatggagagatacgccctggtgttcggcgtgaacaccttcatcgccctggccctgcagaccctgctgaccctgatcgtggtggacgccagcggcctgggcctggagatcaccacccagttcctgatctacgccagctacttcgccctgatcgccgtggtgttcctggccagcggcgccgtgagcgtgatgaagaagtgcagaaagctggaggacccccagagcagcagccaggtgaccaccagctag

SEQ ID NO: 169606 - protein, 1026 aa, Artificial Sequence
  derived and/or modified sequence
MGGSQSLQPAPASDLNLEASEAMSSDSEEAFETPESTTPVKAPPAPPPPPPEVIPEPEVSTQPPPEEPGCGSETVPVPDGPRSDSVEGSPFRPPSHSFSAVFDEDKPIASSGTYNLDFDNIELVDTFQTLEPRASDAKNQEGKVNTRRKSTDSVPISKSTLSRSLSLQASDFDGASSSGNPEAVALAPDAYSTGSSSASSTLKRTKKPRPPSLKKKQTTKKPTETPPVKETQQEPDEESLVPSGENLASETKTESAKTEGPSPALLEETPLEPAVGPKAACPLDSESAEGVVPPASGGGRVQNSPPVGRKTLPLTTAPEAGEVTPSDSGGQEDSPAKGLSVRLEFDYSEDKSSWDNQQENPPPTKKIGKKPVAKMPLRRPKMKKTPEKLDNTPASPPRSPAEPNDIPIAKGTYTFDIDKWDDPNFNPFSSTSKMQESPKLPQQSYNFDPDTCDESVDPFKTSSKTPSSPSKSPASFEIPASAMEANGVDGDGLNKPAKKKKTPLKTDTFRVKKSPKRSPLSDPPSQDPTPAATPETPPVISAVVHATDEEKLAVTNQKWTCMTVDLEADKQDYPQPSDLSTFVNETKFSSPTEELDYRNSYEIEYMEKIGSSLPQDDDAPKKQALYLMFDTSQESPVKSSPVRMSESPTPCSGSSFEETEALVNTAAKNQHPVPRGLAPNQESHLQVPEKSSQKELEAMGLGTPSEAIEITAPEGSFASADALLSRLAHPVSLCGALDYLEPDLAEKNPPLFAQKLQEELEFAIMRIEALKLARQIALASRSHQDAKREAAHPTDVSISKTALYSRIGTAEVEKPAGLLFQQPDLDSALQIARAEIITKEREVSEWKDKYEESRREVMEMRKIVAEYEKTIAQMIEDEQREKSVSHQTVQQLVLEKEQALADLNSVEKSLADLFRRYEKMKEVLEGFRKNEEVLKRCAQEYLSRVKKEEQRYQALKVHAEEKLDRANAEIAQVRGKAQQEQAAHQASLRKEQLRVDALERTLEQKNKEIEELTKICDELIAKMGKS

SEQ ID NO: 169607 - DNA, 3081 bp, Artificial Sequence
  derived and/or modified sequence
atgggcggcagccagagcctgcagcccgcccccgccagcgacctgaacctggaggccagcgaggccatgagcagcgacagcgaggaggccttcgagacccccgagagcaccacccccgtgaaggccccccccgccccccccccccccccccccgaggtgatccccgagcccgaggtgagcacccagcccccccccgaggagcccggctgcggcagcgagaccgtgcccgtgcccgacggccccagaagcgacagcgtggagggcagccccttcagaccccccagccacagcttcagcgccgtgttcgacgaggacaagcccatcgccagcagcggcacctacaacctggacttcgacaacatcgagctggtggacaccttccagaccctggagcccagagccagcgacgccaagaaccaggagggcaaggtgaacaccagaagaaagagcaccgacagcgtgcccatcagcaagagcaccctgagcagaagcctgagcctgcaggccagcgacttcgacggcgccagcagcagcggcaaccccgaggccgtggccctggcccccgacgcctacagcaccggcagcagcagcgccagcagcaccctgaagagaaccaagaagcccagaccccccagcctgaagaagaagcagaccaccaagaagcccaccgagaccccccccgtgaaggagacccagcaggagcccgacgaggagagcctggtgcccagcggcgagaacctggccagcgagaccaagaccgagagcgccaagaccgagggccccagccccgccctgctggaggagacccccctggagcccgccgtgggccccaaggccgcctgccccctggacagcgagagcgccgagggcgtggtgccccccgccagcggcggcggcagagtgcagaacagcccccccgtgggcagaaagaccctgcccctgaccaccgcccccgaggccggcgaggtgacccccagcgacagcggcggccaggaggacagccccgccaagggcctgagcgtgagactggagttcgactacagcgaggacaagagcagctgggacaaccagcaggagaaccccccccccaccaagaagatcggcaagaagcccgtggccaagatgcccctgagaagacccaagatgaagaagacccccgagaagctggacaacacccccgccagcccccccagaagccccgccgagcccaacgacatccccatcgccaagggcacctacaccttcgacatcgacaagtgggacgaccccaacttcaaccccttcagcagcaccagcaagatgcaggagagccccaagctgccccagcagagctacaacttcgaccccgacacctgcgacgagagcgtggaccccttcaagaccagcagcaagacccccagcagccccagcaagagccccgccagcttcgagatccccgccagcgccatggaggccaacggcgtggacggcgacggcctgaacaagcccgccaagaagaagaagacccccctgaagaccgacaccttcagagtgaagaagagccccaagagaagccccctgagcgacccccccagccaggaccccacccccgccgccacccccgagaccccccccgtgatcagcgccgtggtgcacgccaccgacgaggagaagctggccgtgaccaaccagaagtggacctgcatgaccgtggacctggaggccgacaagcaggactacccccagcccagcgacctgagcaccttcgtgaacgagaccaagttcagcagccccaccgaggagctggactacagaaacagctacgagatcgagtacatggagaagatcggcagcagcctgccccaggacgacgacgcccccaagaagcaggccctgtacctgatgttcgacaccagccaggagagccccgtgaagagcagccccgtgagaatgagcgagagccccaccccctgcagcggcagcagcttcgaggagaccgaggccctggtgaacaccgccgccaagaaccagcaccccgtgcccagaggcctggcccccaaccaggagagccacctgcaggtgcccgagaagagcagccagaaggagctggaggccatgggcctgggcacccccagcgaggccatcgagatcaccgcccccgagggcagcttcgccagcgccgacgccctgctgagcagactggcccaccccgtgagcctgtgcggcgccctggactacctggagcccgacctggccgagaagaacccccccctgttcgcccagaagctgcaggaggagctggagttcgccatcatgagaatcgaggccctgaagctggccagacagatcgccctggccagcagaagccaccaggacgccaagagagaggccgcccaccccaccgacgtgagcatcagcaagaccgccctgtacagcagaatcggcaccgccgaggtggagaagcccgccggcctgctgttccagcagcccgacctggacagcgccctgcagatcgccagagccgagatcatcaccaaggagagagaggtgagcgagtggaaggacaagtacgaggagagcagaagagaggtgatggagatgagaaagatcgtggccgagtacgagaagaccatcgcccagatgatcgaggacgagcagagagagaagagcgtgagccaccagaccgtgcagcagctggtgctggagaaggagcaggccctggccgacctgaacagcgtggagaagagcctggccgacctgttcagaagatacgagaagatgaaggaggtgctggagggcttcagaaagaacgaggaggtgctgaagagatgcgcccaggagtacctgagcagagtgaagaaggaggagcagagataccaggccctgaaggtgcacgccgaggagaagctggacagagccaacgccgagatcgcccaggtgagaggcaaggcccagcaggagcaggccgcccaccaggccagcctgagaaaggagcagctgagagtggacgccctggagagaaccctggagcagaagaacaaggagatcgaggagctgaccaagatctgcgacgagctgatcgccaagatgggcaagagctag

SEQ ID NO: 169608 - DNA, 3081 bp, Artificial Sequence
  derived and/or modified sequence
atgggaggctcccagtctctccagcccgccccagcgagcgacctgaacctggaggccagcgaagccatgagtagcgactctgaagaagcttttgagacccccgagtccactacccccgtaaaagctccacccgctcccccaccacctccaccagaggtaatcccagaacccgaggtgagcacccaacctcctcccgaggagcctgggtgcggatctgagactgtgcctgtgcccgacgggcctagaagcgattctgttgagggttctcctttcaggcccccttcccatagtttctctgctgtgttcgacgaggataagccaattgcctcctctgggacatacaacctggactttgacaacatcgagctcgtggacactttccagaccctggagcctagagccagcgacgcaaagaaccaggagggtaaggtcaacacccgaagaaagagcacagacagcgtgcccatttccaagtccacactcagtagatcacttagtctccaagcctctgactttgatggagccagctcttcaggtaatccggaggccgttgccttggctccagacgcctattctaccggatcaagctcagcatccagcactctcaagaggaccaagaaaccccgcccaccaagcttaaaaaagaagcagacgactaagaagcctacggaaacccccccagtcaaagaaacccagcaggagccagatgaggaatccctggttccaagcggggaaaacctggcctcagaaaccaaaaccgagtccgcaaaaaccgaaggaccatctcccgctttgctggaagaaacaccattggagcccgctgtgggaccaaaagccgcctgcccgctcgattccgagagcgcagagggagtagtccctcccgcctcagggggcggaagggtccaaaactctccacctgtagggcgtaagaccctccccttgacaaccgcccccgaggcaggcgaagtgacccctagtgacagcgggggccaagaagattcaccagccaagggtctgtccgtacgtttggagttcgactacagcgaggacaaaagttcctgggataatcagcaggagaatccacccccaactaaaaaaatcgggaaaaagcccgtggccaagatgcctctcagaagacctaagatgaaaaagaccccagaaaaattagacaacacaccagcctctcctccacgcagcccagccgagcctaatgacatcccgatagctaagggaacatatacctttgacatcgataaatgggatgacccaaacttcaaccccttctcgtctactagtaaaatgcaggaatcaccaaagcttcctcagcagtcctataactttgacccagatacgtgtgacgaatctgttgatccttttaagacgtctagtaagaccccgtcttcaccaagtaagtcacccgcatccttcgagatccctgcctccgccatggaggcgaacggtgttgatggggacggcctgaataaaccggctaagaagaagaagacccccctcaagaccgacacttttagagtcaagaaatcacccaaaagatctccactgtcagaccctccaagccaagatcctacccctgccgctactcctgaaacccctcccgttatctctgccgtggtccacgcgaccgacgaggaaaaactggccgtgactaatcaaaaatggacctgtatgactgttgatctggaggcggataagcaagactaccctcagccaagcgatctgtctacgtttgtgaacgagaccaaattcagcagcccgaccgaggagctggactatcggaattcatatgagattgagtatatggagaaaattggcagcagtctgccacaggatgacgacgcaccaaagaaacaggccttgtaccttatgtttgacacctcccaagagtctccagtgaagagcagccctgtacggatgtcagaatctcccaccccttgcagcggaagctcttttgaggaaactgaggctctggtgaataccgccgccaagaatcaacaccccgtccctcggggcctggcgcctaaccaagagagtcacctccaggtgccagagaagtcatcgcaaaaggagctggaggccatgggtctagggacaccatccgaggccattgagattaccgctcccgaaggctccttcgcaagtgctgacgcacttctcagcaggctggcccacccggtgtcactttgcggcgcattagattatctggaaccggacctagcagagaagaaccctccgttattcgcccagaaactgcaggaagagctggagttcgcaattatgcgtatcgaggctttaaagctggcccggcagatcgccctcgccagccgttctcatcaagacgccaagcgggaagcggcacacccaaccgatgtttcaattagcaagaccgcactttatagccgcattggaactgcggaagtggaaaagcccgccggcctcttattccagcagcccgatctggattccgccctgcagattgccagggccgaaataatcaccaaggaacgcgaggtcagtgaatggaaggataagtacgaagagtcccgtcgtgaagtaatggagatgcggaaaatcgtcgccgagtatgaaaagaccatcgcacagatgatcgaagatgagcaacgtgaaaaaagcgtctcacatcagactgtgcagcagctcgtgcttgagaaggagcaagctctggcggacctcaacagcgtggagaaaagcctggcagacctgttccgccgctacgaaaagatgaaagaggttttggagggatttagaaaaaatgaagaggtgctcaagcgttgtgctcaggagtatctctcaagagtcaagaaggaagagcagcggtaccaagcgcttaaggtacacgcggaggaaaaattggatcgagctaatgccgagatagcccaggtccgtgggaaggctcagcaagagcaagccgcgcatcaagccagtctccgtaaggaacagctgagggttgatgccctcgaaagaactctggagcagaaaaataaggaaattgaagagctgactaaaatttgtgacgaattaattgcaaaaatggggaagtcctag

SEQ ID NO: 169609 - DNA, 3081 bp, Artificial Sequence
  derived and/or modified sequence
atgggcggcagccagagcctgcagcctgccccagccagtgacctgaacctggaggccagcgaggccatgagcagtgacagcgaggaggcctttgagaccccagagagcaccacccctgtgaaggcccccccagcccctcctcctcctcctcctgaggtgattcctgagcctgaggtgtccacccagcccccacctgaggagcccggctgcggcagcgagaccgtgcctgtgcctgatggccccaggagtgacagcgtggagggcagccccttccggccccccagccacagcttctctgctgtgtttgatgaggacaagcccatcgccagcagcggcacctacaacctggactttgacaacatcgagctggtggacaccttccagaccctggagccccgggccagtgatgccaagaaccaggagggcaaggtgaacaccaggaggaagagcacagattctgtgcccatcagcaagagcaccctgagccgcagcctgagcctgcaggccagtgactttgatggagccagcagcagcggcaaccctgaggccgtggccctggccccagatgcctacagcacaggcagcagcagcgccagcagcaccctgaagaggaccaagaagccccggccccccagcctgaagaagaagcagaccaccaagaagcccacagagaccccacctgtgaaggagacccagcaggagccagatgaggagagcctggtgcccagcggggagaacctggccagcgagaccaagacagaaagtgccaagacagagggccccagccctgccctgctggaggagacccccctggagcctgctgtgggccccaaggccgcctgccccctggacagcgagagcgctgagggcgtggtgcccccagccagcggcggcggccgggtgcagaacagcccccctgtgggcaggaagaccctgcccctgaccacagcccctgaggccggggaggtgacccccagcgacagcggcggccaggaggacagccctgccaagggcctgtctgtgcggctggagtttgactacagcgaggacaagagctcctgggacaaccagcaggagaaccccccacccaccaagaagattggcaagaagcctgtggccaagatgcccctgcggcggcccaagatgaagaagaccccagagaagctggacaacaccccagccagcccccccaggagccctgctgagcccaatgacatccccatcgccaagggcacctacacctttgatattgacaagtgggatgaccccaacttcaaccccttcagcagcaccagcaagatgcaggagagccccaagctgccccagcagagctacaactttgatcctgacacctgtgatgaatctgtggaccccttcaagaccagcagcaagacccccagcagccccagcaagagccctgccagctttgagatcccagccagcgccatggaggccaacggggtggatggagatggcctgaacaagccagccaagaagaagaagacccccctgaagacagacaccttccgggtgaagaagagccccaagaggagccccctgagtgacccccccagccaggaccccaccccagctgccaccccagagaccccacctgtgatctctgctgtggtgcacgccacagatgaggagaagctggccgtgaccaaccagaagtggacctgcatgacagtggacctggaggccgacaagcaggactacccccagcccagcgacctgagcacctttgtgaatgagaccaagttcagcagccccacagaggagctggactacagaaacagctatgaaattgagtacatggagaagattggcagcagcctgccccaggatgatgatgcccccaagaagcaggccctgtacctgatgtttgacaccagccaggagagccctgtgaagagcagccctgtgaggatgtctgagagccccaccccctgcagcggcagcagctttgaggagacagaggccctggtgaacacagctgccaagaaccagcaccctgtgccccggggcctggcccccaaccaggagagccacctgcaggtgcctgagaagagcagccagaaggagctggaggccatgggcctgggcaccccatctgaggccatcgagatcacagcccctgagggcagctttgccagcgcagatgccctgctgagccggctggcccaccctgtgtccctgtgtggggccctggactacctggagccagacctggccgagaagaacccccccctgtttgcccagaagctgcaggaggagctggagtttgccatcatgagaattgaggccctgaagctggcccggcagatcgccctggccagccgcagccaccaggatgccaagcgggaggccgcccaccccacagatgtgtccatcagcaagacagccctgtacagcagaattggaacagctgaggtggagaagccagctggcctgctcttccagcagcctgacctggacagcgccctgcagatcgcccgggcagagatcatcaccaaggagcgggaggtgtctgagtggaaggacaagtatgaggagagccggcgggaggtgatggagatgaggaagatcgtggccgagtatgagaagaccatcgcccagatgattgaagatgagcagcgggagaagtctgtgagccaccagacagtgcagcagctggtgctggagaaggagcaggccctggccgacctgaacagcgtggagaagagcctggccgacctcttcagaagatatgagaagatgaaggaggtgctggagggcttcaggaagaatgaggaggtgctgaagagatgtgcccaggagtacctgagccgggtgaagaaggaggagcagcgctaccaggccctgaaggtgcatgctgaggagaagctggaccgggccaatgctgagatcgcccaggtgcggggcaaggcccagcaggagcaggccgcccaccaggccagcctgaggaaggagcagctgcgggtggatgccctggagaggaccctggagcagaagaacaaggagattgaggagctgaccaagatctgtgatgagctgattgccaagatgggcaagagctag

SEQ ID NO: 169610 - DNA, 3081 bp, Artificial Sequence
  derived and/or modified sequence
atgggcggcagccagagcctgcagcccgcccccgccagcgacctgaatttagaggcatccgaagcaatgtcttcagactcagaggaggccttcgagacccctgagtctaccactcccgtgaaggcgccacctgcccctcccccgccaccccccgaggtgattccagagcccgaagtttcaacccagcccccacctgaagaacctggttgtggatccgaaaccgtgccagtcccggacggccctcgctccgattctgtggaaggcagtcccttccgccccccttctcattcattcagcgcagtgtttgatgaagataagccaattgcatccagcggcacctacaacctggattttgacaatattgagctagtggacacattccagacgctggagccacgcgccagtgatgccaagaaccaggaaggaaaggttaatactcgtaggaaatctactgacagcgtgcccatttccaagtcaactctctctcgttccctgtcgttgcaagcatctgatttcgatggagcctcatctagtggcaatcccgaggcagttgcactcgccccagacgcatattccaccgggtcctcctccgcatcctctactctaaaaaggaccaaaaaaccgaggccaccttctcttaagaagaagcagaccacgaaaaaaccaacggagacgccaccagtgaaagagacccagcaggaacctgacgaggagtcactggtgccaagcggtgagaacctcgcatccgagacaaagactgaatccgctaagaccgaggggccatctccagcgctactggaggaaacccctctggaacccgcggttggcccaaaagctgcctgtccccttgattctgagagcgctgaaggcgttgttccaccggcctcagggggcggtcgcgtgcagaacagtccccctgtcggtcggaagacgctccctctgacaaccgcgcccgaagccggagaggttactccgtccgactcgggcggacaggaggactccccggccaagggactgagtgtcagactcgaatttgattattcagaggacaaatctagctgggacaatcaacaggaaaatccaccccctactaagaagattggcaagaagcctgtggcaaagatgcccctgcgacggcctaagatgaaaaaaacaccggaaaagttggacaacacacccgcttctcctccgaggtcccctgctgaacctaatgacatacctatcgcaaaaggcacatatactttcgacattgacaaatgggacgaccctaactttaaccccttctcctcaacgtcgaaaatgcaggagtctcctaaattaccccagcagtcttacaattttgatcctgatacgtgtgatgaatcggtagatcctttcaagacgagtagcaagacccctagcagtccttcaaaatccccagcttcatttgagatccccgcttctgccatggaggctaacggggtggatggagacggacttaataagcccgcgaaaaagaagaaaacaccactcaaaacggacacgttccgcgttaagaagtctcctaagagatcgcccctgagtgacccgccatcgcaggaccctaccccagcagcgactccagaaactccacccgtcatcagcgctgtggtccatgcaaccgacgaggaaaaactggccgtgacaaatcagaaatggacttgtatgactgtggacctggaggccgataagcaggattacccacagccctctgacttgtcaacattcgtgaacgaaacaaaattctcctctcctaccgaagaactcgactaccgaaactcctatgaaatcgagtacatggaaaaaatcggtagtagccttccccaggatgacgacgcccccaagaagcaggcactctatcttatgttcgacacgtcccaggagtccccagttaaatcctcccccgttcgtatgtcagagtcccctactccttgcagcggcagtagcttcgaggagacagaggcccttgtgaatactgctgcaaaaaaccaacaccccgttcccagaggactcgccccaaatcaggaatcgcatctccaggttcccgagaaatctagccagaaagagctggaagccatgggcctgggcactccttcagaggcaatcgagataactgcgccagaaggttctttcgcctctgctgacgccctgctgagcagactggctcatcccgtgtcactgtgtggggcactggactatcttgagccagatctggccgaaaaaaatccacctttatttgcacaaaaactgcaggaggaactagaatttgctattatgagaattgaggcactcaagctggcccgccagatcgccctcgcctcacgctctcaccaggacgccaagagggaagctgcccatcccaccgatgtatccatctcaaagacagccttatattcccgtatcgggaccgccgaagtggaaaaacccgcaggattgctttttcagcagcccgacttagattcagccctgcaaattgctagggcagagattattacaaaggagcgggaggtgtctgaatggaaggacaagtatgaagagtccaggcgggaggttatggagatgcgcaagatcgtcgccgagtacgagaagacgatcgcacagatgatagaggacgaacagcgcgaaaaatctgtgagccaccagaccgttcagcagcttgtgctcgaaaaggagcaggcactcgcagacctgaattcagtggaaaagtcactggccgacctctttcggcgctacgaaaaaatgaaagaagtcctggaaggatttcgaaagaacgaggaggtactgaaacggtgcgcgcaagaatacctcagccgggtcaagaaagaagagcaaagataccaagccctgaaggtgcacgcagaggaaaagctcgatagggccaacgctgagatcgcacaggttcggggcaaggcgcaacaagaacaggcggcccatcaagcaagtttgaggaaggaacaactgcgcgttgatgccctagaacggactctggaacagaagaataaagaaatcgaagagcttacaaaaatttgcgacgagttgatcgctaagatgggaaagtcatag

SEQ ID NO: 169611 - DNA, 3081 bp, Artificial Sequence
  derived and/or modified sequence
atggggggttcccaatccctgcagcctgcgccagcgagcgacctgaatcttgaagcttcagaggccatgagttccgattccgaagaggcctttgaaacccccgaaagcacaacaccagtgaaggctccaccagcccctccgccaccacccccagaggtgattcccgagcccgaagtgtcaacccaaccaccacccgaggaacccggttgcggaagcgagaccgtgccagtgcccgacggaccccgtagtgacagcgtggaggggagccctttcagacctccctctcatagttttagcgcagttttcgacgaagataagcccatcgcctcttcaggaacatacaatctggatttcgacaatatagaactagtggacacatttcaaacactcgagcctagggcctcagatgccaaaaatcaggagggtaaagtgaacactcggaggaagtcaacggacagcgtccccatttcaaagtccacactttctagatctctgagcttacaggcctctgactttgatggtgcgtcatcgagcggaaatcctgaggctgtggcactggcccctgacgcttactccactggtagcagcagcgctagtagtaccctgaagcggacgaaaaagcccaggccaccatctttgaagaaaaagcagaccacaaaaaagccaactgaaacaccaccagtcaaggagacacagcaggaacctgacgaagaaagtctagtcccctctggcgagaatctcgcctccgagacgaagacagaatctgcaaaaactgaaggacccagccctgccctgttggaggaaacaccactggaacccgcagttggacccaaagcagcatgccccctcgatagtgagtcagccgagggtgttgtgcctcccgcatctggtgggggtcgggtacagaatagcccccctgtaggtcgcaagacattgcctttgaccacggccccagaagccggtgaagtgactccctccgacagcggaggtcaggaagactcccccgctaaaggcctgtctgtccgcctggaatttgattacagcgaagataaaagcagttgggacaatcaacaggagaacccgccaccaacaaaaaagataggaaaaaagccagtggccaagatgcctctacgtcggccaaaaatgaagaaaactcccgaaaagcttgacaacacgcccgcttcacccccaagatctccagctgaacccaatgatatccccatagccaaagggacctacaccttcgatatcgacaagtgggatgatcccaactttaatcccttcagcagcacttctaagatgcaagagagccctaaattaccacagcagagttacaacttcgacccagatacctgcgacgaatccgttgatccatttaaaaccagctccaaaacgccgagctccccctctaagtcacccgcatccttcgaaatacccgcatccgcaatggaggctaatggtgtagacggagacggcctcaataagccagccaaaaagaagaaaacgcccctgaaaaccgatacgttccgcgtgaaaaagtccccaaaacggtctcctctatctgaccccccaagccaggatccaactccagctgctacacccgagactccccctgtgatctctgcagtggtgcacgccacagatgaagagaagctggccgtgactaaccaaaagtggacctgcatgacagttgacctggaagcggataaacaggactacccccagccatcagacctcagtacattcgtcaatgaaacaaagttttcctcccccactgaggaattagattataggaattcttatgaaattgagtacatggaaaaaattggctcctcgctacctcaggatgacgatgctcctaagaagcaggccctgtatctgatgttcgacacaagtcaggagagtccagtcaagtcaagtccagttcgcatgtccgagtcacctaccccctgtagtgggtccagtttcgaagagacagaagcacttgtaaatactgccgctaaaaaccagcaccccgtcccacgtggtcttgctcctaatcaggagtcacacctgcaggtccctgaaaaaagctcacagaaagaactcgaggcgatgggactgggcaccccatccgaggccattgagatcacggcccctgaaggaagctttgccagcgctgacgctctgttgtcccggctggcgcacccagtaagcctctgtggcgcattggattatctggagccagacctcgcggaaaaaaatccacccctattcgcccagaaactgcaggaagaactggaattcgcaatcatgagaatcgaggcactgaaactggcaaggcagatcgccctggcctcgagaagccatcaggacgctaagagagaagctgcccaccccactgatgtgtctattagtaaaactgcactgtattcgaggatcgggacagcggaggtcgagaagcctgctggccttctgttccagcagcccgaccttgattcagccctccagatcgccagagcggaaatcatcaccaaagaacgcgaagtctcagaatggaaggacaaatatgaggaaagccgccgagaagtgatggagatgcgtaagattgtggccgagtacgagaagacaatagcacagatgatcgaggatgaacagagggagaaatccgtttcacaccagacagttcaacaattggtgttagagaaagagcaggcattagccgacctgaacagcgtcgagaaatccctggccgatctgttccggaggtatgagaagatgaaggaggtcttagagggatttcgcaagaatgaagaggttctgaagcgctgcgctcaggagtacctgagcagagtgaaaaaggaagaacagcgttaccaggctcttaaggtgcacgcagaggaaaagctcgatagggccaatgctgaaatcgcacaagtgcgagggaaggcacagcaggaacaagccgctcaccaagcgtcgttacgcaaagaacaattgcgcgtggacgccttggagagaaccctggaacagaaaaataaggaaatcgaggagctgacaaagatatgcgacgaactcatagccaaaatggggaagtcctag

SEQ ID NO: 169612 - DNA, 3644 bp, Artificial Sequence
  derived and/or modified sequence
cgccccggctcccggctgcaggaatcgcgccaggacgctggccccgctcgcggctagcttgcacgccagggcacagcgaggatgggagggtcgcagtccctgcagccagccccagccagcgacctgaacctggaggcttccgaggcaatgagttccgattctgaagaggcatttgagaccccggagtcaacgacccctgtcaaagctccgccagctccacccccaccaccccccgaagtcatcccagaacccgaggtcagcacacagccacccccggaagaaccaggatgtggttctgagacagtccctgtccctgatggcccacggagcgactcggtggaaggaagtcccttccgtcccccgtcacactccttctctgccgtcttcgatgaagacaagccgatagccagcagtgggacttacaacttggactttgacaacattgagcttgtggatacctttcagaccttggagcctcgtgcctcagacgctaagaatcaggagggcaaagtgaacacacggaggaagtccacggattccgtccccatctctaagtctacactgtcccggtcgctcagcctgcaagccagtgactttgatggtgcttcttcctcaggcaatcccgaggccgtggcccttgccccagatgcatatagcacgggttccagcagtgcttctagtacccttaagcgaactaaaaaaccgaggccgccttccttaaaaaagaaacagaccaccaagaaacccacagagacccccccagtgaaggagacgcaacaggagccagatgaagagagccttgtccccagtggggagaatctagcatctgagacgaaaacggaatctgccaagacggaaggtcctagcccagccttattggaggagacgccccttgagcccgctgtggggcccaaagctgcctgccctctggactcagagagtgcagaaggggttgtccccccggcttctggaggtggcagagtgcagaactcaccccctgtcgggaggaaaacgctgcctcttaccacggccccggaggcaggggaggtaaccccatcggatagcggggggcaagaggactctccagccaaagggctctccgtaaggctggagtttgactattctgaggacaagagtagttgggacaaccagcaggaaaacccccctcctaccaaaaagataggcaaaaagccagttgccaaaatgcccctgaggaggccaaagatgaaaaagacacccgagaaacttgacaacactcctgcctcacctcccagatcccctgctgaacccaatgacatccccattgctaaaggtacttacacctttgatattgacaagtgggatgaccccaattttaaccctttttcttccacctcaaaaatgcaggagtctcccaaactgccccaacaatcatacaactttgacccagacacctgtgatgagtccgttgacccctttaagacatcctctaagacccccagctcaccttctaaatccccagcctcctttgagatcccagccagtgctatggaagccaatggagtggacggggatgggctaaacaagcccgccaagaagaagaagacgcccctaaagactgacacatttagggtgaaaaagtcgccaaaacggtctcctctctctgatccaccttcccaggaccccaccccagctgctacaccagaaacaccaccagtgatctctgcggtggtccacgccacagatgaggaaaagctggcggtcaccaaccagaagtggacgtgcatgacagtggacctagaggctgacaaacaggactacccgcagccctcggacctgtccacctttgtaaacgagaccaaattcagttcacccactgaggagttggattacagaaactcctatgaaattgaatatatggagaaaattggctcctccttacctcaggacgacgatgccccgaagaagcaggccttgtaccttatgtttgacacttctcaggagagccctgtcaagtcatctcccgtccgcatgtcagagtccccgacgccgtgttcagggtcaagttttgaagagactgaagcccttgtgaacactgctgcgaaaaaccagcatcctgtcccacgaggactggcccctaaccaagagtcacacttgcaggtgccagagaaatcctcccagaaggagctggaggccatgggcttgggcaccccttcagaagcgattgaaattacagctcccgagggctcctttgcctctgctgacgccctcctcagcaggctagctcaccccgtctctctctgtggtgcacttgactatctggagcccgacttagcagaaaagaaccccccactattcgctcagaaactccaggaggagttagagtttgccatcatgcggatagaagccctgaagctggccaggcagattgctttggcttcccgcagccaccaggatgccaagagagaggctgctcacccaacagacgtctccatctccaaaacagccttgtactcccgcatcgggaccgctgaggtggagaaacctgcaggccttctgttccagcagcccgacctggactctgccctccagatcgccagagcagagatcataaccaaggagagagaggtctcagaatggaaagataaatatgaagaaagcaggcgggaagtgatggaaatgaggaaaatagtggccgagtatgagaagaccatcgctcagatgatagaggacgaacagagagagaagtcagtctcccaccagacggtgcagcagctggttctggagaaggagcaagccctggccgacctgaactccgtggagaagtctctggccgacctcttcagaagatatgagaagatgaaggaggtcctagaaggcttccgcaagaatgaagaggtgttgaagagatgtgcgcaggagtacctgtcccgggtgaagaaggaggagcagaggtaccaggccctgaaggtgcacgcggaggagaaactggacagggccaatgctgagattgctcaggttcgaggcaaggcccagcaggagcaagccgcccaccaggccagcctgcggaaggagcagctgcgagtggacgccctggaaaggacgctggagcagaagaataaagaaatagaagaactcaccaagatttgtgacgaactgattgccaaaatggggaaaagctaactctgaaccgaatgttttggacttaactgttgcgtgcaatatgaccgtcggcacactgctgttcctccagttccatggacaggttctgttttcactttttcgtatgcactactgtatttcctttctaaataaaattgatttgattgtatgcagtactaaggagactatcagaatttcttgctattggtttgcattttcctagtataattcatagcaagttgacctcagagttcctgtatcagggagattgtctgattctctaataaaagacacattgctgaccttggccttgccctttgtacacaagttcccagggtgagcagcttttggatttaatatgaacatgtacagcgtgcatagggactcttgccttaaggagtgtaaacttgatctgcatttgctgatttgtttttaaaaaaacaagaaatgcatgtttcaaataaaattctctattgtaaataaaattttttctttggatcttg

SEQ ID NO: 169613 - protein, 49 aa, Artificial Sequence
  derived and/or modified sequence
MDSSREPTLGRLDAAGFWQVWQRFDADGHGHESKFAQGETAVYDYPRCL

SEQ ID NO: 169614 - protein, 276 aa, Artificial Sequence
  derived and/or modified sequence
MDSSREPTLGRLDAAGFWQVWQRFDADEKGYIEEKELDAFFLHMLMKLGTDDTVMKANLHKVKQQFMTTQDASKDGRIRMKELAGMFLSEDENFLLLFRRENPLDSSVEFMQIWRKYDADSSGFISAAELRNFLRDLFLHHKKAISEAKLEEYTGTMMKIFDRNKDGRLDLNDLARILALQENFLLQFKMDACSTEERKRDFEKIFAYYDVSKTGALEGPEVDGFVKDMMELVQPSISGVDLDKFREILLRHCDVNKDGKIQKSELALCLGLKINP

SEQ ID NO: 169615 - DNA, 150 bp, Artificial Sequence
  derived and/or modified sequence
atggattcaagtcgggagcccacactgggccgtctggacgcagcaggattttggcaggtctggcagagattcgacgcagatggccacggccacgagtccaagtttgcccagggcgagacagctgtgtacgactacccgcgttgtctgtag

SEQ ID NO: 169616 - DNA, 831 bp, Artificial Sequence
  derived and/or modified sequence
atggacagctcacgagagccgacactggggcgtctagacgctgctgggttctggcaggtgtggcaaagatttgatgcagacgaaaagggatacatcgaagaaaaagaactagacgcattttttctccacatgcttatgaaactgggcactgatgatacagtcatgaaggccaatctgcataaggttaagcaacagtttatgacaactcaggacgcctctaaggatggccgtatccgtatgaaggaattggccggtatgttcctaagtgaagatgaaaatttccttcttctgttccgcagagagaatccccttgactccagcgtggaattcatgcagatctggcggaaatatgatgccgattcgtctggattcatttctgcagccgaacttaggaactttttgcgtgacctgtttctgcaccataagaaggctatcagtgaagcgaagctggaggagtatacgggaacgatgatgaagattttcgatagaaacaaagatggacgtctggatctgaatgacctggcacgtatcctcgccctgcaagaaaatttcttgttacagttcaaaatggatgcttgttccactgaggaacgtaagagagatttcgaaaaaatatttgcctattacgacgtttctaaaactggcgctttggagggaccagaagtggacgggttcgtgaaggatatgatggaactggtgcagccttcaatcagtggagtggacctggataagtttagggaaatcctgttgcggcactgcgatgtaaataaagacgggaaaatccagaagtcagagctggccctgtgtcttggcctgaagatcaacccgtag

SEQ ID NO: 169617 - DNA, 150 bp, Artificial Sequence
  derived and/or modified sequence
atggactcttctcgagaacctaccctggggcgcctggatgctgcgggtttttggcaagtgtggcaacggttcgacgcagacggccacgggcatgagagcaagttcgcccaaggagagaccgctgtatatgattatcccagatgcttgtag

SEQ ID NO: 169618 - DNA, 831 bp, Artificial Sequence
  derived and/or modified sequence
atggacagctctcgtgagccaacacttggacgacttgatgcagcaggcttctggcaagtgtggcagcgcttcgacgccgatgagaagggctatatcgaagagaaagaactggatgccttctttctccatatgcttatgaaactcggcactgatgataccgtaatgaaggcaaacctgcacaaagtgaagcaacagttcatgaccacccaggacgcttccaaggacggacgaataaggatgaaggagctggctggcatgtttttgagcgaagacgagaattttctgcttcttttccgccgggaaaatcctctagattcctctgtagagtttatgcagatttggcgcaaatatgatgctgacagctcagggttcatatccgctgcagagctgcgcaactttctaagggacctttttcttcatcataaaaaggcgatttctgaggctaaattagaggaatatacagggacgatgatgaagatttttgaccggaacaaagacggtaggctcgatctgaatgatttagctcggattctggctttacaggagaactttctgctgcagttcaaaatggacgcttgctccactgaggagaggaaacgagattttgagaagatttttgcatattacgacgtttcaaaaacaggcgctcttgaaggtccagaggtggacggctttgtgaaagacatgatggagctcgttcagccatctatttccggcgtcgatctcgacaagttcagagagatattactgcgccattgtgatgtcaacaaagatggtaagattcagaagtccgagcttgcactgtgcctcggcctgaaaatcaatccctag

SEQ ID NO: 169619 - DNA, 831 bp, Artificial Sequence
  derived and/or modified sequence
atggatagttcacgagagcccacactgggcaggctcgacgcagctggattttggcaggtgtggcaaagatttgatgctgacgagaaaggatacatagaagaaaaagagctcgacgcgtttttcctgcacatgctgatgaaacttggcacagacgacacagttatgaaagctaaccttcataaggtgaaacagcagtttatgaccacgcaagatgcaagtaaggatggcagaatccgtatgaaggagctggccggaatgttcctttctgaggacgagaattttctgctgctgtttcgaagagagaaccccctggacagctccgtggagtttatgcagatttggaggaaatacgacgccgactcctcaggctttatatccgctgctgaattgcgaaacttccttagagatctgttcctccaccacaaaaaagcaatatccgaagctaaactggaggaatacacaggaaccatgatgaagatcttcgatcgaaataaagatggccggctagacctcaatgacctcgcaaggatcctggccctccaagagaactttttgttacagttcaagatggacgcatgctcaaccgaagagagaaagagggattttgaaaaaatcttcgcgtactacgacgtaagcaagactggcgcgcttgagggacccgaagtcgacggatttgtgaaggatatgatggaactcgtgcagccttctataagtggcgttgacctagacaaatttagggagatactcctgaggcactgtgacgtaaacaaagatggcaagatacagaaatcagagctggcactctgcctcggcctcaaaataaacccatag

SEQ ID NO: 169620 - DNA, 150 bp, Artificial Sequence
  derived and/or modified sequence
atggacagcagcagagagcccaccctgggcagactggacgccgccggcttctggcaggtgtggcagagattcgacgccgacggccacggccacgagagcaagttcgcccagggcgagaccgccgtgtacgactaccccagatgcctgtag

SEQ ID NO: 169621 - DNA, 831 bp, Artificial Sequence
  derived and/or modified sequence
atggacagcagcagagagcccaccctgggcagactggacgccgccggcttctggcaggtgtggcagagattcgacgccgacgagaagggctacatcgaggagaaggagctggacgccttcttcctgcacatgctgatgaagctgggcaccgacgacaccgtgatgaaggccaacctgcacaaggtgaagcagcagttcatgaccacccaggacgccagcaaggacggcagaatcagaatgaaggagctggccggcatgttcctgagcgaggacgagaacttcctgctgctgttcagaagagagaaccccctggacagcagcgtggagttcatgcagatctggagaaagtacgacgccgacagcagcggcttcatcagcgccgccgagctgagaaacttcctgagagacctgttcctgcaccacaagaaggccatcagcgaggccaagctggaggagtacaccggcaccatgatgaagatcttcgacagaaacaaggacggcagactggacctgaacgacctggccagaatcctggccctgcaggagaacttcctgctgcagttcaagatggacgcctgcagcaccgaggagagaaagagagacttcgagaagatcttcgcctactacgacgtgagcaagaccggcgccctggagggccccgaggtggacggcttcgtgaaggacatgatggagctggtgcagcccagcatcagcggcgtggacctggacaagttcagagagatcctgctgagacactgcgacgtgaacaaggacggcaagatccagaagagcgagctggccctgtgcctgggcctgaagatcaacccctag

SEQ ID NO: 169622 - DNA, 704 bp, Artificial Sequence
  derived and/or modified sequence
atggacagctcccgggaaccgactctggggcgcttggacgccgctggcttctggcaggtctggcagcgctttgatgcggatggacacggtcatgaaagcaaatttgcacaaggtgaaacagcagtttatgactacccaagatgcctctaaagatggtcgcattcggatgaaagagcttgctggtatgttcttatctgaggatgaaaactttcttctgctctttcgccgggaaaacccactggacagcagcgtggagtttatgcagatttggcgcaaatatgacgctgacagcagtggctttatatcagctgctgagctccgcaacttcctccgagacctctttcttcaccacaaaaaggccatttctgaggctaaactggaagaatacactggcaccatggattctggctcttcaggaaaacttccttctccaatttaaaatggatgcttgttctactgaagaaaggaaaagggactttgagaaaatctttgcctactatgatgttagtaaaacaggagccctggaaggcccagaagtggatgggtttgtcaaagacatgatggagcttgtccagcccagcatcagcggggtggaccttgataagttccgcgagattctcctgcgtcactgcgacgtgaacaaggatggaaaaattcagaagtctgagctggctttgtgtcttgggctgaaaatcaacccataa

SEQ ID NO: 169623 - DNA, 150 bp, Artificial Sequence
  derived and/or modified sequence
atggattcatcgcgcgagcccactctcggcaggctcgatgcagcgggcttctggcaggtgtggcagcgcttcgatgccgacggacacggccatgagtctaagtttgcccagggagaaaccgctgtgtatgactacccccgttgcctttag

SEQ ID NO: 169624 - DNA, 831 bp, Artificial Sequence
  derived and/or modified sequence
atggattcttcacgagaacctacattgggccgacttgacgccgccggtttctggcaggtgtggcagagatttgatgctgatgagaagggatacatcgaggaaaaagagctggacgcctttttcctgcacatgctgatgaaactgggaaccgatgataccgtaatgaaggcaaacctccacaaagtcaagcagcagtttatgaccacacaggacgcctccaaggacggtcgcatccgtatgaaggaacttgcaggcatgttcttatccgaggatgagaatttcctgctcttgtttcgccgcgagaaccccctagactcaagcgtggaatttatgcaaatttggcgtaagtatgatgccgattcttccggtttcatatccgctgctgagcttcgcaactttctgcgagatctctttcttcaccataagaaagcaatttcagaagccaagctagaggaatatacagggaccatgatgaagatctttgatcggaataaggacggtagattagatctaaatgacctggccaggattctggctctccaggagaacttccttctgcagtttaagatggacgcctgctccacagaggagcggaagagggactttgagaaaatctttgcatactacgatgtaagcaaaactggagccttggaaggtcccgaggtggatggttttgtgaaagacatgatggagctggtccagcccagtattagcggggtggaccttgacaagtttcgggagatcttgctccgacactgtgacgtgaataaagatggaaaaatccagaagagtgaacttgctctgtgtttgggcctgaagattaatccatag

SEQ ID NO: 169625 - DNA, 150 bp, Artificial Sequence
  derived and/or modified sequence
atggacagcagccgggagcccaccctgggccgcctggatgctgctggcttctggcaggtgtggcagagatttgatgctgatggccacggccacgagagcaagtttgcccagggcgagacagctgtgtatgactacccccgctgcctgtag

SEQ ID NO: 169626 - DNA, 831 bp, Artificial Sequence
  derived and/or modified sequence
atggacagcagccgggagcccaccctgggccgcctggatgctgctggcttctggcaggtgtggcagagatttgatgctgatgagaagggctacatcgaggagaaggagctggatgccttcttcctgcacatgctgatgaagctgggcacagatgacacagtgatgaaggccaacctgcacaaggtgaagcagcagttcatgaccacccaggatgccagcaaggatggccgcatccgcatgaaggagctggccggcatgttcctgtctgaagatgagaacttcctgctgctcttcagaagagagaaccccctggacagctctgtggagttcatgcagatctggaggaaatatgatgctgacagcagcggcttcatctctgctgctgagctgaggaacttcctgcgggacctcttcctgcaccacaagaaggccatcagcgaggccaagctggaggagtacacaggcaccatgatgaagatctttgacaggaacaaggatggccgcctggacctgaatgacctggcccgcatcctggccctgcaggagaacttcctgctgcagttcaagatggatgcctgcagcacagaggagaggaagagggactttgagaagatctttgcctactatgatgtgtccaagacaggagccctggagggccctgaggtggatggctttgtgaaggacatgatggagctggtgcagcccagcatcagcggcgtggacctggacaagttccgggagatcctgctgcggcactgtgatgtgaacaaggatggcaagatccagaagtctgagctggccctgtgcctgggcctgaagatcaacccctag

SEQ ID NO: 169627 - DNA, 1447 bp, Artificial Sequence
  derived and/or modified sequence
cagcgacgccacggccagcagcgctcgcgtcctccccagcaacagttactcaaagctaatcagatagcgaaagaagcaggagagcaagtcaagaaatacggtgaaggagtccttcccaaagttgtctaggtccttccgcgccggtgcctggtcttcgtcgtcaacaccatggacagctcccgggaaccgactctggggcgcttggacgccgctggcttctggcaggtctggcagcgctttgatgcggatgaaaaaggttacatagaagagaaggaactcgatgctttctttctccacatgttgatgaaactgggtactgatgacacggtcatgaaagcaaatttgcacaaggtgaaacagcagtttatgactacccaagatgcctctaaagatggtcgcattcggatgaaagagcttgctggtatgttcttatctgaggatgaaaactttcttctgctctttcgccgggaaaacccactggacagcagcgtggagtttatgcagatttggcgcaaatatgacgctgacagcagtggctttatatcagctgctgagctccgcaacttcctccgagacctctttcttcaccacaaaaaggccatttctgaggctaaactggaagaatacactggcaccatgatgaagatttttgacagaaataaagatggtcggttggatctaaatgacttagcaaggattctggctcttcaggaaaacttccttctccaatttaaaatggatgcttgttctactgaagaaaggaaaagggactttgagaaaatctttgcctactatgatgttagtaaaacaggagccctggaaggcccagaagtggatgggtttgtcaaagacatgatggagcttgtccagcccagcatcagcggggtggaccttgataagttccgcgagattctcctgcgtcactgcgacgtgaacaaggatggaaaaattcagaagtctgagctggctttgtgtcttgggctgaaaatcaacccataatcccagactgctttgccttttgctcttactatgtttctgtgatcttgctggtagaattgtatctgtgcattgatgttgggaacacagtgggcaaactcacaaatggtgtgctattcttgggcaagaacagggacgctagggccttccttccaccggcgtgatctatccctgtctcactgaaagcccctgtgtagtgtctgtgttgttttcccttgaccctgggctttcctatcctcccaaagactcagctcccctgttagatggctctgcctgtccttccccagtcaccagggtgggggggacaggggcagctgagtgcattcattttgtgcttttcttgtgggctttctgcttagtctgaaaggtgtgtggcattcatggcaatcctgtaacttcaacatagatttttttgtgtgtgtggaaataaatctgcaattggaaacaaaaa

SEQ ID NO: 169628 - DNA, 150 bp, Artificial Sequence
  derived and/or modified sequence
atggacagcagccgggagcccaccctgggccggctggacgccgccgggttctggcaggtttggcagaggtttgatgccgatggccatggccacgagtccaagtttgcgcagggcgaaaccgccgtttatgattatccacgatgtttatag

SEQ ID NO: 169629 - DNA, 831 bp, Artificial Sequence
  derived and/or modified sequence
atggacagcagccgggagcccaccctgggccggctggacgccgccgggttttggcaggtgtggcagcggtttgatgcagacgagaagggttatattgaagaaaaggaactggacgctttcttcttacacatgttgatgaaattagggaccgatgacacggtcatgaaggctaacctgcataaggtcaaacagcagtttatgactacacaggatgcctctaaggacgggcggattcgtatgaaagaactggcaggaatgttcttgagtgaggatgagaacttcctactgttgttccggcgagaaaatccattagactcgagtgtggaattcatgcagatctggcgcaaatatgacgctgattcatctggcttcatctcagccgccgagttgcgtaattttctacgcgatctattcctgcaccacaaaaaagctatttctgaagcaaagctggaggagtacaccggaactatgatgaaaattttcgaccgtaacaaggatggcagattagacctcaatgatctggcacggatactggccttgcaggaaaattttctgcttcagtttaagatggatgcctgcagcaccgaagaacgcaaacgggacttcgaaaagattttcgcatattatgatgttagtaaaacaggagccctggagggtcccgaagtagatggtttcgttaaagatatgatggagctcgtgcagccatcaatttccggggtcgacctggataagtttagggagatcctgctgcgccattgtgatgtcaataaggacgggaaaatacagaaaagcgagctcgcactttgtctgggcctgaagattaatccctag

SEQ ID NO: 169630 - RNA, 150 nt, Artificial Sequence
  derived and/or modified sequence
auggacucuucucgagaaccuacccuggggcgccuggaugcugcggguuuuuggcaaguguggcaacgguucgacgcagacggccacgggcaugagagcaaguucgcccaaggagagaccgcuguauaugauuaucccagaugcuuguag

SEQ ID NO: 169631 - RNA, 831 nt, Artificial Sequence
  derived and/or modified sequence
auggacagcucucgugagccaacacuuggacgacuugaugcagcaggcuucuggcaaguguggcagcgcuucgacgccgaugagaagggcuauaucgaagagaaagaacuggaugccuucuuucuccauaugcuuaugaaacucggcacugaugauaccguaaugaaggcaaaccugcacaaagugaagcaacaguucaugaccacccaggacgcuuccaaggacggacgaauaaggaugaaggagcuggcuggcauguuuuugagcgaagacgagaauuuucugcuucuuuuccgccgggaaaauccucuagauuccucuguagaguuuaugcagauuuggcgcaaauaugaugcugacagcucaggguucauauccgcugcagagcugcgcaacuuucuaagggaccuuuuucuucaucauaaaaaggcgauuucugaggcuaaauuagaggaauauacagggacgaugaugaagauuuuugaccggaacaaagacgguaggcucgaucugaaugauuuagcucggauucuggcuuuacaggagaacuuucugcugcaguucaaaauggacgcuugcuccacugaggagaggaaacgagauuuugagaagauuuuugcauauuacgacguuucaaaaacaggcgcucuugaagguccagagguggacggcuuugugaaagacaugauggagcucguucagccaucuauuuccggcgucgaucucgacaaguucagagagauauuacugcgccauugugaugucaacaaagaugguaagauucagaaguccgagcuugcacugugccucggccugaaaaucaaucccuag

SEQ ID NO: 169632 - RNA, 831 nt, Artificial Sequence
  derived and/or modified sequence
auggauaguucacgagagcccacacugggcaggcucgacgcagcuggauuuuggcagguguggcaaagauuugaugcugacgagaaaggauacauagaagaaaaagagcucgacgcguuuuuccugcacaugcugaugaaacuuggcacagacgacacaguuaugaaagcuaaccuucauaaggugaaacagcaguuuaugaccacgcaagaugcaaguaaggauggcagaauccguaugaaggagcuggccggaauguuccuuucugaggacgagaauuuucugcugcuguuucgaagagagaacccccuggacagcuccguggaguuuaugcagauuuggaggaaauacgacgccgacuccucaggcuuuauauccgcugcugaauugcgaaacuuccuuagagaucuguuccuccaccacaaaaaagcaauauccgaagcuaaacuggaggaauacacaggaaccaugaugaagaucuucgaucgaaauaaagauggccggcuagaccucaaugaccucgcaaggauccuggcccuccaagagaacuuuuuguuacaguucaagauggacgcaugcucaaccgaagagagaaagagggauuuugaaaaaaucuucgcguacuacgacguaagcaagacuggcgcgcuugagggacccgaagucgacggauuugugaaggauaugauggaacucgugcagccuucuauaaguggcguugaccuagacaaauuuagggagauacuccugaggcacugugacguaaacaaagauggcaagauacagaaaucagagcuggcacucugccucggccucaaaauaaacccauag

SEQ ID NO: 169633 - protein, 258 aa, Artificial Sequence
  derived and/or modified sequence
MASAAAAEAEKGSPVVVGLLVVGNIIILLSGLSLFAETIWVTADQYRVYPLMGVSGKDDVFAGAWIAIFCGFSFFMVASFGVGAALCRRRSMVLTYLVLMLIVYIFECASCITSYTHRDYMVSNPSLITKQMLTFYSADTDQGQELTRLWDRVMIEQECCGTSGPMDWVNFTSAFRAATPEVVFPWPPLCCRRTGNFIPLNEEGCRLGHMDYLFTKGCFEHIGHAIDSYTWGISWFGFAILMWTLPVMLIAMYFYTML

SEQ ID NO: 169634 - DNA, 777 bp, Artificial Sequence
  derived and/or modified sequence
atggccagcgccgccgccgccgaggccgagaagggcagccccgtggtggtgggcctgctggtggtgggcaacatcatcatcctgctgagcggcctgagcctgttcgccgagaccatctgggtgaccgccgaccagtacagagtgtaccccctgatgggcgtgagcggcaaggacgacgtgttcgccggcgcctggatcgccatcttctgcggcttcagcttcttcatggtggccagcttcggcgtgggcgccgccctgtgcagaagaagaagcatggtgctgacctacctggtgctgatgctgatcgtgtacatcttcgagtgcgccagctgcatcaccagctacacccacagagactacatggtgagcaaccccagcctgatcaccaagcagatgctgaccttctacagcgccgacaccgaccagggccaggagctgaccagactgtgggacagagtgatgatcgagcaggagtgctgcggcaccagcggccccatggactgggtgaacttcaccagcgccttcagagccgccacccccgaggtggtgttcccctggccccccctgtgctgcagaagaaccggcaacttcatccccctgaacgaggagggctgcagactgggccacatggactacctgttcaccaagggctgcttcgagcacatcggccacgccatcgacagctacacctggggcatcagctggttcggcttcgccatcctgatgtggaccctgcccgtgatgctgatcgccatgtacttctacaccatgctgtag

SEQ ID NO: 169635 - DNA, 777 bp, Artificial Sequence
  derived and/or modified sequence
atggcatccgccgccgcggctgaagcagaaaagggatcgcctgtggtagtgggtttgctggtcgtagggaatattatcatattgttgtcaggactaagcctgtttgccgaaaccatctgggtgaccgcagatcagtaccgcgtgtaccctctgatgggcgtttcggggaaggacgatgtttttgccggggcttggatcgccatcttttgcggtttcagtttttttatggtggctagctttggagtcggtgccgccctgtgccgacgcagaagcatggtattaacctatcttgtgctgatgctcatcgtctatatttttgaatgcgcgtcatgtatcacctcctatacgcaccgggactacatggtctcaaacccttctctcattaccaaacagatgctgacgttctattccgctgataccgaccagggccaggagttaactcgactttgggatagagtgatgatcgagcaggagtgctgtggaacctcgggccccatggattgggtcaattttacgtccgcctttagagcagcaactccagaagttgtctttccctggcctccactgtgctgtcgcagaacagggaactttatccctctcaatgaagagggctgtagactcggacacatggattacctgtttactaagggatgctttgagcacataggtcacgcaatagattcatacacctgggggataagctggtttggctttgccattttgatgtggactctacccgttatgctcattgcgatgtatttctacacgatgttgtag

SEQ ID NO: 169636 - DNA, 777 bp, Artificial Sequence
  derived and/or modified sequence
atggccagcgctgctgctgctgaggccgagaagggcagccctgtggtggtgggcctgctggtggtgggcaacatcatcatcctgctgagcggcctgagcctgtttgctgagaccatctgggtgacagctgaccagtacagagtgtaccccctgatgggcgtgtctgggaaggatgatgtgtttgctggggcctggatcgccatcttctgtggcttctccttcttcatggtggccagctttggagtgggcgccgccctgtgcagaagaagatccatggtgctgacctacctggtgctgatgctgattgtgtacatctttgaatgtgccagctgcatcaccagctacacccaccgggactacatggtgagcaaccccagcctcatcaccaagcagatgctgaccttctacagcgctgacacagaccagggccaggagctgacccggctgtgggacagagtgatgattgagcaggagtgctgcggcaccagcggccccatggactgggtgaacttcaccagcgccttccgggccgccaccccagaggtggtgttcccctggccacccctgtgctgcagaagaacaggcaacttcatccccctgaatgaggagggctgccgcctgggccacatggactacctgttcaccaagggctgctttgagcacatcggccacgccatcgacagctacacctggggcatctcctggtttggatttgccatcctgatgtggaccctgcctgtgatgctgattgccatgtacttctacaccatgctgtag

SEQ ID NO: 169637 - DNA, 777 bp, Artificial Sequence
  derived and/or modified sequence
atggccagcgccgccgccgccgaggccgagaagggcagccccgtggttgttgggctgctggtggttggtaacattatcattctactttccggtttaagtctatttgcggaaacgatttgggtcactgccgaccaatacagagtataccctttgatgggcgtgagtggcaaggatgacgtgttcgcaggcgcctggatagccattttttgcggcttctcattcttcatggtcgcaagctttggagtcggggcggccttgtgccggaggcggagtatggttctcacatatctggttttgatgctgatcgtatatattttcgagtgcgcttcttgtattacgagctacacacacagagactatatggtttccaacccctccctgataaccaagcagatgcttactttctatagcgcggataccgatcagggccaagagctcacaagactctgggacagagtcatgatcgagcaagaatgttgcggcacgagcggccctatggactgggtcaatttcaccagcgcttttagagctgcaacacccgaagtggtattcccgtggcccccattatgctgcagaaggacaggaaactttattccgctgaacgaggagggatgtaggttaggtcacatggactacctttttacaaaggggtgtttcgaacatatagggcacgccatcgactcctacacatggggcatttcttggttcgggtttgccattctcatgtggaccttacctgtcatgttaattgcaatgtacttctatacaatgctctag

SEQ ID NO: 169638 - DNA, 777 bp, Artificial Sequence
  derived and/or modified sequence
atggccagcgcagctgctgctgaagccgaaaaaggatccccagtagtggtcggcttgcttgtggtgggaaatattatcatcctgctgagcggattaagtttgtttgccgagaccatttgggtgaccgccgatcagtaccgcgtgtaccccctgatgggggtttccggaaaggacgatgttttcgccggtgcttggatcgccatcttctgtggatttagtttttttatggtggcctctttcggagttggagcagccttatgcagacgcagatccatggtgctaacgtacctggtgcttatgttgattgtgtacatttttgaatgcgctagttgcatcaccagctatacccacagagattacatggtgtctaaccccagcctaatcacaaagcagatgctcaccttctatagcgcagacacggaccaggggcaggagttaacccgactttgggatagagtcatgatcgaacaggagtgctgcggcacttctggacctatggattgggtgaattttacttccgcttttagagccgcaacgcctgaggtcgtctttccatggcccccattatgttgccgacgcactggcaattttatccccctcaatgaggagggttgtcgacttggccacatggattatctgttcacgaaggggtgttttgagcatattgggcacgccattgattcatatacatgggggatcagttggtttggattcgccatcttgatgtggaccctccccgttatgctcatagcgatgtatttctacaccatgctgtag

SEQ ID NO: 169639 - DNA, 1223 bp, Artificial Sequence
  derived and/or modified sequence
atggcgtctgcggcagcagcggaggccgagaagggatctccagttgtggtgggcctgctagttgtgggcaatatcattattctgctgtcaggcctgtccctgtttgctgagaccatatgggtgacagccgaccagtaccgtgtatacccactgatgggagtctcaggcaaggatgacgtcttcgctggtgcctggattgccatcttctgcggcttctccttcttcatggtagccagttttggtgtgggtgccgcactctgccgccgccggtccatggtcctcacgtacctggtgctcatgctcatcgtctacatcttcgagtgcgcctcctgcatcacgtcctacacccaccgtgactacatggtgtccaacccatccctgatcaccaagcagatgctgaccttctacagcgcggacaccgaccagggccaggagctgacccgcctctgggaccgcgtcatgattgagcaagaatgctgtggcacatctggtcccatggactgggtgaacttcacgtcagccttccgggcggccactccggaggtggtgttcccctggcccccactgtgctgtcgccggacgggaaacttcatccccctcaacgaggagggctgccgcctggggcacatggactacctgttcaccaagggctgcttcgaacacatcggccacgccatcgacagctacacgtggggtatctcgtggtttgggtttgccatcctgatgtggacgctcccggtcatgctgatagccatgtatttctacaccatgctctgagggacaggaggggaaggcaacatacacaccccggactcctccgcatcctcctcctgcttcctccgctgggcctggatggctgcctcacctctcacctcccaacgtccctagcccttacgtccttccacttccaagatctttttccaggttcctgagccctactgtgtctcaggtgtgccctgaaaccccagggcttgtgtgcacatatccttagcccatctttcaagggacctctccatgatcccacctcccattcacagatacctctcttgtagctctctgacctcctccttcatggcaggcatcgccattcttgctgaaccgtttgtgattgccatttgagctctggaagcctctattgccatgagagttctgtcacggtcactttactgtccccatcatcacccagcacggggctaagcatatactagatagtcaataaataa

SEQ ID NO: 169640 - protein, 102 aa, Artificial Sequence
  derived and/or modified sequence
MSARVRSRSRGRGDGQEAPDVVAFVAPGESQQEEPPTDNQDIEPGQEREGTPPIEERKVEGDCQEMDLEKTRSERGDGSDVKEKTPPNPKHAKTKEAGDGQP

SEQ ID NO: 169641 - DNA, 309 bp, Artificial Sequence
  derived and/or modified sequence
atgagcgccagagtgagaagcagaagcagaggcagaggcgacggccaggaggcccccgacgtggtggccttcgtggcccccggcgagagccagcaggaggagccccccaccgacaaccaggacatcgagcccggccaggagagagagggcaccccccccatcgaggagagaaaggtggagggcgactgccaggagatggacctggagaagaccagaagcgagagaggcgacggcagcgacgtgaaggagaagaccccccccaaccccaagcacgccaagaccaaggaggccggcgacggccagccctag

SEQ ID NO: 169642 - DNA, 309 bp, Artificial Sequence
  derived and/or modified sequence
atgagcgctcgggttcgctcacgctctagaggcagaggggacgggcaagaggctccggatgtagtcgccttcgtggctccaggagagagtcagcaggaggaaccccccactgacaatcaggatatcgaacctggacaagagagagaagggactccccccattgaagaaagaaaggtggaaggggactgccaggagatggacttggagaagactcgctctgagaggggtgacggttccgacgtgaaagagaagacaccgccaaatcccaaacacgccaagaccaaggaagcaggcgacggtcagccgtag

SEQ ID NO: 169643 - DNA, 309 bp, Artificial Sequence
  derived and/or modified sequence
atgtctgcccgggtgcgcagccgcagccggggcagaggagatggccaggaggccccagatgtggtggcctttgtggcccctggagagagccagcaggaggagcccccaacagacaaccaggacatcgagcccggccaggagcgggagggcaccccacccatcgaggagaggaaggtggagggggactgccaggagatggacctggagaagaccaggagtgaaagaggagatggcagtgatgtgaaggagaagaccccacccaaccccaagcacgccaagaccaaggaggccggagatggccagccctag

SEQ ID NO: 169644 - DNA, 309 bp, Artificial Sequence
  derived and/or modified sequence
atgagcgcccgggtgcggagccggagccggggccggggcgacggccaagaggctccggacgttgtcgcctttgtagctcccggggagtcccagcaggaggaaccccctacagacaaccaggatatcgaacctggccaggagcgggagggaacaccgccaattgaagaacggaaggtcgaaggcgattgccaggagatggatcttgagaagacccgctccgagcgcggtgacgggtcagatgttaaggaaaaaacccctccaaaccccaagcacgccaagaccaaggaggctggcgacggccaaccttag

SEQ ID NO: 169645 - DNA, 499 bp, Artificial Sequence
  derived and/or modified sequence
gccacttctcttcccttcattcttcgccaggctctctgctgactcaagttcttcagttcacgatcttctagttgcagcgatgagtgcacgagtgagatcaagatccagaggaagaggagatggtcaggaggctcccgatgtggttgcattcgtggctcccggtgaatctcagcaagaggaaccaccaactgacaatcaggatattgaacctggacaagagagagaaggaacacctccgatcgaagaacgtaaagtagaaggtgattgccaggaaatggatctggaaaagactcggagtgagcgtggagatggctctgatgtaaaagagaagactccacctaatcctaagcatgctaagactaaagaagcaggagatgggcagccataagttaaaaagaagacaagctgaagctacacacatggctgatgtcacattgaaaatgtgactgaaaatttgaaaattctctcaataaagtttgagttttctctgaagaagtca

SEQ ID NO: 169646 - DNA, 309 bp, Artificial Sequence
  derived and/or modified sequence
atgtccgctcgagtgagatccaggtcacggggtcgaggagatgggcaggaggcacccgacgtggtggcgtttgtcgctcctggcgaaagccagcaagaagaaccaccgaccgataaccaagacatagaacccggacaggagagggaaggcaccccacccattgaggagcggaaggtcgagggcgactgtcaagaaatggatttggagaagacccgtagcgagcgcggagacggcagcgacgtgaaagaaaagacgcctcccaatcctaagcacgctaaaactaaggaagctggtgatggccagccatag

SEQ ID NO: 169647 - DNA, 309 bp, Artificial Sequence
  derived and/or modified sequence
atgtccgcccgcgtgcggagtaggtcccgtggccggggcgacggccaggaggcccccgatgtagtggcctttgtggcgccaggagagtcccagcaggaggagcctccgacagataaccaggatatagagcccgggcaggagcgcgagggcacaccccccatagaggagaggaaggtcgaaggcgattgtcaggagatggatctcgagaagacccgttcagagagaggagatggaagcgatgtaaaagaaaaaacaccccccaacccaaaacacgcgaaaactaaagaggccggcgatggacagccatag

SEQ ID NO: 169648 - DNA, 309 bp, Artificial Sequence
  derived and/or modified sequence
atgtctgctagggtacgctcccggagcaggggaagaggagacggtcaggaagccccggatgtggtggcgtttgtggcaccaggtgagagtcagcaggaggagcccccgacggacaaccaagatattgagcccggacaggaacgggaaggcactccgcccatagaagaaaggaaggtcgagggggattgccaagaaatggacctggaaaagactaggagcgaacgcggcgacgggagtgatgtgaaggaaaagacaccaccaaacccgaagcatgccaagaccaaggaggcaggcgatggtcagccttag

SEQ ID NO: 169649 - DNA, 309 bp, Artificial Sequence
  derived and/or modified sequence
atgagcgcccgggtgcggagccggagccggggccggggcgacggccaagaagctccagacgtcgtcgccttcgtggccccaggggagtctcagcaagaagagcccccgaccgacaatcaggatattgagcccggccaagagagagaaggcactcctcccatcgaggagcggaaggtagagggcgattgtcaggaaatggatttggaaaaaactcgttcggaaaggggggacggaagcgacgtcaaagaaaagaccccaccgaacccaaaacacgcaaagacaaaggaagctggagacggccagccgtag

SEQ ID NO: 169650 - DNA, 309 bp, Artificial Sequence
  derived and/or modified sequence
atgagcgcccgggtgcggagccggagccggggccggggcgacggccaggaagctccagatgtcgtcgctttcgtggcgcctggtgaatcgcagcaggaagagcctccaacggataaccaggacattgagcccgggcaggaaagggaaggtacgccccccattgaagagcgtaaagtggagggcgattgccaggagatggatctggagaaaactcgcagcgagcggggagatggctccgacgtgaaggaaaaaactccgccgaatccaaaacacgccaagacaaaagaagctggggatgggcagccctag

SEQ ID NO: 169651 - DNA, 487 bp, Artificial Sequence
  derived and/or modified sequence
tgacactgctgaggtctaaacaaggaggcagaagtagtcttcagttcacgatcttctagttgcagcgatgagtgcacgagtgagatcaagatccagaggaagaggagatggtcaggaggctcccgatgtggttgcattcgtggctcccggtgaatctcagcaagaggaaccaccaactgacaatcaggatattgaacctggacaagagagagaaggaacacctccgatcgaagaacgtaaagtagaaggtgattgccaggaaatggatctggaaaagactcggagtgagcgtggagatggctctgatgtaaaagagaagactccacctaatcctaagcatgctaagactaaagaagcaggagatgggcagccataagttaaaaagaagacaagctgaagctacacacatggctgatgtcacattgaaaatgtgactgaaaatttgaaaattctctcaataaagtttgagttttctctgaagaagtca

SEQ ID NO: 169652 - DNA, 309 bp, Artificial Sequence
  derived and/or modified sequence
atgtcagcgcgagttcgctcacggtcgcgcggaaggggcgacggccaggaggctccagacgtggttgccttcgttgctcccggagagtcacagcaagaggaacccccaactgacaaccaggacatcgagccgggtcaggagagagagggaactcctcccatcgaagaacgtaaggtagaaggcgattgccaagaaatggatctggaaaagacccggtcagagcgcggagacggctcggatgtgaaggaaaagactcctccaaatcctaaacacgctaagaccaaagaagccggtgatggtcagccatag

SEQ ID NO: 169653 - DNA, 309 bp, Artificial Sequence
  derived and/or modified sequence
atgagcgctagagtgaggagtaggtcacggggtcgcggagatggacaggaggctcctgacgttgtcgcattcgtggcccctggagagtcacagcaggaggagcccccaaccgacaaccaggacatagagcctggccaggagcgggaaggaacccccccaatagaagagagaaaagtggaaggggactgtcaggaaatggatcttgagaagaccagatcagagcggggagacggctccgatgtcaaagagaagacccccccaaatcccaagcatgctaaaactaaagaggcaggagacggccagccatag

SEQ ID NO: 169654 - protein, 773 aa, Artificial Sequence
  derived and/or modified sequence
MIRDLSKMYPQTRHPAPHQPAQPFKFTISESCDRIKEEFQFLQAQYHSLKLECEKLASEKTEMQRHYVMYYEMSYGLNIEMHKQAEIVKRLNAICAQVIPFLSQEHQQQVVQAVERAKQVTMAELNAIIGQQLQAQHLSHGHGLPVPLTPHPSGLQPPAIPPIGSSAGLLALSSALGGQSHLPIKDEKKHHDNDHQRDRDSIKSSSVSPSASFRGAEKHRNSADYSSESKKQKTEEKEIAARYDSDGEKSDDNLVVDVSNEDPSSPRGSPAHSPRENGLDKTRLLKKDAPISPASIASSSSTPSSKSKELSLNEKSTTPVSKSNTPTPRTDAPTPGSNSTPGLRPVPGKPPGVDPLASSLRTPMAVPCPYPTPFGIVPHAGMNGELTSPGAAYAGLHNISPQMSAAAAAAAAAAAYGRSPVVGFDPHHHMRVPAIPPNLTGIPGGKPAYSFHVSADGQMQPVPFPPDALIGPGIPRHARQINTLNHGEVVCAVTISNPTRHVYTGGKGCVKVWDISHPGNKSPVSQLDCLNRDNYIRSCRLLPDGRTLIVGGEASTLSIWDLAAPTPRIKAELTSSAPACYALAISPDSKVCFSCCSDGNIAVWDLHNQTLVRQFQGHTDGASCIDISNDGTKLWTGGLDNTVRSWDLREGRQLQQHDFTSQIFSLGYCPTGEWLAVGMENSNVEVLHVTKPDKYQLHLHESCVLSLKFAHCGKWFVSTGKDNLLNAWRTPYGASIFQSKESSSVLSCDISVDDKYIVTGSGDKKATVYEVIY

SEQ ID NO: 169655 - DNA, 2322 bp, Artificial Sequence
  derived and/or modified sequence
atgatacgcgacttgagcaagatgtatccccagactcgacatcccgcccctcaccagcctgcacagccctttaagttcactatttcggagagctgcgaccgaatcaaagaggagtttcagtttctccaagcgcagtaccactccttgaaattggaatgcgaaaaattagccagcgagaaaaccgaaatgcagagacattatgtgatgtattacgagatgtcctacggtctgaacatcgaaatgcacaagcaagctgagatcgttaagaggctcaatgccatctgcgcacaggtgatccccttcctgtcccaggagcaccaacagcaggtggtacaggccgtggaaagggcaaaacaagtgacaatggcggaattgaatgctattataggtcagcagctgcaggcccagcacctgtcacatggacacgggctcccagttccccttaccccccatccctcagggcttcagcctccagcaatcccaccaattggctcctctgctggcttactggctctgtcatctgcgctgggagggcaaagtcatctcccaataaaagacgaaaagaagcaccacgacaacgaccaccagcgggaccgtgacagtattaaatcaagttcggtgagtccatctgcttctttcaggggagcagaaaagcatagaaactctgccgactacagctccgagagcaagaagcagaagaccgaggagaaggaaatcgccgccagatacgattcggacggggagaagagcgacgacaacctggtggtagacgttagtaatgaggatccctcctctcctcgggggagcccagcccacagcccccgagagaatggcctggacaagactcgactccttaagaaagatgctcccatttcccccgctagcattgccagtagtagctctactccatccagtaaatccaaagagctgtcccttaacgagaagagcactactcctgtgtccaagtccaatacacctacacctcgaaccgatgccccaacccctggctctaatagcacccccggactccggcctgtgccaggaaagccaccgggggttgatcccctggctagcagtctgagaacgccgatggccgttccttgtccctatccaacacctttcgggatcgtgcctcacgctgggatgaacggcgaactcacaagtccaggggcggcatacgccgggctgcacaacatttccccccagatgtccgccgcggccgctgcagcagccgcagccgcagcctatggtagatcccccgtggtgggattcgatccacaccatcacatgcgtgtgccagcgatcccacccaacttgaccggaatccccggcggaaagccggcctatagttttcacgtgagtgctgatggccagatgcagcctgttccatttcctcctgacgcccttatcggccccggcatccccagacatgcccggcagataaatacactcaatcacggcgaggtggtttgtgccgtgacgatctcgaatcccacacggcatgtgtatacaggaggaaagggatgcgtgaaggtgtgggacattagccatcccggaaataagtcaccagtgagccagttggattgcttaaatcgcgataactacatccggtcatgtcggctgctgcctgatggaaggacgcttatagtgggcggtgaggccagtactttgtccatctgggacctggccgcccccaccccccgaatcaaggctgaactcacgtccagtgccccggcctgctatgctcttgccatctctcctgacagtaaagtatgtttctcttgttgtagtgatggcaatatcgctgtatgggatctgcacaaccagaccctggtgcgacagttccaggggcatacagacggcgctagctgtatcgatatatccaacgacggcacaaagctttggaccgggggtcttgacaataccgtgagaagctgggatctccgagagggtaggcagttacagcaacatgatttcacctcccagatcttttcccttggatactgcccaacaggggaatggttggcagtcggaatggaaaacagtaacgtggaagtgctgcacgttactaagccggacaaataccagctgcatctccatgagagctgtgttctcagcctcaaattcgcccactgtggaaaatggttcgtcagtacaggtaaggataatcttctgaacgcctggcgcaccccatacggcgccagcatttttcaaagtaaagagagcagctccgttctgagttgcgacatttctgtggacgacaagtatatcgtgaccggtagtggggataagaaagccacagtgtacgaagtaatctattag

SEQ ID NO: 169656 - DNA, 2322 bp, Artificial Sequence
  derived and/or modified sequence
atgatccgggacctgagcaagatgtacccccagaccaggcacccagccccccaccagcctgcccagcccttcaagttcaccatcagcgagagctgtgaccgcatcaaggaggagttccagttcctgcaggcccagtaccacagcctgaagctggagtgtgagaagctggccagcgagaagacagagatgcagaggcactacgtgatgtactatgagatgtcctatggcctgaacatcgagatgcacaagcaggccgagatcgtgaagaggctgaatgccatctgtgcccaggtgatccccttcctgagccaggagcaccagcagcaggtggtgcaggccgtggagcgggccaagcaggtgaccatggccgagctgaatgccatcatcggccagcagctgcaggcccagcacctgagccacggccacggcctgcctgtgcccctgaccccccaccccagcggcctgcagcccccagccatcccccccatcggcagcagcgctggcctgctggccctgagcagcgccctgggcggccagagccacctgcccatcaaggatgagaagaagcaccacgacaatgaccaccagagggaccgggacagcatcaagagcagctctgtgagccccagcgccagcttcagaggagctgagaagcacaggaacagcgctgactacagcagcgagagcaagaagcagaagacagaggagaaggagattgctgcccgctatgacagtgatggagagaagagtgatgacaacctggtggtggatgtgtccaatgaagaccccagcagcccccggggcagccctgcccacagcccccgggagaatggcctggacaagacccggctgctgaagaaggatgcccccatcagccctgccagcatcgccagcagcagcagcacccccagcagcaagagcaaggagctgagcctgaatgagaagagcaccacccctgtgtccaagagcaacacccccacccccaggacagatgcccccaccccaggcagcaacagcaccccaggcctgcggcctgtgcctgggaagcccccaggagtggaccccctggccagcagcctgcggacccccatggctgtgccctgcccctaccccacccccttcggcatcgtgccccacgccggcatgaatggagagctgaccagccctggagctgcctatgccggcctgcacaacatcagcccccagatgtctgctgctgctgctgctgctgctgctgctgctgcctacggccgcagccctgtggtgggctttgacccccaccaccacatgagggtgcctgccatcccccccaacctgaccggcatccctgggggcaagccagcctacagcttccacgtgtctgcagatggccagatgcagcctgtgcccttccccccagatgccctgattggccctggcatccccaggcatgcccggcagatcaacaccctgaaccacggggaggtggtgtgtgctgtgaccatcagcaaccccaccaggcatgtgtacacaggaggcaagggctgtgtgaaggtgtgggacatcagccaccctggcaacaagagccctgtgtcccagctggactgcctgaacagagacaactacatccgcagctgccgcctgctgcctgatggccgcaccctgattgtgggcggggaggccagcaccctgagcatctgggacctggccgcccccaccccccgcatcaaggccgagctgaccagcagcgccccagcctgctacgccctggccatcagcccagacagcaaggtgtgcttcagctgctgcagtgatggcaacattgctgtgtgggacctgcacaaccagaccctggtgcggcagttccagggccacacagatggagccagctgcatcgacatcagcaatgatggcaccaagctgtggacaggaggcctggacaacacagtgcgctcctgggacctgcgggagggccggcagctgcagcagcacgacttcaccagccagatcttcagcctgggctactgccccactggagagtggctggccgtgggcatggagaacagcaatgtggaggtgctgcacgtgaccaagccagacaagtaccagctgcacctgcacgagagctgtgtgctgagcctgaagtttgcccactgtgggaagtggtttgtgtccacaggcaaggacaacctgctgaatgcctggaggaccccctacggggccagcatcttccagagcaaggagagcagctctgtgctgagctgtgacatctctgtggatgacaagtacatcgtgactggaagtggggacaagaaggccaccgtgtatgaagtcatctactag

SEQ ID NO: 169657 - DNA, 2322 bp, Artificial Sequence
  derived and/or modified sequence
atgatccgggacctgagcaagatgtacccccagacccggcaccccgcaccccaccagcctgcacagccatttaagtttacaatttcggagagttgcgatcggattaaggaggagttccagtttctgcaggcgcaataccactccctgaagttggagtgcgagaagctggcatcagaaaagactgagatgcaacgccattacgtcatgtactatgaaatgagctatgggctgaatatcgaaatgcacaaacaggccgagatcgtcaagaggttaaacgctatctgcgcccaggttatccctttcttatcccaggaacaccagcagcaggtggtgcaggccgtggaacgtgctaagcaggtcactatggccgagctgaacgcaatcattgggcagcagctgcaggcgcaacacctaagccatggtcacggactgcctgtgcccctcactcctcatcctagcggactacagcccccagccatacccccgatcggatccagtgccggactgctagcgttgagtagtgcgttggggggacagagtcatctgcccattaaggacgagaaaaaacaccatgacaacgatcatcaacgcgacagagatagcattaagagcagctctgtgagccccagtgcctcattcagaggagccgagaaacatagaaatagcgccgattatagcagtgagtctaagaagcagaaaaccgaggaaaaggaaattgcagcccggtatgactcagatggggaaaaatctgacgataatctggtcgttgacgtgagcaatgaagatccctcaagtccccgtggctctcccgcacacagcccaagagagaatgggctggacaaaacaagattactgaagaaagatgcaccaataagcccagccagcatcgcctcatcatcaagcacaccctccagtaagtccaaggagctgagcctgaatgagaagtccacaaccccagtgagcaagtctaatacacctaccccccgaactgatgccccaacccccggctccaactcgacaccaggtctccgcccagtccctggtaaaccccctggagttgatcccctcgccagttctctgcgcactcccatggcagtgccctgtccctatcctacgccgttcggcattgtcccgcatgccgggatgaatggagagttaaccagccccggcgccgcttatgctgggcttcacaacatatcccctcagatgtcagccgcggccgcagccgccgcagcagcagcggcatacggtcgcagtccagtggttggattcgacccgcaccatcatatgagggtacctgctattcctccaaacctaaccggaattcccggcgggaagcccgcgtatagctttcatgtttctgcagacggccaaatgcaacctgttcctttcccacccgacgccctcattggtcctggtataccaagacatgctcgccagataaatactttgaatcacggggaagtcgtttgcgccgtgactatttcgaaccccacgcggcacgtatacactggcgggaagggctgtgtgaaagtctgggatatttctcaccctggcaataaaagtcccgtctcacagctagactgtcttaaccgtgacaactatatacggtcctgtcgtctgctgcccgacggcaggactctgattgttggaggggaggcctcaacccttagcatatgggatttggcagctcccaccccccgaatcaaggcagagttgaccagctctgccccagcctgctatgcgctggcaatctcaccagattcgaaggtgtgcttcagctgttgctccgacggaaacatcgctgtttgggatttacataatcagactctggttcgccaatttcaggggcatactgacggagcctcatgcatcgacatatctaacgatggaacaaaactatggacaggcggcctggataacacagtgcggtcgtgggaccttcgcgagggccgtcagttgcagcagcatgacttcactagtcagatcttctcccttggatattgccctacaggagaatggctcgccgtaggcatggaaaactcgaacgtggaagtgttgcacgtaactaaacccgacaagtaccagctgcacctgcacgagagctgtgtgctcagtctgaagtttgcccactgtgggaagtggttcgtaagtacaggaaaggacaaccttttaaacgcttggaggactccgtatggcgcctctatttttcaaagtaaggaaagctcttccgtcctgtcctgtgatatttcggtggacgacaagtacattgtgaccgggtccggagataagaaagccaccgtctacgaagtgatctactag

SEQ ID NO: 169658 - DNA, 2322 bp, Artificial Sequence
  derived and/or modified sequence
atgattcgggacctgtcgaagatgtacccccagacgcggcaccccgcaccacaccagccagctcaaccatttaagttcacgattagcgagtcttgcgacagaatcaaggaagagttccagttcctgcaagcccagtaccactcattaaagctcgaatgcgaaaaactggcctccgagaagacagaaatgcagagacactacgtcatgtactacgaaatgagttacggtctgaatattgagatgcacaagcaggcagaaattgtgaaacggcttaatgctatctgtgcccaggttatccctttcctatctcaagaacatcagcagcaagtggtgcaggctgtcgagcgcgctaagcaggtcacaatggccgagctgaacgccatcattgggcaacagctacaagctcagcacttgtctcatggccacgggctccctgtccctctcaccccccatcccagtggcctgcagccaccagcaatcccaccaatcggcagctcagccggtctcctcgccttatcctccgcactgggcggtcagagtcacctgcctataaaggacgaaaaaaaacatcacgacaacgatcatcaacgggaccgcgactcaatcaaatctagttctgtatctcctagtgccagtttccgcggagcagagaagcatcgcaactccgctgattattcgagcgagtcgaagaaacagaaaaccgaagagaaagaaattgcagcccgttacgacagcgacggcgaaaagagcgacgacaacttagtggtggatgtctccaatgaagatccaagcagcccccgtggctcacccgctcacagtcccagagaaaatgggttagacaagacccgcctactaaagaaggacgcacccatctcacctgccagcatagcatctagtagctccaccccatccagcaaaagtaaggagctatcccttaatgagaagagtaccacccctgtgtcaaaatctaatacacctacgccacggacggacgctcccacccccggatcaaatagcacccccggactgcgcccagtacctgggaagccccctggagtcgaccctcttgcctcttctctgcggactccaatggccgtgccatgtccctaccccacaccttttgggatagtgccacacgcaggaatgaacggcgagctaacttcgccaggcgctgcctacgcgggactgcacaacatctcaccgcaaatgtcagcggctgctgccgcagccgctgccgctgccgcttatgggcgatcccccgttgtcggtttcgacccacaccatcacatgagagttccagccatcccccctaacctgacgggcatccctggcggtaagccggcttactcttttcacgtgtctgctgacggccagatgcagccagtgccctttccccctgatgccctgattggacccggaatccccagacacgctcgtcagattaacactctgaaccatggcgaagtggtatgtgctgtcactatctcaaatccaaccagacacgtgtacaccggaggcaagggttgcgtgaaagtctgggacatctcacaccccggaaacaagtccccagtgagccaactggattgtttgaaccgagataattatatccgctcctgtagactgctgccagacggcagaacgctgattgtcgggggtgaagcctccacgctctctatttgggatctggctgctccaacaccaaggatcaaggcagagctgacatcctcagcgcctgcgtgctacgcactcgccatctctcccgacagtaaggtgtgtttttcgtgctgttccgacggaaatatcgctgtgtgggacctgcataaccagacactggtgcgacagttccaggggcacaccgacggcgcaagctgtatcgacattagcaacgacggtaccaaattgtggactggaggccttgataacacagtaaggtcctgggaccttcgcgaaggtagacagctgcagcagcatgatttcactagccagatcttctcgctggggtattgccctacaggagagtggcttgccgtgggcatggagaacagcaacgttgaagtattacacgtaactaagcctgataagtaccagctgcacttgcacgagagctgcgtcttgagccttaagttcgcccattgtgggaaatggttcgtgagtacgggcaaggacaaccttctcaatgcctggaggactccatacggggcatcaatatttcagtcaaaagaatcatctagcgtgctgtcgtgcgatatctctgtggacgataagtatattgttacgggttctggggacaaaaaagctacggtgtacgaagtgatatactag

SEQ ID NO: 169659 - DNA, 2817 bp, Artificial Sequence
  derived and/or modified sequence
gttcctgccgcccgtgtcacgcgagacccggcgggggccgggaccgcccgagccgcccctcagaccgagccggccgcctccgctgccgcggccgcctcctcttcggggtcattaaagccaatgagccgcgcgcctctgccgagcgcagccaactaaatcggcttggatgattcgcgacctgagcaagatgtacccgcagaccagacacccagcaccgcatcagcctgctcaaccctttaaatttacaatttccgaatcctgtgatcggattaaggaagagtttcagtttttacaggctcaataccacagtctgaagctggaatgtgagaaactcgccagtgagaagacagagatgcagcggcattatgtcatgtattatgaaatgtcctatgggttgaatatagaaatgcacaagcaggcagagattgtcaagaggctgaatgctatctgtgcacaagtcattcctttcctgtcccaagagcaccagcaacaagtggtgcaggctgtggaacgggccaagcaggtgaccatggcagaactgaacgccatcattgggcagcaacaactccaggcccagcatttatcacatggacatggtctccccgtacctctgactccacacccttcagggctccagccccctgccattccacccatcggtagcagtgccgggcttctggccctctccagtgctctaggaggtcagtcccatcttccaattaaagatgagaagaagcaccatgacaatgatcaccaaagagacagagactccatcaagcaaaactacttgctgctcataatggatgaaattggagaccaaagaggaagaaccttctgggttcctgtcagtctaaatcctgattttaaaagacattcacctgccatgctagtgttgtgtgcttctactgagctcttcagtatccccatcagccagtttccgaggtgctgagaagcacagaaactccgcagactactcctcagagagcaaaaagcagaaaactgaagaaaaggaaattgcagctcgttatgacagcgatggtgagaaaagtgatgacaacttggtggttgacgtttccaatgaggatccatcttcccctcgagggagcccagcacattcccccagagagaatggcctagacaagacacgcctgctcaagaaagatgccccgattagtccagcctctattgcatcttccagcagtactccctcctccaaatccaaagaacttagccttaatgaaaaatctactactcccgtctcaaagtccaatacccctactccacgaactgatgcgcccaccccaggcagtaactctactcccggattgaggcctgtacctggaaaaccaccaggagttgaccctttggcctcaagcctaaggaccccaatggcagtaccttgtccatatccaactccatttgggattgtgccccatgctggaatgaacggagagctgaccagccccggagcggcctacgctgggctccacaacatctcccctcagatgagcgcagctgctgccgccgccgctgctgctgctgcctatgggagatcaccagtggtgggatttgatccacaccatcacatgcgtgtgccagcaatacctccaaacctgacaggcattccaggaggaaaaccagcatactccttccatgttagcgcagatggtcagatgcagcctgtcccttttccacccgacgccctcatcggacctggaatcccccggcatgctcgccagatcaacaccctcaaccacggggaggtggtgtgcgcggtgaccatcagcaaccccacgagacacgtgtacacgggtgggaagggctgcgtcaaggtctgggacatcagccacccaggcaataagagtcctgtctcccagctcgactgtctgaacagggataactacatccgttcctgcagattgctccctgatggtcgcaccctaattgttggaggggaagccagtactttgtccatttgggacctggcggctccaaccccacgcatcaaggcagagctgacatcctcggcccccgcctgctatgccctggccatcagccccgattccaaggtctgcttctcatgctgcagcgacggcaacatcgctgtgtgggatctgcacaaccagaccttggtgaggcaattccagggccacacagatggagccagctgtattgacatttctaatgatggcaccaagctctggacaggtggtttggacaacacggtcaggtcctgggacctgcgcgaggggcggcagctgcagcagcacgacttcacctcccagatcttttctctgggctactgcccaactggagagtggcttgcagtggggatggagaacagcaatgtggaagttttgcatgtcaccaagccagacaaataccaactacatcttcatgagagctgtgtgctgtcgctcaagtttgcccattgtggcaaatggtttgtaagcactggaaaggacaaccttctgaatgcctggagaacaccttatggggccagtatattccagtccaaagaatcctcatcggtgcttagctgtgacatctccgtggacgacaaatacattgtcactggctctggggataagaaggccacagtttatgaagttatttattaaagacaaatcttcatgcagactggacttctcctcctggtagcactttgctctgtcatcctttttgttcacccccatccccgcatctaaaaccaaggatttcagatactcattgcagttgtggagtttaatcccctttcttaacctcacttcccacttgctattgaattgtgaatagtcattaaaaacctgtgatacc

SEQ ID NO: 169660 - DNA, 3695 bp, Artificial Sequence
  derived and/or modified sequence
ggagagctcgccagagcgctcgcatggcgggccggtgattgtagtcaatctggccgtattctcaggcagggtcgcccggggcggactacatctcccgggatgctgcgcggccgccccgcggaagattgtgaatatgtatcagaatgttaatgattagctgctgctaaatttggtcaaagaagtcacctacacagagcgtgttgttagagctgtgctgagcgggtgtttgggttgttggctgctttcttccccctttctcacacacttgtatattattttgaggtggtgttcgcagagtttgaaaggagagagaattaaaaaaaaaagccgcaagcgtttcactcttttatttttataatccccttcaatttggggttaaaaaaaagacaagaaaacaggaaggaagagaaataaggaaatgagatgtggtaaaagaagctaaaaggtgccttttaaaagatcgttgctgtgaagtgaaaaaaatctccagagaaaccaaaaagcaccgccgagacctcttccgaaccaaaggagtttgtgtttgcttttagggaagaagaaagatcattcattcggaggaataacaaccaattaaaagacaaataaaaaaagtttggagtgggacgcagagcgagcgagaggagctgccggcgggcggtggggcgcggagcccgcactttcccggccgggtgagcggcggccgcggcgccgggctcggcgggtgcgcctcggcggagcgaacgtcggagcgttgccttgggagacgcgcgccggacaatgcccgcggcgggccagtgacgcccgcggggaatgcggagcggcccggcagccggcacccagccgccgccgcgcgttcctgccgcccgtgtcacgcgagacccggcgggggccgggaccgcccgagccgcccctcagaccgagccggccgcctccgctgccgcggccgcctcctcttcggggtcattaaagccaatgagccgcgcgcctctgccgagcgcagccaactaaatcggcttggatgattcgcgacctgagcaagatgtacccgcagaccagacacccagcaccgcatcagcctgctcaaccctttaaatttacaatttccgaatcctgtgatcggattaaggaagagtttcagtttttacaggctcaataccacagtctgaagctggaatgtgagaaactcgccagtgagaagacagagatgcagcggcattatgtcatgtattatgaaatgtcctatgggttgaatatagaaatgcacaagcaggcagagattgtcaagaggctgaatgctatctgtgcacaagtcattcctttcctgtcccaagagcaccagcaacaagtggtgcaggctgtggaacgggccaagcaggtgaccatggcagaactgaacgccatcattgggcaacaactccaggcccagcatttatcacatggacatggtctccccgtacctctgactccacacccttcagggctccagccccctgccattccacccatcggtagcagtgccgggcttctggccctctccagtgctctaggaggtcagtcccatcttccaattaaagatgagaagaagcaccatgacaatgatcaccaaagagacagagactccatcaagagctcttcagtatccccatcagccagtttccgaggtgctgagaagcacagaaactccgcagactactcctcagagagcaaaaagcagaaaactgaagaaaaggaaattgcagctcgttatgacagcgatggtgagaaaagtgatgacaacttggtggttgacgtttccaatgaggatccatcttcccctcgagggagcccagcacattcccccagagagaatggcctagacaagacacgcctgctcaagaaagatgccccgattagtccagcctctattgcatcttccagcagtactccctcctccaaatccaaagaacttagccttaatgaaaaatctactactcccgtctcaaagtccaatacccctactccacgaactgatgcgcccaccccaggcagtaactctactcccggattgaggcctgtacctggaaaaccaccaggagttgaccctttggcctcaagcctaaggaccccaatggcagtaccttgtccatatccaactccatttgggattgtgccccatgctggaatgaacggagagctgaccagccccggagcggcctacgctgggctccacaacatctcccctcagatgagcgcagctgctgccgccgccgctgctgctgctgcctatgggagatcaccagtggtgggatttgatccacaccatcacatgcgtgtgccagcaatacctccaaacctgacaggcattccaggaggaaaaccagcatactccttccatgttagcgcagatggtcagatgcagcctgtcccttttccacccgacgccctcatcggacctggaatcccccggcatgctcgccagatcaacaccctcaaccacggggaggtggtgtgcgcggtgaccatcagcaaccccacgagacacgtgtacacgggtgggaagggctgcgtcaaggtctgggacatcagccacccaggcaataagagtcctgtctcccagctcgactgtctgaacagggataactacatccgttcctgcagattgctccctgatggtcgcaccctaattgttggaggggaagccagtactttgtccatttgggacctggcggctccaaccccacgcatcaaggcagagctgacatcctcggcccccgcctgctatgccctggccatcagccccgattccaaggtctgcttctcatgctgcagcgacggcaacatcgctgtgtgggatctgcacaaccagaccttggtgaggcaattccagggccacacagatggagccagctgtattgacatttctaatgatggcaccaagctctggacaggtggtttggacaacacggtcaggtcctgggacctgcgcgaggggcggcagctgcagcagcacgacttcacctcccagatcttttctctgggctactgcccaactggagagtggcttgcagtggggatggagaacagcaatgtggaagttttgcatgtcaccaagccagacaaataccaactacatcttcatgagagctgtgtgctgtcgctcaagtttgcccattgtggcaaatggtttgtaagcactggaaaggacaaccttctgaatgcctggagaacaccttatggggccagtatattccagtccaaagaatcctcatcggtgcttagctgtgacatctccgtggacgacaaatacattgtcactggctctggggataagaaggccacagtttatgaagttatttattaaagacaaatcttcatgcagactggacttctcctcctggtagcactttgctctgtcatcctttttgttcacccccatccccgcatctaaaaccaaggatttcagatactcattgcagttgtggagtttaatcccctttcttaacctcacttcccacttgctattgaattgtgaatagtcattaaaaacctgtgataccaaatcttcagctgtctacttggaagaacatggaataagcatacttaacagtgaaaagaatctttaattatgtattatatctgtaatatatttattttgtttaaagaaggctttctaacaatgactgactaaataaagctgtctgctcctgcattgataa

SEQ ID NO: 169661 - DNA, 2322 bp, Artificial Sequence
  derived and/or modified sequence
atgatcagagacctgagcaagatgtacccccagaccagacaccccgccccccaccagcccgcccagcccttcaagttcaccatcagcgagagctgcgacagaatcaaggaggagttccagttcctgcaggcccagtaccacagcctgaagctggagtgcgagaagctggccagcgagaagaccgagatgcagagacactacgtgatgtactacgagatgagctacggcctgaacatcgagatgcacaagcaggccgagatcgtgaagagactgaacgccatctgcgcccaggtgatccccttcctgagccaggagcaccagcagcaggtggtgcaggccgtggagagagccaagcaggtgaccatggccgagctgaacgccatcatcggccagcagctgcaggcccagcacctgagccacggccacggcctgcccgtgcccctgaccccccaccccagcggcctgcagccccccgccatcccccccatcggcagcagcgccggcctgctggccctgagcagcgccctgggcggccagagccacctgcccatcaaggacgagaagaagcaccacgacaacgaccaccagagagacagagacagcatcaagagcagcagcgtgagccccagcgccagcttcagaggcgccgagaagcacagaaacagcgccgactacagcagcgagagcaagaagcagaagaccgaggagaaggagatcgccgccagatacgacagcgacggcgagaagagcgacgacaacctggtggtggacgtgagcaacgaggaccccagcagccccagaggcagccccgcccacagccccagagagaacggcctggacaagaccagactgctgaagaaggacgcccccatcagccccgccagcatcgccagcagcagcagcacccccagcagcaagagcaaggagctgagcctgaacgagaagagcaccacccccgtgagcaagagcaacacccccacccccagaaccgacgcccccacccccggcagcaacagcacccccggcctgagacccgtgcccggcaagccccccggcgtggaccccctggccagcagcctgagaacccccatggccgtgccctgcccctaccccacccccttcggcatcgtgccccacgccggcatgaacggcgagctgaccagccccggcgccgcctacgccggcctgcacaacatcagcccccagatgagcgccgccgccgccgccgccgccgccgccgccgcctacggcagaagccccgtggtgggcttcgacccccaccaccacatgagagtgcccgccatcccccccaacctgaccggcatccccggcggcaagcccgcctacagcttccacgtgagcgccgacggccagatgcagcccgtgcccttcccccccgacgccctgatcggccccggcatccccagacacgccagacagatcaacaccctgaaccacggcgaggtggtgtgcgccgtgaccatcagcaaccccaccagacacgtgtacaccggcggcaagggctgcgtgaaggtgtgggacatcagccaccccggcaacaagagccccgtgagccagctggactgcctgaacagagacaactacatcagaagctgcagactgctgcccgacggcagaaccctgatcgtgggcggcgaggccagcaccctgagcatctgggacctggccgcccccacccccagaatcaaggccgagctgaccagcagcgcccccgcctgctacgccctggccatcagccccgacagcaaggtgtgcttcagctgctgcagcgacggcaacatcgccgtgtgggacctgcacaaccagaccctggtgagacagttccagggccacaccgacggcgccagctgcatcgacatcagcaacgacggcaccaagctgtggaccggcggcctggacaacaccgtgagaagctgggacctgagagagggcagacagctgcagcagcacgacttcaccagccagatcttcagcctgggctactgccccaccggcgagtggctggccgtgggcatggagaacagcaacgtggaggtgctgcacgtgaccaagcccgacaagtaccagctgcacctgcacgagagctgcgtgctgagcctgaagttcgcccactgcggcaagtggttcgtgagcaccggcaaggacaacctgctgaacgcctggagaaccccctacggcgccagcatcttccagagcaaggagagcagcagcgtgctgagctgcgacatcagcgtggacgacaagtacatcgtgaccggcagcggcgacaagaaggccaccgtgtacgaggtgatctactag

SEQ ID NO: 169662 - protein, 227 aa, Artificial Sequence
  derived and/or modified sequence
MSVVPPNRSQTGWPRGVTQFGNKYIQQTKPLTLERTINLYPLTNYTFGTKEPLYEKDSSVAARFQRMREEFDKIGMRRTVEGVLIVHEHRLPHVLLLQLGTTFFKLPGGELNPGEDEVEGLKRLMTEILGRQDGVLQDWVIDDCIGNWWRPNFEPPQYPYIPAHITKPKEHKKLFLVQLQEKALFAVPKNYKLVAAPLFELYDNAPGYGPIISSLPQLLSRFNFIYN

SEQ ID NO: 169663 - protein, 105 aa, Artificial Sequence [sequence omitted]

SEQ ID NO: 169664 - DNA, 318 bp, Artificial Sequence
  derived and/or modified sequence
atgagcgtggtgccccccaacagaagccagaccggctggcccagaggcgtgacccagttcggcaacaagtacatccagcagaccaagcccctgaccctggagagaaccatcaacctgtaccccctgaccaactacaccttcggcaccaaggagcccctgtacgagaaggacagcagcgtggccgccagattccagagaatgagagaggagttcgacaagatcggcatgagaagaaccgtggagggcgtgctgatcgtgcacgagcacagactgccccacgtgctgctgctgagcagattcaacttcatctacaactag

SEQ ID NO: 169665 - DNA, 684 bp, Artificial Sequence
  derived and/or modified sequence
atgagcgttgtgcctccaaaccgctcccagacgggatggcccagaggggttacccagttcggcaataaatacatccaacaaaccaaacccctcaccctcgagcgcaccattaatctgtatcccctgaccaactacacgtttgggacaaaagaaccactgtacgagaaagactcatcagtggccgctcgctttcaacgcatgagggaagagtttgacaaaatcggtatgagacgcacggtagagggggtcttgattgtccatgagcacagattaccccacgttttgctcctacagcttggtacaacattcttcaaactccctggcggagagctcaatcccggagaggacgaagtggagggtctcaaacgcctcatgactgagattctcggcaggcaggatggggtcctgcaggattgggtaatagatgattgcatcggtaactggtggagaccaaatttcgaaccacctcagtacccatatattcccgcgcacattactaaacccaaggaacacaagaagctgttcctggttcagctgcaggaaaaggctctgttcgccgtgccgaagaattacaaactcgtggctgcccccctgtttgagctgtacgataacgctccagggtacggccctattatatcaagtctccctcagctcctgtctcgattcaacttcatttacaattag

SEQ ID NO: 169666 - DNA, 318 bp, Artificial Sequence
  derived and/or modified sequence
atgagtgtggtgccgcctaatcgaagccagactggctggccaaggggagtgactcaattcgggaacaagtatatccagcagaccaagcccctgaccctggagagaacaatcaatttatacccattgaccaattatacattcgggaccaaagaaccgctgtatgagaaggactccagtgtcgccgccagatttcaaaggatgcgggaggaatttgacaagatcggcatgaggaggacggtggaaggcgtgttgatcgttcacgaacatcggcttcctcacgtgctgttacttagccggtttaacttcatttacaactag

SEQ ID NO: 169667 - DNA, 684 bp, Artificial Sequence
  derived and/or modified sequence
atgtctgtggtgccccccaacagaagccagacaggctggccccggggcgtgacccagtttggaaacaagtacatccagcagaccaagcccctgaccctggagaggaccatcaacctgtaccccctgaccaactacaccttcggcaccaaggagcccctgtatgagaaggacagctctgtggccgcccgcttccagaggatgagggaggagtttgacaagattggcatgagaagaacagtggagggcgtgctgattgtgcatgagcaccggctgccccacgtgctgctgctgcagctgggcaccaccttcttcaagctgcctggaggagagctgaaccctggagaagatgaggtggagggcctgaagaggctgatgacagagatcctgggccggcaggatggagtgctgcaggactgggtgattgatgactgcatcggcaactggtggaggcccaactttgagcccccccagtacccctacatcccagcccacatcaccaagcccaaggagcacaagaagctgttcctggtgcagctgcaggagaaggccctgtttgctgtgcccaagaactacaagctggtggccgcccccctgtttgagctgtatgacaatgcccctggctacggccccatcatcagcagcctgccccagctgctgagccgcttcaacttcatctacaactag

SEQ ID NO: 169668 - DNA, 318 bp, Artificial Sequence
  derived and/or modified sequence
atgtctgtggtgccccccaacagaagccagacaggctggccccggggcgtgacccagtttggaaacaagtacatccagcagaccaagcccctgaccctggagaggaccatcaacctgtaccccctgaccaactacaccttcggcaccaaggagcccctgtatgagaaggacagctctgtggccgcccgcttccagaggatgagggaggagtttgacaagattggcatgagaagaacagtggagggcgtgctgattgtgcatgagcaccggctgccccacgtgctgctgctgagccgcttcaacttcatctacaactag

SEQ ID NO: 169669 - DNA, 684 bp, Artificial Sequence
  derived and/or modified sequence
atgagcgtggtgccccccaaccggagccagaccggctggccccggggagtgactcagttcggaaacaaatatattcagcagactaagccactgacattggagcgaactattaacttgtatcctcttaccaattatacttttggtaccaaagagcctctatacgaaaaagattcatcagtggcggctcgctttcagcgaatgcgagaggagttcgacaagattggcatgaggagaaccgtagaaggagttctgattgtccatgagcaccggttaccccacgtgctcctcttgcaacttgggaccactttctttaagctgccaggaggagaactcaaccccggtgaggacgaggtggaagggctaaaacggctgatgacagagattctagggaggcaggacggcgtcctccaggactgggtgattgacgattgcatcggtaactggtggaggccaaatttcgagcctccccaatacccctatattcctgctcatatcacgaaaccgaaagaacataaaaaactgttccttgtacagttgcaggagaaggccctcttcgctgtcccaaagaattacaaactggtagccgctccgctcttcgaactttacgataacgcccccggttacggccccattatctcgagcctcccacagcttctctcccggtttaatttcatatacaactag

SEQ ID NO: 169670 - DNA, 318 bp, Artificial Sequence
  derived and/or modified sequence
atgagcgtggtgccccccaaccggagccagaccggctggccccggggtgtcactcagttcggcaacaaatacattcaacagactaagcccctgacccttgagcggaccatcaacctttaccctctcacaaactacacctttgggacgaaggagcccctgtacgagaaagactcttctgtggccgcacgatttcaacggatgcgggaagaatttgataaaatcggaatgcgaaggaccgtggaaggcgtgctaatcgtgcacgagcatcggttgccccatgtgctacttctttctcgcttcaatttcatttataattag

SEQ ID NO: 169671 - DNA, 684 bp, Artificial Sequence
  derived and/or modified sequence
atgagcgtggtgccaccaaacagatctcaaaccggttggcctaggggtgtgacccaatttgggaacaaatacatacaacagaccaagcctctcaccttggaacggactattaatttgtaccctttaactaattacacctttggaactaaagaaccactatatgagaaggacagctccgtggcggcacgatttcagcgcatgcgtgaagagtttgataaaatcggaatgcgccgaacagtcgagggggtcctgatcgttcacgagcaccggctgcctcatgttctgctattgcagttaggaaccacgtttttcaagctcccaggcggagaactcaatcccggagaggatgaggtggaggggcttaagcgactgatgaccgagatcctgggcaggcaggacggcgtgctccaggactgggtgatagacgactgtattggcaactggtggagacctaacttcgagccaccccagtatccttatatacctgcccatatcacaaagcctaaggaacacaaaaaattgtttttagttcaactccaggaaaaggccctcttcgctgtgcctaagaactacaaactggtcgccgctcccctattcgagctttatgataatgctccgggatacggtcctattatttcctccctgccccagcttctatcacgcttcaatttcatctacaattag

SEQ ID NO: 169672 - DNA, 318 bp, Artificial Sequence
  derived and/or modified sequence
atgtccgttgtccccccaaatcggtcacaaaccggatggccccgtggcgtgacacagttcggcaacaaatacatccagcagacaaaaccgctgactctcgagcgcacaataaacttatatcccctgaccaactatacgttcggaacaaaagagcccctgtatgagaaagactcctccgtggcagccagatttcagcgcatgcgcgaagagttcgacaagattgggatgcggcgtacagtcgaaggcgtgctgatcgtccatgagcatcgcctaccccatgtgctgctcctaagtcgttttaatttcatctacaactag

SEQ ID NO: 169673 - DNA, 4006 bp, Artificial Sequence
  derived and/or modified sequence
gcctcctcttgcgctgtcctgttaatggcgggcagtagccgctgaggggattgcagataaccgcttcccgcacggggaaagtctaccctgcctgccactttctgctcgccgtcagcgccggagctcgccagcatgtctgtggtaccgcccaatcgctcgcagaccggctggccccggggggtcactcagttcggcaacaagtacatccagcagacgaagcccctcaccctggagcgcaccatcaacctgtaccctcttaccaattatacttttggtacaaaagagcccctctacgagaaggacagctctgttgcagccagatttcagcgcatgagggaagaatttgataaaattggaatgaggaggactgtagaaggggttctgattgtacatgagcaccggctaccccatgtgttactgttgagcaggttcaattttatttacaactgaattcctgcgcagtggagaagtaaaagaagccgcttgtctctgtgagcacagctatatacagtgtagaataaatgtggtagaaaagtttttttggttttatctcttttgcgatccctaaattgccacctttctattgtttgaatagtaaaattaatatgaagaactagatagtggtgtaaacaaatgtgataatgtttatttactttcggttctgctcatacttttttgtacaacattaaagaaaatggactttttttattttaatttctcattaaacttctaaaattcttataggtgaggatcatttttccccccaccttaggatggtgaatgttgcaacacaatgacaggtttaagtcagtcaagtttattggacccttgctttgataccattcttgggcacatactccaagattgtattagatttttgtgatgaagagcttccattacttctgaaaactatatttatctgagtgagtccaaggtgcaactcctaaatgaattgtgttgcagagaactcccagtataattcactgaccagtacattttataaccatccaggccttggtttgcaagcaacagaccttaaacatacaggaaactattaaaattggctcgatcagtagtcataggaattggtataagaagagactcatttagagctcagagttttcttcacataatgggggtattaattatttgtgctgttgcgaaattatgtgtcttattcttaaagccatggtaaaaatagggatctgtgaaggaaatttctaaaattggatgtattaggttttgaactctgagattgcacaaatattcaattaacttgaagttgtgtacatagagaagaaaatttggttttagcaaatgacagagccttcaaaaatatttttggaataatgtgaatcaaccgaaaactgggggcaaggcagaggacaggttttctcaggttaagagaaaaacgaaattttaaaaactttaaaaaatactgataaattcggatcaaatttgggggaataaaaaatattagagcaaaggagtttgctggttgtgtcattatttaatgatcaaagtatagcatgtatgccttattacagacttgttgactataggcttaatgtaaaaaggaatcttgccagatgtagctacttaaggaaaaaagggtttttaatagaaatgaacttttgattagtatggtgccagtcacagggctattttcctgaatattgggtgatgtcaaaggtatatgatacttgaggaaatcaggccaagtgtagctgagcaattaataaacactcaagtttttttagttggggtcatgtcaaaccctcacatggtggttaagtagtgactaactgtgcatgtccttcatggtaggtgagcaccagtctccatgatcaaaaatgccccagtttcctttgaaaaagccactagttctgtgaattgtccttttccctcctgcccctaacagtcctacccctctagcctacattagcatatttctcatgtaatgtattttgctggtaagctcatccattagctgcgtccttcagctattcctttagattggaggaagtggatatgaagatggattgattcagctcaccttccatgattgcttttgagggaaaagctacagtggccacatttcagatgttcacttttgcaatttgtggagggtggagagaggtagacttttgttgtgtgttttataaagtactctcagtaaggagtgtttgagttgaagagtcatctgattcgaggccactcatgttctttgtaacttaaactttgaccaagaaattcttcacttctcacttcttcacttcttcccaatatacagtaagtacgtgagccagtcatccatacactaaggcctagttgagaaaaacctttgattcaggatggctgggttactaaccttgaaatgtaagagatctggttttgaatgtaaaagttgcaacacacaaacggaagtcttaaaaactttttgctctggtcagttacaggtggatccccaataatctgtttttggttttctgatggaaataatagaattaggggaaatcaaatctggttggtaggtgtctacagtattagaagagggtataagggcactgtttaacactaagttctaatacttccagaaactgtgcattccagatctacatactaaatgctcttatcattttgaaatgggctcttgattaatagacccatattttttagtggcttctatgttgtatatttgtctaaaatgaaagctcttttgcgttctaaaactacaatatatgtcatcttattttccctgagtatccaagtatagtgcagattctatgtaaaactactaaatgacactggaatatgtttagtagattagggggaaaaactataaaggtttatacaattgtttgtagttacatttaggatggacttatccctttggagaagagtgaagtttgttttttcgccatgtgatgaagaccactgtgattttttaaaaaagtagataatacttaaaatggcgtaataattctgcacttgaatttgtactgttaacagcacatttggaagattttaaaactttttattgtcttataaatagcattcacttattattttggatatttaagggttccattaagttaacactgtatttggacaaagtgtgaccaaattagccagtctgttttcttccatgtttaattagaagtgagaggtagaagtacttcaaattcaacaggccagcaagcaatcggcttaaaattccctttcttaaatgttgtgctcttatgttctcggctttttaatgactttatttttacagtacttgttcagtcacttgagatgaaatgcttggggtagcttttccatcctcaaacttaatgtttttactagttcatagtgtttggaacagtatatgccaatcactgagactgcatcagagtttgcaattttgtatgtttcattgccaaagaaggcttagtggttgttgactgtagtataagtcagctttctgtagcataagatttgattttcccatacttacttcacttgttatacatcactgattatttgggttaaactggactcatttcaagcagtttgcttttgttcaaatcgtgatgagaaacctaatactgtaatttgatttgagccataaaacacattttaatattagcttgtattatagttattaagcttgtttttgtggaaaaaaacttactaaaacctaggtaactctagattaggccagttcaggtgtattttgtatcttagtaatggatcatatcgtaaaaatagagataagttgggaagatatattgattatgctgttctgttgagggaaaggtcatgtatttagaaatttaaacttttggttattgtgttcacatcatagtattcaagcatcatttatagtttggttttgagaacttttctggtattacgtttatggcaaatgtataaaagaaacaagttttggttatatttttatatttgtaaagtaagtttggttaaagtgatcactgttctttttttattttattgtcatttc

SEQ ID NO: 169674 - DNA, 4436 bp, Artificial Sequence
  derived and/or modified sequence
cctgccgccagaggctccgggttcacttccggcgtgcctacgcctcctcttgcgctgtcctgttaatggcgggcagtagccgctgaggggattgcagataaccgcttcccgcacggggaaagtctaccctgcctgccactttctgctcgccgtcagcgccggagctcgccagcatgtctgtggtaccgcccaatcgctcgcagaccggctggccccggggggtcactcagttcggcaacaagtacatccagcagacgaagcccctcaccctggagcgcaccatcaacctgtaccctcttaccaattatacttttggtacaaaagagcccctctacgagaaggacagctctgttgcagccagatttcagcgcatgagggaagaatttgataaaattggaatgaggaggactgtagaaggggttctgattgtacatgagcaccggctaccccatgtgttactgctgcagctgggaacaactttcttcaaactacctggtggtgaacttaacccaggagaagatgaagttgaaggactaaaacgcttaatgacagagatactgggtcgtcaggatggagttttgcaagactgggtcattgacgattgcattggtaactggtggagaccaaattttgaacctcctcagtatccatatattcctgcacatattacaaagcctaaggaacataagaagttgtttctggttcagcttcaagaaaaagccttgtttgcagtccctaaaaattacaagctggtagctgcaccattgtttgaattgtatgacaatgcaccaggatatggacccatcatttctagtctccctcagctgttgagcaggttcaattttatttacaactgaattcctgcgcagtggagaagtaaaagaagccgcttgtctctgtgagcacagctatatacagtgtagaataaatgtggtagaaaagtttttttggttttatctcttttgcgatccctaaattgccacctttctattgtttgaatagtaaaattaatatgaagaactagatagtggtgtaaacaaatgtgataatgtttatttactttcggttctgctcatacttttttgtacaacattaaagaaaatggactttttttattttaatttctcattaaacttctaaaattcttataggtgaggatcatttttccccccaccttaggatggtgaatgttgcaacacaatgacaggtttaagtcagtcaagtttattggacccttgctttgataccattcttgggcacatactccaagattgtattagatttttgtgatgaagagcttccattacttctgaaaactatatttatctgagtgagtccaaggtgcaactcctaaatgaattgtgttgcagagaactcccagtataattcactgaccagtacattttataaccatccaggccttggtttgcaagcaacagaccttaaacatacaggaaactattaaaattggctcgatcagtagtcataggaattggtataagaagagactcatttagagctcagagttttcttcacataatgggggtattaattatttgtgctgttgcgaaattatgtgtcttattcttaaagccatggtaaaaatagggatctgtgaaggaaatttctaaaattggatgtattaggttttgaactctgagattgcacaaatattcaattaacttgaagttgtgtacatagagaagaaaatttggttttagcaaatgacagagccttcaaaaatatttttggaataatgtgaatcaaccgaaaactgggggcaaggcagaggacaggttttctcaggttaagagaaaaacgaaattttaaaaactttaaaaaatactgataaattcggatcaaatttgggggaataaaaaatattagagcaaaggagtttgctggttgtgtcattatttaatgatcaaagtatagcatgtatgccttattacagacttgttgactataggcttaatgtaaaaaggaatcttgccagatgtagctacttaaggaaaaaagggtttttaatagaaatgaacttttgattagtatggtgccagtcacagggctattttcctgaatattgggtgatgtcaaaggtatatgatacttgaggaaatcaggccaagtgtagctgagcaattaataaacactcaagtttttttagttggggtcatgtcaaaccctcacatggtggttaagtagtgactaactgtgcatgtccttcatggtaggtgagcaccagtctccatgatcaaaaatgccccagtttcctttgaaaaagccactagttctgtgaattgtccttttccctcctgcccctaacagtcctacccctctagcctacattagcatatttctcatgtaatgtattttgctggtaagctcatccattagctgcgtccttcagctattcctttagattggaggaagtggatatgaagatggattgattcagctcaccttccatgattgcttttgagggaaaagctacagtggccacatttcagatgttcacttttgcaatttgtggagggtggagagaggtagacttttgttgtgtgttttataaagtactctcagtaaggagtgtttgagttgaagagtcatctgattcgaggccactcatgttctttgtaacttaaactttgaccaagaaattcttcacttctcacttcttcacttcttcccaatatacagtaagtacgtgagccagtcatccatacactaaggcctagttgagaaaaacctttgattcaggatggctgggttactaaccttgaaatgtaagagatctggttttgaatgtaaaagttgcaacacacaaacggaagtcttaaaaactttttgctctggtcagttacaggtggatccccaataatctgtttttggttttctgatggaaataatagaattaggggaaatcaaatctggttggtaggtgtctacagtattagaagagggtataagggcactgtttaacactaagttctaatacttccagaaactgtgcattccagatctacatactaaatgctcttatcattttgaaatgggctcttgattaatagacccatattttttagtggcttctatgttgtatatttgtctaaaatgaaagctcttttgcgttctaaaactacaatatatgtcatcttattttccctgagtatccaagtatagtgcagattctatgtaaaactactaaatgacactggaatatgtttagtagattagggggaaaaactataaaggtttatacaattgtttgtagttacatttaggatggacttatccctttggagaagagtgaagtttgttttttcgccatgtgatgaagaccactgtgattttttaaaaaagtagataatacttaaaatggcgtaataattctgcacttgaatttgtactgttaacagcacatttggaagattttaaaactttttattgtcttataaatagcattcacttattattttggatatttaagggttccattaagttaacactgtatttggacaaagtgtgaccaaattagccagtctgttttcttccatgtttaattagaagtgagaggtagaagtacttcaaattcaacaggccagcaagcaatcggcttaaaattccctttcttaaatgttgtgctcttatgttctcggctttttaatgactttatttttacagtacttgttcagtcacttgagatgaaatgcttggggtagcttttccatcctcaaacttaatgtttttactagttcatagtgtttggaacagtatatgccaatcactgagactgcatcagagtttgcaattttgtatgtttcattgccaaagaaggcttagtggttgttgactgtagtataagtcagctttctgtagcataagatttgattttcccatacttacttcacttgttatacatcactgattatttgggttaaactggactcatttcaagcagtttgcttttgttcaaatcgtgatgagaaacctaatactgtaatttgatttgagccataaaacacattttaatattagcttgtattatagttattaagcttgtttttgtggaaaaaaacttactaaaacctaggtaactctagattaggccagttcaggtgtattttgtatcttagtaatggatcatatcgtaaaaatagagataagttgggaagatatattgattatgctgttctgttgagggaaaggtcatgtatttagaaatttaaacttttggttattgtgttcacatcatagtattcaagcatcatttatagtttggttttgagaacttttctggtattacgtttatggcaaatgtataaaagaaacaagttttggttatatttttatatttgtaaagtaagtttggttaaagtgatcactgttctttttttattttattgtcatttcaataaaaaatatttgaaagagaa

SEQ ID NO: 169675 - DNA, 684 bp, Artificial Sequence
  derived and/or modified sequence
atgagcgtggtgccccccaacagaagccagaccggctggcccagaggcgtgacccagttcggcaacaagtacatccagcagaccaagcccctgaccctggagagaaccatcaacctgtaccccctgaccaactacaccttcggcaccaaggagcccctgtacgagaaggacagcagcgtggccgccagattccagagaatgagagaggagttcgacaagatcggcatgagaagaaccgtggagggcgtgctgatcgtgcacgagcacagactgccccacgtgctgctgctgcagctgggcaccaccttcttcaagctgcccggcggcgagctgaaccccggcgaggacgaggtggagggcctgaagagactgatgaccgagatcctgggcagacaggacggcgtgctgcaggactgggtgatcgacgactgcatcggcaactggtggagacccaacttcgagcccccccagtacccctacatccccgcccacatcaccaagcccaaggagcacaagaagctgttcctggtgcagctgcaggagaaggccctgttcgccgtgcccaagaactacaagctggtggccgcccccctgttcgagctgtacgacaacgcccccggctacggccccatcatcagcagcctgccccagctgctgagcagattcaacttcatctacaactag

SEQ ID NO: 169676 - protein, 551 aa, Artificial Sequence
  derived and/or modified sequence
MADGVDHIDIYADVGEEFNQEAEYGGHDQIDLYDDVISPSANNGDAPEDRDYMDTLPPTVGDDVGKGAAPNVVYTYTGKRIALYIGNLTWWTTDEDLTEAVHSLGVNDILEIKFFENRANGQSKGFALVGVGSEASSKKLMDLLPKRELHGQNPVVTPCNKQFLSQFEMQSRKTTQSGQMSGEGKAGPPGGSSRAAFPQGGRGRGRFPGAVPGGDRFPGPAGPGGPPPPFPAGQTPPRPPLGPPGPPGPPGPPPPGQVLPPPLAGPPNRGDRPPPPVLFPGQPFGQPPLGPLPPGPPPPVPGYGPPPGPPPPQQGPPPPPGPFPPRPPGPLGPPLTLAPPPHLPGPPPGAPPPAPHVNPAFFPPPTNSGMPTSDSRGPPPTDPYGRPPPYDRGDYGPPGREMDTARTPLSEAEFEEIMNRNRAISSSAISRAVSDASAGDYGSAIETLVTAISLIKQSKVSADDRCKVLISSLQDCLHGIESKSYGSGSRRERSRERDHSRSREKSRRHKSRSRDRHDDYYRERSRERERHRDRDRDRDRERDREREYRHR

SEQ ID NO: 169677 - protein, 478 aa, Artificial Sequence
  derived and/or modified sequence
MADGVDHIDIYADVGEEFNQEAEYGGHDQIDLYDDVISPSANNGDAPEDRDYMDTLPPTVGDDVGKGAAPNVVYTYTGKRIALYIGNLTWWTTDEDLTEAVHSLGVNDILEIKFFENRANGQSKGFALVGVGSEASSKKLMDLLPKRELHGQNPVVTPCNKQFLSQFEMQSRKTTQSGQMSGEGKAGPPGAGPPNRGDRPPPPVLFPGQPFGQPPLGPLPPGPPPPVPGYGPPPGPPPPQQGPPPPPGPFPPRPPGPLGPPLTLAPPPHLPGPPPGAPPPAPHVNPAFFPPPTNSGMPTSDSRGPPPTDPYGRPPPYDRGDYGPPGREMDTARTPLSEAEFEEIMNRNRAISSSAISRAVSDASAGDYGSAIETLVTAISLIKQSKVSADDRCKVLISSLQDCLHGIESKSYGSGSRRERSRERDHSRSREKSRRHKSRSRDRHDDYYRERSRERERHRDRDRDRDRERDREREYRHR

SEQ ID NO: 169678 - DNA, 1656 bp, Artificial Sequence
  derived and/or modified sequence
atggcagacggggtcgaccacatagacatctatgccgatgttggcgaggagttcaaccaggaggcagaatatggcggccacgaccaaattgatctctatgacgacgtgatcagtccatccgcgaataacggcgacgctcctgaggaccgagattatatggacactctgcctccaaccgtgggcgacgatgtcggcaagggagccgcacctaatgtagtgtatacttatacgggcaaacggattgcactttatattggaaacctcacctggtggacgacagatgaggatctaactgaggctgttcacagtctgggagttaacgatatactggaaattaagtttttcgagaaccgggccaacggccagagtaaggggttcgctctcgtgggggtgggaagcgaggcatcctcgaaaaagcttatggacctgcttccgaaacgggaactccatggccagaatcccgtcgtgactccttgtaataagcaatttctaagtcagttcgaaatgcaatctcgcaaaacaacacagtctggacagatgtccggagaaggcaaggctggcccacccgggggtagctcacgtgccgcgttcccgcagggtggaagaggccgaggtaggttcccgggggcggtgcccggtggagatagattccccggacccgccggaccaggcgggccccctcccccgttccctgcaggacaaacgcctccacggccacctctcggtcctccaggcccaccaggccctcccggcccacctcctcctggtcaagtgctccctccccctctcgccggacctcccaaccggggagatcggccccctccacccgtactgtttcccgggcaaccgttcggccagcccccattggggcccctgcctccagggcctccgccacctgtcccaggttacgggcctccgcctggacctcctccacctcagcagggacccccacctccccctggaccatttccccctcgaccaccaggacccctggggcctccactaactctggcaccacctccacatcttcccggccccccccctggggccccaccacccgcccctcatgtgaaccccgccttttttcccccccccactaactcagggatgccaacctccgactctcgcgggccgccaccaaccgacccatatggtcgtcctcctccgtatgaccggggagattacggccccccaggaagagagatggacacagcccgtactcccttaagcgaggcggagtttgaggagatcatgaacagaaatcgggcgattagttcatcggccatctcacgggccgtctcagatgcttctgccggtgattatggatcagctatcgagacactagtgaccgcaatatccctgataaagcagagcaaagtgagcgcagacgaccggtgtaaagttctcatcagttctctccaggactgtctccacggcattgagagcaagagttacggatcaggctctagaagagagcgaagtcgagaacgagatcacagccggtccagagaaaaatctcgtaggcataaatcccgatcacgcgaccgacatgatgactattaccgggagcgatctcgtgaaagagagaggcaccgggatcgagacagagatcgtgacagggagcgcgatcgggaacgcgaataccggcataggtag

SEQ ID NO: 169679 - DNA, 1437 bp, Artificial Sequence
  derived and/or modified sequence
atggcagacggtgtggaccatatcgacatctacgcagacgtaggggaggaattcaatcaggaggcagaatatggggggcatgatcagatcgacctgtacgatgacgtgatctcccccagcgccaacaacggcgatgctcccgaggacagagactacatggatacgctacctcctactgtcggcgatgacgttggcaaaggcgctgcacccaacgtcgtctacacctacactggcaagcgcattgccctttacattggtaacctgacttggtggacaactgacgaagatctcacagaagcagtacattctctcggtgtaaacgatattctggaaattaaattctttgagaaccgggctaacggccagtctaagggatttgctctggtgggtgtcggatcagaagctagctcaaagaaactgatggacctactcccaaaaagagagctccatggtcagaatccagtcgttaccccgtgcaataagcagttcctgagccagttcgaaatgcaatccaggaagaccactcagagtgggcagatgtctggtgagggaaaggctgggccgcctggggcaggcccacccaataggggggataggcccccacctcctgtgctctttccaggccagcctttcgggcagccgccgcttggacccctaccacctggcccgcccccccccgtacctggttacgggccacctccaggtccccctcccccccaacaagggcctcctccaccaccaggcccatttccaccacggccccctggtcctctgggccctcccctaacacttgctccacccccccatctgcccgggccacctcccggagctccacccccagcacctcacgtgaaccctgcttttttccccccacctactaactccggtatgcccacgagtgatagtcggggaccaccgccaacagacccctacgggcgaccacccccatatgatcgaggtgactacggcccacccggccgagagatggacacagctcgaaccccactgtctgaagccgaatttgaggagatcatgaaccgaaacagggctatctcttccagtgccatttctcgggccgtgagcgacgcgagtgcgggagattatggctcagccatcgagaccctggtgactgcgatctctttaataaagcagtcaaaggtttcagccgatgacagatgtaaagtgctcatctcctcattgcaagactgcctccatgggattgaatcaaaaagctatggaagcggtagccggagagagaggagcagggaaagggaccacagccgcagccgtgaaaagtccaggcgccataagtcccggtcccgagaccgtcacgatgattattacagggaacgatctcgagagagagagcgccacagagatagagacagggacagggatagagaacgtgacagagaaagggaatacagacacagatag

SEQ ID NO: 169680 - DNA, 1656 bp, Artificial Sequence
  derived and/or modified sequence
atggctgatggagtggaccacatcgacatctatgcagatgtgggggaggagttcaaccaggaggccgagtatggaggccatgaccagattgacctgtatgatgatgtgatcagccccagcgccaacaatggagatgcccctgaggaccgggactacatggacaccctgcccccaacagtgggagatgatgtgggcaagggggccgccccaaatgtggtgtacacctacacaggcaagagaattgccctgtacatcggcaacctgacctggtggaccacagatgaggacctgacagaggccgtgcacagcctgggcgtgaatgacatcctggagatcaagttctttgagaacagagccaacggccagagcaagggctttgccctggtgggcgtgggcagcgaggccagcagcaagaagctgatggacctgctgcccaagcgggagctgcacggccagaaccctgtggtgaccccctgcaacaagcagttcctgagccagtttgagatgcagagcaggaagaccacccagagcggccagatgtctggagagggcaaggccggccccccaggcggcagcagcagagctgccttcccccagggcggccggggccggggccgcttccctggagctgtgcctggaggagaccgcttccctggccctgctggccctgggggccccccaccacccttccctgctggccagaccccacccaggcctcccctgggccccccaggccccccaggccccccaggccccccacctcctggccaggtgctgcccccacccctggccggcccccccaacagaggagacaggcctcctcctcctgtgctcttccctggccagcccttcggccagccccccctgggccccctgcccccaggccccccacctcctgtgcccggctacggccccccacctggccccccaccaccccagcagggccccccacctcctcctggccccttcccccccaggcctcctggccccctgggcccccccctgaccctggcccccccaccccacctgcccggccccccacctggggcccctcctccagccccccacgtgaacccagccttcttccccccacccaccaacagcggcatgcccaccagtgacagccggggccccccacccacagacccctacggccggcccccaccctatgacagaggagactatggccccccaggccgggagatggacacagcccggacccccctgtctgaggccgagtttgaggagatcatgaacagaaacagagccatcagcagcagcgccatcagcagagctgtgtctgatgccagcgctggggactatggcagcgccatcgagaccctggtgacagccatcagcctcatcaagcagagcaaggtgtctgcagatgaccgctgcaaggtgctgatcagcagcctgcaggactgcctgcacggcatcgagagcaagagctatggcagcggcagccggcgggagaggagccgggagcgggaccacagccgcagccgggagaagagcagaagacacaagagccgcagccgggacagacatgatgactactaccgggagaggagccgggagcgggagcggcaccgggaccgggaccgggaccgggaccgggagcgggaccgggagcgggagtaccgccacaggtag

SEQ ID NO: 169681 - DNA, 1437 bp, Artificial Sequence
  derived and/or modified sequence
atggctgatggagtggaccacatcgacatctatgcagatgtgggggaggagttcaaccaggaggccgagtatggaggccatgaccagattgacctgtatgatgatgtgatcagccccagcgccaacaatggagatgcccctgaggaccgggactacatggacaccctgcccccaacagtgggagatgatgtgggcaagggggccgccccaaatgtggtgtacacctacacaggcaagagaattgccctgtacatcggcaacctgacctggtggaccacagatgaggacctgacagaggccgtgcacagcctgggcgtgaatgacatcctggagatcaagttctttgagaacagagccaacggccagagcaagggctttgccctggtgggcgtgggcagcgaggccagcagcaagaagctgatggacctgctgcccaagcgggagctgcacggccagaaccctgtggtgaccccctgcaacaagcagttcctgagccagtttgagatgcagagcaggaagaccacccagagcggccagatgtctggagagggcaaggccggccccccaggagctggcccccccaacagaggagaccggcccccacctcctgtgctcttccctggccagcccttcggccagccccccctgggccccctgcccccaggccccccacctcctgtgcccggctacggccccccacctggccccccaccaccccagcagggccccccacctcctcctggccccttccccccccggcccccaggccccctgggcccccccctgaccctggcccccccaccccacctgcccggccccccacctggggcccctcctccagcccctcatgtgaacccagccttcttccccccacccaccaacagcggcatgcccaccagtgacagccggggccccccacccacagacccctacggccggcccccaccctatgacagaggagactatggccccccaggccgggagatggacacagcccggacccccctgtctgaggccgagtttgaggagatcatgaacagaaacagagccatcagcagcagcgccatcagcagagctgtgtctgatgccagcgctggggactatggcagcgccatcgagaccctggtgacagccatcagcctcatcaagcagagcaaggtgtctgcagatgaccgctgcaaggtgctgatcagcagcctgcaggactgcctgcatggaattgagagcaagagctatggcagcggcagcagaagagagaggagccgggagcgggaccacagccgcagccgggagaagagccgccgccacaagagccgcagccgggacagacatgatgactactaccgggagaggagccgggagcgggagcggcaccgggaccgggaccgggaccgggaccgggagcgggaccgggagcgggagtaccgccacaggtag

SEQ ID NO: 169682 - DNA, 1656 bp, Artificial Sequence
  derived and/or modified sequence
atggccgacggcgtggaccacatcgacatctacgccgacgtgggcgaggagtttaatcaggaagctgaatatggtgggcacgatcaaatcgacctgtacgatgacgtgatctcaccttctgctaataatggtgacgcacccgaggacagggattatatggataccttgcctcccactgttggagatgacgtgggaaaaggggcagcccctaatgtggtctacacgtacactggaaagagaatagccctctatattgggaacctcacatggtggaccacagacgaggaccttaccgaggccgttcactccctgggagtgaatgatatacttgagattaagtttttcgaaaaccgggccaatggacaaagcaagggctttgctcttgtgggtgtcggatccgaggcatccagtaaaaaacttatggacctgctgcctaagcgcgaacttcacggccaaaacccggtagtgacaccttgcaacaagcagttcctatctcagtttgagatgcagtcccgcaaaacaacacagagtggccaaatgagcggggagggtaaggcgggaccccccggaggatctagtcgagctgcctttccgcaggggggtaggggccgcggcagattcccaggagcagtccccgggggcgaccggtttccaggcccagctggtccaggtggccccccaccaccctttcccgccgggcagacccctcccaggccccctctgggaccgccaggcccccccggcccccctggccctcctcctccgggccaagtcctccccccaccacttgcaggacctccaaacagaggagatcggcctcccccacctgtcctgtttccaggtcagccttttggacaaccccccctcggaccccttcctcctggcccgccgcccccggtgcccggctacggccccccccccggtcccccccctcctcaacagggccctccccctcccccgggaccttttcctcctagacctccaggcccccttgggccgcccctgacattggctcctccaccacaccttcccggtccaccacccggggctcccccacccgcgccccatgtaaacccggcctttttccccccacccactaactctggaatgcctacttcagattctcggggcccacctcccactgatccttacgggcgcccacctccatatgatcgcggagattatggtccccctgggcgagagatggacacggcccgcactccactatcagaggctgaattcgaggaaattatgaatagaaacagagcaatatcaagtagcgccatcagtcgtgccgtgtccgatgcttctgccggtgattacgggagcgctattgagacattggttaccgcaatatccctgattaagcaatctaaagtatccgccgatgatcgctgcaaggtacttatttcatctctgcaggactgtctgcatggaattgagtcaaaaagttacggaagtggctcccggagagagcgttctcgtgaaagggatcattcccgaagtcgtgagaagagccgccggcataaaagccgttcacgcgatcgccacgatgactattacagggagaggagccgcgaaagagagcgacaccgtgatcgtgacagggaccgagatagagaacgcgaccgcgagcgggagtaccgacaccgctag

SEQ ID NO: 169683 - DNA, 1437 bp, Artificial Sequence
  derived and/or modified sequence
atggccgacggcgtggaccacatcgacatctacgccgacgtgggcgaagaattcaatcaagaggccgagtatggggggcacgaccagatcgacctgtatgatgatgttattagcccaagcgctaacaatggcgacgcgcccgaagatcgcgattacatggacaccctgccacctaccgttggcgatgatgttggcaaaggcgcggcacccaacgttgtctacacctataccgggaagagaattgctctttatatcgggaatctgacatggtggacgactgatgaggacctaaccgaagccgtacacagtctaggtgtcaatgatatacttgagattaaattcttcgagaatagggcaaacggccagtctaagggcttcgccctcgtcggcgtcggctcagaagcctccagcaagaaactgatggacttactgcccaaacgtgagctgcacggccagaaccctgtggtgactccgtgcaataaacaattcctgagtcagtttgagatgcagagtaggaagactacgcagtcgggacagatgagtggggaaggcaaagcagggccccctggagccggccctccaaatcggggggataggccacccccccccgtgctgttccctggccagcccttcggacagccacccctgggccctttaccaccagggcctcctccaccggtgcccggttacgggcctccgccaggcccccccccaccacagcaggggcctccacctccgcccggtccattcccacccagacctccggggcccctgggccctcctctcacacttgcaccaccgccccacttgccaggcccaccacccggagccccgccccccgcgccacacgttaatccagcattctttccgccacccacaaatagcggaatgcccacatcagactcgcgtggcccacctcccactgacccttatggtcgacccccaccctacgatcggggggactacgggccgcccggccgagaaatggacaccgctcgcacaccactgtccgaagccgaatttgaggaaataatgaatcgcaaccgcgccatcagctcaagtgcgattagcagggcagtctccgatgcaagcgcaggggattatggatctgcgattgagaccctggtcactgccatttctctcataaagcagtctaaagtttctgcagacgatcggtgtaaggtcctgatttcgagccttcaggactgtcttcatggcatagagtcgaaatcctacgggtctggttctaggcgagagcgttccagggagcgtgaccattcaaggagccgcgaaaaaagcaggagacacaaatcccgaagccgcgatcgacacgacgattactatcgggagagatcacgcgagagagaaagacatagagatcgtgaccgcgatcgtgacagagaaagagatcgggagcgagagtaccggcatcgttag

SEQ ID NO: 169684 - DNA, 1656 bp, Artificial Sequence
  derived and/or modified sequence
atggccgatggtgtggaccacatagacatctatgcagatgttggggaagagtttaaccaagaagctgaatacggcggacacgaccagattgatctgtatgacgatgtgatcagtcccagtgccaataacggcgatgcaccggaagaccgcgactatatggataccttaccaccaaccgtgggtgatgatgtcggcaagggcgctgcgccaaatgtcgtttacacatataccggtaagcgcatcgccttgtatatcgggaatctcacttggtggacaactgatgaggacctcaccgaagccgtgcatagcctgggagtcaacgatatcttggaaatcaaattcttcgagaatagggctaacggacagagcaaaggcttcgcattggttggcgtagggagtgaagcatcgtctaagaaattaatggatctgctgccaaaaagggagcttcatggacagaatcccgtggttacaccttgtaataaacaatttctgtcccagtttgaaatgcagtctcgcaagaccacacagtccggccaaatgtcaggcgaaggcaaggcaggtcccccaggaggtagcagccgcgctgcattccctcagggcggaagaggaagaggaagattccctggcgcagtcccgggaggcgatcggttccccggacccgctggaccaggtggaccccctcccccttttccggctgggcagacacctccaagacccccactcgggcctccaggaccacccggtccgccagggccaccacccccaggccaggtgctaccccctccgctggccggtccaccgaataggggcgatcgtcctcctccacccgttctgtttcctggccaaccctttgggcaacctccgttgggtcccttaccacctggcccaccccctcctgtgcccggttatggaccccctcctggccctcctccccctcagcaaggcccaccgccaccgcctggtccattccccccaagaccgcctggcccactcggtcctcccctgactctcgcccctccaccacatctaccgggtccccctcctggcgcacctcctccagccccacatgtgaaccccgcatttttcccacccccaacaaattcagggatgcccacttccgacagccggggtccccctcctactgacccgtacggtaggcctcctccttatgaccgaggagactacggccctcccggacgtgaaatggatactgcacgcacaccgttgtctgaggctgaatttgaggaaatcatgaatcgaaaccgcgcaatctctagctccgccatcagtagggccgtttccgatgcctccgcgggagattatggctcagctattgaaactctggtgacggccataagcctgataaaacagtccaaagtgtccgcagacgatcgttgtaaagtgcttattagcagtcttcaagactgtctccatggcatcgagagtaagtcatatggatccggctctcgaagagaacggtctagagagagagatcatagtcgatctagagaaaaaagtaggcgccacaagtctcggagcagggacaggcatgacgattactaccgagagcgcagtcgggaacgtgagcgccacagagacagagatcgggacagggacagagagagggatagagagcgggaatacaggcatcggtag

SEQ ID NO: 169685 - DNA, 1437 bp, Artificial Sequence
  derived and/or modified sequence
atggctgacggagttgaccatattgacatatatgctgatgtgggcgaggagttcaaccaggaggccgagtacggcggacatgaccagattgacttgtatgatgacgtgatttctccttctgctaacaacggcgatgcaccagaggatagagattatatggacactctcccacctactgttggagacgatgttggaaaaggagccgcacccaatgttgtctatacctatactggcaaacggatcgctctgtatatcgggaatctaacgtggtggaccaccgacgaggaccttactgaggctgtgcactccctaggagtgaatgatatacttgaaataaagtttttcgagaacagagccaatggacaaagtaagggcttcgcactggtgggtgtgggttctgaagctagctcaaagaagttaatggatctgctgcctaagcgcgagctgcacggccagaatcccgttgtcacgccatgcaataaacaatttctcagtcagtttgagatgcagtctcgcaagaccacccagtccggtcagatgtcgggggaggggaaagccggaccacctggagccggaccccctaataggggtgacaggccgccacctccagttctgttccctggccagcccttcggacaacccccactgggccctttacccccaggccctccaccacccgtcccaggatatggccctcctcccggtccaccaccacctcagcaggggcctcccccaccacctggtcctttcccgcctcggcctcctggtccattaggccctccactcaccctcgcccctcctccacatttgccaggaccccctcctggcgcacctccccctgccccacacgtgaatccagccttttttccgcctcccacaaactccggaatgcccacgagcgactcacggggacccccacctactgacccatacggcagacctcccccttatgataggggggactacggtccccctgggagagaaatggatactgcaaggacgccactgtccgaggcagaatttgaggagataatgaatcgaaacagagctatcagcagtagcgcaatatctcgggcagtgtctgacgcttctgcaggagattacggctccgccatcgagaccctggtgactgctatcagcctgattaagcagagcaaggtgagcgcagatgacagatgcaaggtactgatttcctccttacaggattgcttgcatggaattgagtccaagagttatggctccgggtccagacgcgagcgaagcagagagcgggaccactcccgttcaagggaaaaatccaggcggcacaagagccgcagccgggatcgtcacgacgattactatcgagagcggtctcgggaacgggagcgacatagggatcgggatcgcgaccgagaccgcgagagggaccgagaacgagaataccggcacaggtag

SEQ ID NO: 169686 - DNA, 6616 bp, Artificial Sequence
  derived and/or modified sequence
ctcggaagtgacgcaagcgcccccccaccgccgctagatccgctgctgctgccgcggcgggcagacctgcaggaggcggcggcggcggcggcggccgaggctgaaggaagatggcggacggcgtggaccacatagacatttacgcggatgtcggcgaagagttcaaccaggaagctgaatatggtgggcatgatcagatagatttgtatgacgatgtcatatctccatctgcaaataatggagatgccccagaagaccgagattacatggatactctcccaccaactgttggtgatgatgtgggtaaaggagcagcaccaaatgttgtctatacatatactggaaagagaattgcattatatattggaaatctaacatggtggacaacagatgaagacttaactgaagcagttcattctttgggagtaaatgatattttggagataaaattttttgaaaatcgggcaaatggccagtcaaaggggtttgcccttgttggtgttggatctgaagcatcttcaaaaaagttaatggatctgttacctaaaagagaacttcatggtcagaatcctgttgtaactccatgcaataaacagttcctgagtcaatttgaaatgcagtccaggaaaactacacaatcaggacaaatgtctggggaaggtaaagctggtcctccaggaggcagttcccgtgcagcatttccacaaggtggtagaggacggggccgttttccaggggctgttcctggtggggacagatttcctgggccagcaggaccaggagggccacccccaccttttccagctggacagactccaccacgtccacccttaggtcctccaggcccacctggtccaccaggtcctccacctcctggtcaggttctgcctcctcctctagctgggcctcctaatcgaggagatcgccctccaccaccagttctttttcctggacaaccttttgggcagcctccattgggtccacttcctcctggccctccacctccagttccaggctacggcccccctcctggcccaccacctccacaacagggaccacctccacctccaggcccctttccacctcgtccacccggtccacttgggccaccccttacactagctcctcctccgcatcttcctggaccacctccaggtgccccaccgccagctccgcatgtgaacccagctttctttcctccaccaactaacagtggcatgcctacatcagatagccgaggtccaccaccaacagatccatatgggcgacctccaccatatgataggggtgactatggcccccctggaagggaaatggatactgcaagaacgccattgagtgaagctgaatttgaagaaatcatgaatagaaatagggcaatctcaagcagtgctatttcgagagctgtgtctgatgccagtgctggtgattatgggagtgctattgagacactggtaactgcaatttctttaattaaacaatccaaagtatctgctgatgatcgttgcaaagttcttattagttctttgcaagattgccttcatggaattgagtccaagtcttatggttctggatcaagacgtgaacgatcaagagagagggaccatagtagatcacgagaaaagagtcgacgtcataaatcccgtagtagagaccgtcatgacgattattacagagagagaagcagagaacgagagaggcaccgggatcgtgaccgagaccgtgaccgagagcgtgaccgagagcgcgaatatcgtcatcgttagaagctgaaggaagaggatcaccttccaagacaaaacagtcttcatgggggaaaaatgacgcttgtccagcagtttgcttcttgtgattgaactgaacctgtaaggattcatggataaaatgaacaggaatagatctgaataaagcaaatctgcataaatggtaaccagtagctctacttttattttttatgttgcttaactgttttatttgaaggaaacctgtgtgatttaaaaagttatagcttttgcaactttattactggttatatacatttggccattatgatgtgcaagcaattggaaaaaaagtcaagtaaatgcttgtttttgtagtagtttgttcttgttaaaaatgtttatatgataatgtctgtaaacagcatcactttgattacaatagatgtagtgttgtaataaactgtttaatggggctgatgtgtaaagctgttcaagttatttgatgtttacacctcagggaaagtcttgtgttcagcaatatctaaagataatgttactatgacaacatttttactgtcctttaaagcattgcaatagcgtttttggatatgcctcaatctaatcttgcgttcagtgaattaaacatagtaattaagtgtcttttgcccttgattttgatattagaataggtgattacatggatatttaatatttctatattctgcttttctagctgtttttacctagttagcttgtgactttgctgaatggtatgtaaacttgtaaaaatagagatttgacagacatagcaatctagtcaatgtgtaaggggtcaaaaaaacagaggttttaacacataagtaaaaacccgtacatatttgatgtgtaatgcaggttaattacaacacagatgtaccgaaacacttaattgtgaaccgctaacattgaagaaattttgacaattccgatttgatgctgcaattacttgctgtttttattgatcttatggtttatttcttaagccatagtcagtgtaaatacagccctgcagcaggtaaatgtgagtaaagagagccttatattttccaattggtataaatttttgaaggatgtgatgttcattaacattcggttgtattccccagtatttgtaatgggaaattacagataaaccgtgtctgcacagtttaaggaatactatgtatattcatgcaccgtattgattcatgctatagttacttaatcaaagatttttttcaaacctgccttacatataggcccactttaaaagcacctgactagcatgtgttcttgattgcaaaattggcagaggcagggtgtcaacttgattaggtgtttttatgggaatgtaatttgaaatcactacttcagaaatttgacttaaaattcttgagcacgttaatatgtttttaagatctgattatctttgagagatcttctgttaatacacattggttgttaaagagtacccaaattctaggacaatgcttaaagtgttaaaataccctagatactgtgttatgtgcaactgtagaaaccctccagaaatttccactgctgttcttcactttcatcttgtctgctatcaaaccacttctgacaaaattagctgttttgaattacccatatcactgccagttttattttaaaatattttgtgtttgaagtatctgtgcatgggatcgttgatgtttatcagaactgttcactttcagaaatgattttttaaagcattttgttgaaaatgcggttgcttttttaacattattttagagttgtatcaaaattttcctgttttctgtatattgttgtgtcatttcttggctttttaatattttgactacaatgccctaatgcgaagaagtatggacatataaatattacaagagaaattagttaatagtaaagggttaaaaggtaagtaaaatgtccatgaaaataaaattttctttgaacagtttaaaaatggaatcacaaaaatctaactgcacttgaaatgaaactggaaattttatactaattaaatcctttatttaccttttcatattttatcaatggaaccttttaattgctccttctatatcactcttctccttgcttggctgatctcattacatgactttcgttacagacagtgtgagtgtactagatttgtttgctgctaatccgttattttaagtgttgtcagaaggaaataacttcttggtttgaccaagtaattttgcaaagtccttctctacctgataacacgtgaatgtatagcagtaaaggtgaaaattgcaggccttgttttgttcttcatacccccttcagttgtttatgggttaatgttatttgaaaactcttcctttttttaatgtgtaaaaacaatccaaagagataaatccttgcatagacaccaaaaacagtgtctcagagaccttttcattttttccttagttaataactgtagtggatgtgaaaacaaacgagttgaattttaaaacatagcatttattagtgctatacagtcacattcctttcagccagtagtaaagttaaacagatgagtgatacagtacctgaatggtactgcttctgaggcaacactttggattgaaagtgctgcttttggttaaaggaactatgttgtggaaagcatattccagtgtaaatttgcagatgtgtgttttttttttttgtcacttttcataaggtttggagtaagttgcagtggcttttgatcatagtttagcccatttaatggtccttttacctagaatgttcttaagcagttaatgacaatttggaatacacagataacttgtagcttaagatactattttcatttaattctcctgtggagaatattgctttattttttactagtttcaggtcagttattaaaataaacatggaggttttaatgaatgttgtataatattttatagtgaaggaaaattgtggaaagggcaaagactttctctttcccttatgtatttaactgtgccaatctaaatacatactgttttatacaatgagatgcattacaagacttttctgttggagtgctctcgacattttggttttcatacctgaatgatcattgcattttctgtattttctaaaatggctccaattttgtgttttaagcttcagcttaagaggaagtttatgttctaattcttgactgagaatacagtattgagattctctgttttacagataacaactggtttttattactcattaagttcatttgcatcccgtagccctctgtaaatgtttcccctagttgtatgtacgtaaatgcacgcttatccagtgtatattagacatttttgtgctaaaatatattaagtgggatttttgtagcaaagcattctatttttctgttcttacagtgtgtgtgtgtgtgtgtgtgtgtgtgtatgcgtttttttaaccttaacttcagtttaaacactggtgtatttatttttttaagcaacttgactcttagaagccttagactgattttttcaataaatattcaaccaaaaattataaatttattaagatgtggccttacatatggcattccttgtgttcgtaatgtgagatttttgatttagataaatcaagattcaggattaaagtttcattgtaagttgaaatagaaaatgtattaaaatgtctaggcttctgggaggaagttcttatactcttctttcttggcattagaaagaagcaatatgaatttttgtgaatattctaaatattcaggcaacactgttcagattgatttaggtttgtcttaaccaatgttctttttttagaatttcaggttgtggcattcactgagtatgcagctactatggtttttgtatgggacgtataaatacttgattatatacgacagattttaatgtctttaaagacttcctgctgtattaacatattgtaatggagtcttttaaatactaggttgaatttaattgaagtcacacacatcttgaagtggtaactgcatagtaaatactaccaagagtttttttcacgtgggagtatcctaaaactctgccatgggtgtaaatgttttacattaatttcataattggacagaccctgcatttagcgaaaacattttgttttgaaagtgtgttctttttgtcgcactgttactgcgtaacacttctcaacattctgtaagttaaattattttaaaataactatggtgaattcatgtttatttttttactttgaaaattgtagtactcaggtggtatttaatgggaaaggatcctttgggtataaatcataatgtattttaaggaatgcatctataacattgataactttagccttaaaaaaaaggtctattattccttcctctgcatcccatggtatattagcaaagtagtttacagccctgtacagccttacaaagttgttttacaatttttaatggaaagcccttaacaacaacaacaaaaaattgtatcattttaccaatatccacgaattactgatcacagtttgtaaataatttgtttaatatcagaaggccaaagaaagtcttaaaattttagctattgactctatggtgacttcacaataagatttctgtgcaaaaaggtaaggtgataattgatctaatagacttttttttttttttttttgctgtccatgagaattagacttcatattagcttcaattaaaaagctcattccattttattaaaatgtttgtaattgcaattttgtgtttaatgtttactttgtctttcctttctttagcatttaggtgactgttcggcagtttgatatatggccattgtcggccttaaactgcactagtaacaagcatggtatttatcttgtattgaaaataaaacaaacttttgataaga

SEQ ID NO: 169687 - DNA, 1915 bp, Artificial Sequence
  derived and/or modified sequence
gacctgcaggaggcggcggcggcggcggcggccgaggctgaaggaagatggcggacggcgtggaccacatagacatttacgcggatgtcggcgaagagttcaaccaggaagctgaatatggtgggcatgatcagatagatttgtatgacgatgtcatatctccatctgcaaataatggagatgccccagaagaccgagattacatggatactctcccaccaactgttggtgatgatgtgggtaaaggagcagcaccaaatgttgtctatacatatactggaaagagaattgcattatatattggaaatctaacatggtggacaacagatgaagacttaactgaagcagttcattctttgggagtaaatgatattttggagataaaattttttgaaaatcgggcaaatggccagtcaaaggggtttgcccttgttggtgttggatctgaagcatcttcaaaaaagttaatggatctgttacctaaaagagaacttcatggtcagaatcctgttgtaactccatgcaataaacagttcctgagtcaatttgaaatgcagtccaggaaaactacacaatcaggacaaatgtctggggaaggtaaagctggtcctccaggagctgggcctcctaatcgaggagatcgccctccaccaccagttctttttcctggacaaccttttgggcagcctccattgggtccacttcctcctggccctccacctccagttccaggctacggcccccctcctggcccaccacctccacaacagggaccacctccacctccaggcccctttccacctcgtccacccggtccacttgggccaccccttacactagctcctcctccgcatcttcctggaccacctccaggtgccccaccgccagctccgcatgtgaacccagctttctttcctccaccaactaacagtggcatgcctacatcagatagccgaggtccaccaccaacagatccatatgggcgacctccaccatatgataggggtgactatggcccccctggaagggaaatggatactgcaagaacgccattgagtgaagctgaatttgaagaaatcatgaatagaaatagggcaatctcaagcagtgctatttcgagagctgtgtctgatgccagtgctggtgattatgggagtgctattgagacactggtaactgcaatttctttaattaaacaatccaaagtatctgctgatgatcgttgcaaagttcttattagttctttgcaagattgccttcatggaattgagtccaagtcttatggttctggatcaagacgtgaacgatcaagagagagggaccatagtagatcacgagaaaagagtcgacgtcataaatcccgtagtagagaccgtcatgacgattattacagagagagaagcagagaacgagagaggcaccgggatcgtgaccgagaccgtgaccgagagcgtgaccgagagcgcgaatatcgtcatcgttagaagctgaaggaagaggatcaccttccaagacaaaacagtcttcatgggggaaaaatgacgcttgtccagcagtttgcttcttgtgattgaactgaacctgtaaggattcatggataaaatgaacaggaatagatctgaataaagcaaatctgcataaatggtaaccagtagctctacttttattttttatgttgcttaactgttttatttgaaggaaacctgtgtgatttaaaaagttatagcttttgcaactttattactggttatatacatttggccattatgatgtgcaagcaattggaaaaaaagtcaagtaaatgcttgtttttgtagtagtttgttcttgttaaaaatgtttatatgataatgtctgtaaacagcatcactttgattacaatagatgtagtgttgtaataaactgtttaatgggg

SEQ ID NO: 169688 - DNA, 1656 bp, Artificial Sequence
  derived and/or modified sequence
atggccgacggcgtggaccacatcgacatctacgccgacgtgggcgaggagttcaaccaggaggccgagtacggcggccacgaccagatcgacctgtacgacgacgtgatcagccccagcgccaacaacggcgacgcccccgaggacagagactacatggacaccctgccccccaccgtgggcgacgacgtgggcaagggcgccgcccccaacgtggtgtacacctacaccggcaagagaatcgccctgtacatcggcaacctgacctggtggaccaccgacgaggacctgaccgaggccgtgcacagcctgggcgtgaacgacatcctggagatcaagttcttcgagaacagagccaacggccagagcaagggcttcgccctggtgggcgtgggcagcgaggccagcagcaagaagctgatggacctgctgcccaagagagagctgcacggccagaaccccgtggtgaccccctgcaacaagcagttcctgagccagttcgagatgcagagcagaaagaccacccagagcggccagatgagcggcgagggcaaggccggcccccccggcggcagcagcagagccgccttcccccagggcggcagaggcagaggcagattccccggcgccgtgcccggcggcgacagattccccggccccgccggccccggcggcccccccccccccttccccgccggccagaccccccccagaccccccctgggcccccccggcccccccggcccccccggcccccccccccccggccaggtgctgcccccccccctggccggcccccccaacagaggcgacagaccccccccccccgtgctgttccccggccagcccttcggccagccccccctgggccccctgccccccggcccccccccccccgtgcccggctacggccccccccccggccccccccccccccagcagggccccccccccccccccggccccttcccccccagaccccccggccccctgggcccccccctgaccctggccccccccccccacctgcccggccccccccccggcgcccccccccccgccccccacgtgaaccccgccttcttccccccccccaccaacagcggcatgcccaccagcgacagcagaggccccccccccaccgacccctacggcagaccccccccctacgacagaggcgactacggcccccccggcagagagatggacaccgccagaacccccctgagcgaggccgagttcgaggagatcatgaacagaaacagagccatcagcagcagcgccatcagcagagccgtgagcgacgccagcgccggcgactacggcagcgccatcgagaccctggtgaccgccatcagcctgatcaagcagagcaaggtgagcgccgacgacagatgcaaggtgctgatcagcagcctgcaggactgcctgcacggcatcgagagcaagagctacggcagcggcagcagaagagagagaagcagagagagagaccacagcagaagcagagagaagagcagaagacacaagagcagaagcagagacagacacgacgactactacagagagagaagcagagagagagagagacacagagacagagacagagacagagacagagagagagacagagagagagagtacagacacagatag

SEQ ID NO: 169689 - DNA, 1437 bp, Artificial Sequence
  derived and/or modified sequence
atggccgacggcgtggaccacatcgacatctacgccgacgtgggcgaggagttcaaccaggaggccgagtacggcggccacgaccagatcgacctgtacgacgacgtgatcagccccagcgccaacaacggcgacgcccccgaggacagagactacatggacaccctgccccccaccgtgggcgacgacgtgggcaagggcgccgcccccaacgtggtgtacacctacaccggcaagagaatcgccctgtacatcggcaacctgacctggtggaccaccgacgaggacctgaccgaggccgtgcacagcctgggcgtgaacgacatcctggagatcaagttcttcgagaacagagccaacggccagagcaagggcttcgccctggtgggcgtgggcagcgaggccagcagcaagaagctgatggacctgctgcccaagagagagctgcacggccagaaccccgtggtgaccccctgcaacaagcagttcctgagccagttcgagatgcagagcagaaagaccacccagagcggccagatgagcggcgagggcaaggccggcccccccggcgccggcccccccaacagaggcgacagaccccccccccccgtgctgttccccggccagcccttcggccagccccccctgggccccctgccccccggcccccccccccccgtgcccggctacggccccccccccggccccccccccccccagcagggccccccccccccccccggccccttcccccccagaccccccggccccctgggcccccccctgaccctggccccccccccccacctgcccggccccccccccggcgcccccccccccgccccccacgtgaaccccgccttcttccccccccccaccaacagcggcatgcccaccagcgacagcagaggccccccccccaccgacccctacggcagaccccccccctacgacagaggcgactacggcccccccggcagagagatggacaccgccagaacccccctgagcgaggccgagttcgaggagatcatgaacagaaacagagccatcagcagcagcgccatcagcagagccgtgagcgacgccagcgccggcgactacggcagcgccatcgagaccctggtgaccgccatcagcctgatcaagcagagcaaggtgagcgccgacgacagatgcaaggtgctgatcagcagcctgcaggactgcctgcacggcatcgagagcaagagctacggcagcggcagcagaagagagagaagcagagagagagaccacagcagaagcagagagaagagcagaagacacaagagcagaagcagagacagacacgacgactactacagagagagaagcagagagagagagagacacagagacagagacagagacagagacagagagagagacagagagagagagtacagacacagatag

SEQ ID NO: 169690 - protein, 199 aa, Artificial Sequence
  derived and/or modified sequence
MDGQKKNWKDKVVDLLYWRDIKKTGVVFGASLFLLLSLTVFSIVSVTAYIALALLSVTISFRIYKGVIQAIQKSDEGHPFRAYLESEVAISEELVQKYSNSALGHVNCTIKELRRLFLVDDLVDSLKFAVLMWVFTYVGALFNGLTLLILALISLFSVPVIYERHQAQIDHYLGLANKNVKDAMAKIQAKIPGLKRKAE

SEQ ID NO: 169691 - DNA, 600 bp, Artificial Sequence
  derived and/or modified sequence
atggacgggcagaaaaagaattggaaagataaagtggtggatttactatattggagagatattaagaagacaggtgttgtctttggagctagcctctttctgttgttaagtcttactgtgtttagcatagtatctgtgaccgcctatattgcattagctctgttatcggtcactatctccttcagaatttataagggtgttattcaggcgattcaaaaaagcgatgagggccatccttttagggcttacttagagagtgaggtggcaatctctgaagaactcgtgcagaaatattcaaatagcgccctgggtcatgtcaattgcaccataaaggaattacgtaggctgtttctggtcgatgatttggttgattcactgaaattcgcagtgctcatgtgggtttttacctatgttggcgcactgttcaacggcctgacgctcctcatcctggcactaatctccctgttctccgtgccagtcatctacgagaggcatcaagcacagatcgatcactacctgggcctcgcaaacaagaatgtaaaagacgctatggccaaaattcaggccaagattcctggacttaaaaggaaagcagagtag

SEQ ID NO: 169692 - DNA, 600 bp, Artificial Sequence
  derived and/or modified sequence
atggatggccagaagaagaactggaaggacaaggtggtggacctgctgtactggagggacatcaagaagacaggagtggtgtttggagccagcctcttcctgctgctgagcctgactgtgttcagcatcgtgtctgtgacagcctacatcgccctggccctgctgtctgtgaccatctccttccgcatctacaagggcgtcatccaggccatccagaagagtgatgagggccaccccttccgggcctacctggagagcgaggtggccatcagcgaggagctggtgcagaagtacagcaacagcgccctgggccacgtgaactgcaccatcaaggagctgcggcggctcttcctggtggatgacctggtggacagcctgaagtttgctgtgctgatgtgggtgttcacctacgtgggcgccctcttcaacggcctgaccctgctgatcctggccctgatcagcctcttctctgtgcctgtgatctatgaaagacaccaggcccagattgaccactacctgggcctggccaacaagaatgtgaaggatgccatggccaagatccaggccaagatccctggcctgaagaggaaggccgagtag

SEQ ID NO: 169693 - DNA, 600 bp, Artificial Sequence
  derived and/or modified sequence
atggacggccagaagaagaactggaaggacaaggtggtggacctgttgtactggcgagacattaaaaagaccggtgtcgtgtttggtgcgagtctcttcttattgttatcgctcacagttttttctatcgtctctgttacagcatatatcgcgctcgccctgctgtctgtcactatatccttcaggatatataaaggagttatacaggcaattcagaagagcgacgaaggacacccctttcgcgcatacttggagtctgaggtggctattagtgaggaactcgttcaaaaatactcgaattcggcattaggacacgtgaattgtaccattaaagaattgcggagactgttcctggttgacgacttagtcgacagtttaaagttcgctgtactgatgtgggtctttacgtacgttggtgcactgtttaacgggttaaccctgctgatccttgccctgattagtctgttttctgttcccgtgatttatgagagacatcaggcccagatcgatcattacctgggcctcgccaacaagaatgtgaaggatgccatggcgaagatacaggccaagatcccggggctcaaaagaaaagctgaatag

SEQ ID NO: 169694 - DNA, 600 bp, Artificial Sequence
  derived and/or modified sequence
atggacggacagaagaagaattggaaggataaggtggtggacctcctgtattggcgcgatattaagaagaccggggttgtctttggtgcaagtttgttcctgcttctttcacttaccgtgttctccatagtgtccgtcaccgcttacattgcactggctttgttaagcgttaccatctcgtttcgtatatataaaggcgtaatccaggccatccagaaatccgacgaggggcacccctttcgcgcatacctcgagtctgaggttgccatctcagaagaactcgtgcagaagtacagcaactctgcccttggacacgttaattgcacaatcaaagaactgcgcaggctctttttggtcgatgatctcgtggattccctgaagtttgcagtcctcatgtgggtgttcacttacgttggggctctatttaacgggttaaccttactgatcctggcgctgatatccttgttctcagtgcccgttatttatgagcgccatcaggcgcagatcgatcattacctcgggctggccaacaagaatgtaaaggacgcaatggctaagatccaggccaagattcctggcctcaagcgaaaggcagaatag

SEQ ID NO: 169695 - DNA, 1896 bp, Artificial Sequence
  derived and/or modified sequence
tcttttggtagcctgccctctccctgcaaatgcagctccatttggtatgagcaacaaggcaaatgcctaaaacaatcaacagatagaaggaaagcattaatgctggagtattagtagcctagttacagattgcactgcgtcagactgttccacacccagaagacgtcaggtgacttcagtcctgctgcagttgtgcagcagaggagactgcagacttcggttgaggaaacgggtatttcatgtctcagggagtaggtttgtgcagttacagcttttctgttggtatgcataattaataattggagctgcaaagcagatcgtgacaagagatggacggtcagaagaaaaattggaaggacaaggttgttgacctcctgtactggagagacattaagaagactggagtggtgtttggtgccagcctattcctgctgctttcattgacagtattcagcattgtgagcgtaacagcctacattgccttggccctgctctctgtgaccatcagctttaggatatacaagggtgtgatccaagctatccagaaatcagatgaaggccacccattcagggcatatctggaatctgaagttgctatatctgaggagttggttcagaagtacagtaattctgctcttggtcatgtgaactgcacgataaaggaactcaggcgcctcttcttagttgatgatttagttgattctctgaagtttgcagtgttgatgtgggtatttacctatgttggtgccttgtttaatggtctgacactactgattttggctctcatttcactcttcagtgttcctgttatttatgaacggcatcaggcacagatagatcattatctaggacttgcaaataagaatgttaaagatgctatggctaaaatccaagcaaaaatccctggattgaagcgcaaagctgaatgaaaacgcccaaaataattagtaggagttcatctttaaaggggatattcatttgattatacgggggagggtcagggaagaacgaaccttgacgttgcagtgcagtttcacagatcgttgttagatctttatttttagccatgcactgttgtgaggaaaaattacctgtcttgactgccatgtgttcatcatcttaagtattgtaagctgctatgtatggatttaaaccgtaatcatatctttttcctatctatctgaggcactggtggaataaaaaacctgtatattttactttgttgcagatagtcttgccgcatcttggcaagttgcagagatggtggagctagaaaaaaaaaaaaaaaagcccttttcagtttgtgcactgtgtatggtccgtgtagattgatgcagattttctgaaatgaaatgtttgtttagacgagatcataccggtaaagcaggaatgacaaagcttgcttttctggtatgttctaggtgtattgtgacttttactgttatattaattgccaatataagtaaatatagattatatatgtatagtgtttcacaaagcttagacctttaccttccagccaccccacagtgcttgatatttcagagtcagtcattggttatacatgtgtagttccaaagcacataagctagaagaagaaatatttctaggagcactaccatctgttttcaacatgaaatgccacacacatagaactccaacatcaatttcattgcacagactgactgtagttaattttgtcacagaatctatggactgaatctaatgcttccaaaaatgttgtttgtttgcaaatatcaaacattgttatgcaagaaattattaattacaaaatgaagatttataccattgtggtttaagctgtactgaactaaatctgtggaatgcattgtgaactgtaaaagcaaagtatcaataaagcttatagacttaaaa

SEQ ID NO: 169696 - DNA, 600 bp, Artificial Sequence
  derived and/or modified sequence
atggacggccagaagaagaactggaaggacaaggtggtggacctgctgtactggagagacatcaagaagaccggcgtggtgttcggcgccagcctgttcctgctgctgagcctgaccgtgttcagcatcgtgagcgtgaccgcctacatcgccctggccctgctgagcgtgaccatcagcttcagaatctacaagggcgtgatccaggccatccagaagagcgacgagggccaccccttcagagcctacctggagagcgaggtggccatcagcgaggagctggtgcagaagtacagcaacagcgccctgggccacgtgaactgcaccatcaaggagctgagaagactgttcctggtggacgacctggtggacagcctgaagttcgccgtgctgatgtgggtgttcacctacgtgggcgccctgttcaacggcctgaccctgctgatcctggccctgatcagcctgttcagcgtgcccgtgatctacgagagacaccaggcccagatcgaccactacctgggcctggccaacaagaacgtgaaggacgccatggccaagatccaggccaagatccccggcctgaagagaaaggccgagtag

SEQ ID NO: 169697 - protein, 599 aa, Artificial Sequence
  derived and/or modified sequence
MDVHDLFRRLGAGAKFDTRRFSADAARFQIGKRKYDFDSSEVLQGLDFFGNKKSVPGVCGASQTHQKPQNGEKKEESLTERKREQSKKKRKTMTSEIASQEEGATIQWMSSVEAKIEDKKVQRESKLTSGKLENLRKEKINFLRNKHKIHVQGTDLPDPIATFQQLDQEYKINSRLLQNILDAGFQMPTPIQMQAIPVMLHGRELLASAPTGSGKTLAFSIPILMQLKQPANKGFRALIISPTRELASQIHRELIKISEGTGFRIHMIHKAAVAAKKFGPKSSKKFDILVTTPNRLIYLLKQDPPGIDLASVEWLVVDESDKLFEDGKTGFRDQLASIFLACTSHKVRRAMFSATFAYDVEQWCKLNLDNVISVSIGARNSAVETVEQELLFVGSETGKLLAMRELVKKGFNPPVLVFVQSIERAKELFHELIYEGINVDVIHAERTQQQRDNTVHSFRAGKIWVLICTALLARGIDFKGVNLVINYDFPTSSVEYIHRIGRTGRAGNKGKAITFFTEDDKPLLRSVANVIQQAGCPVPEYIKGFQKLLSKQKKKMIKKPLERESISTTPKCFLEKAKDKQKKVTGQNSKKKVALEDKS

SEQ ID NO: 169698 - protein, 491 aa, Artificial Sequence
  derived and/or modified sequence
MSSVEAKIEDKKVQRESKLTSGKLENLRKEKINFLRNKHKIHVQGTDLPDPIATFQQLDQEYKINSRLLQNILDAGFQMPTPIQMQAIPVMLHGRELLASAPTGSGKTLAFSIPILMQLKQPANKGFRALIISPTRELASQIHRELIKISEGTGFRIHMIHKAAVAAKKFGPKSSKKFDILVTTPNRLIYLLKQDPPGIDLASVEWLVVDESDKLFEDGKTGFRDQLASIFLACTSHKVRRAMFSATFAYDVEQWCKLNLDNVISVSIGARNSAVETVEQELLFVGSETGKLLAMRELVKKGFNPPVLVFVQSIERAKELFHELIYEGINVDVIHAERTQQQRDNTVHSFRAGKIWVLICTALLARGIDFKGVNLVINYDFPTSSVEYIHRIGRTGRAGNKGKAITFFTEDDKPLLRSVANVIQQAGCPVPEYIKGFQKLLSKQKKKMIKKPLERESISTTPKCFLEKAKDKQKKVTGQNSKKKVALEDKS

SEQ ID NO: 169699 - DNA, 1800 bp, Artificial Sequence
  derived and/or modified sequence
atggatgttcatgaccttttccgccgcctgggcgccggagccaaattcgatacaagacgtttttctgccgacgcagccagatttcagattggtaagaggaaatatgacttcgacagctcagaggtgctgcaggggcttgatttcttcggaaataagaaatcagtgcctggcgtgtgcggagcttctcagacacaccagaaaccacagaatggtgaaaaaaaggaagagtctctcaccgaacggaagagagagcagagcaaaaaaaaaagaaagaccatgacatccgagatagcatcccaggaagaaggtgccactatccagtggatgtcttctgtggaggcaaaaattgaggacaagaaggttcagagggagagcaagctgacaagcggaaagctcgagaacctgagaaaggaaaaaattaatttcctgcggaataagcataagatacatgtccagggtacggatctcccggatcctattgccacttttcaacagctggaccaggagtacaaaatcaactctagactgcttcagaatattctcgatgctggcttccaaatgccaacacctattcaaatgcaggcgatccctgtaatgctccatgggcgagagctgctagcctcagcacccactggttccgggaagacactggctttttccattccaatcctgatgcaactcaagcaacctgctaacaagggatttagggctttgataatatcccccacacgggagctggcaagtcagatccacagggagctcataaagatttctgaaggtacggggttccgtatccacatgattcacaaggcagcagtcgccgcgaaaaagtttggcccgaagtcttcgaagaagttcgacatcttagtgaccacaccaaataggctgatctaccttcttaaacaagatccgcccggcattgacttagcaagtgtcgaatggctggtggtcgatgaatcggataagctctttgaggatggtaagaccgggtttagggatcaactggcctctatttttctggcatgcactagtcacaaggtccgaagggcaatgttctccgcaacattcgcctacgatgttgagcagtggtgtaagctgaaccttgataatgtgataagtgtatcaattggcgcccgcaacagcgctgtggagacggttgaacaggagctcctgttcgttggctctgaaactggcaagctgcttgctatgcgagaacttgtcaagaagggattcaaccctccggtcttggtgttcgtacagtcaattgagcgggccaaggagctgttccatgaactgatctacgaaggtatcaacgtggatgtaattcatgccgagaggactcagcagcaaagagataatacagtacactcgttcagagccggcaaaatctgggtgttaatctgcaccgcactcttagccagaggaatcgactttaaaggggtcaacctggtgattaattacgacttcccgacctcaagcgtggaatacatccaccggattgggaggactggtagagccggaaacaagggaaaagcaatcactttctttaccgaggatgacaagcccctgctgaggagcgtagcgaacgtgattcagcaggccggatgtcctgtgcctgaatacattaaagggtttcagaaattgctcagcaaacagaagaagaagatgatcaaaaagcccttagaacgggaatctatctccactaccccgaagtgctttttagagaaagctaaggacaagcaaaagaaagtaacagggcagaatagcaagaaaaaggtcgctttagaagacaagtcctag

SEQ ID NO: 169700 - DNA, 1476 bp, Artificial Sequence
  derived and/or modified sequence
atgtcaagcgttgaagctaaaatcgaagataagaaagtgcagcgtgagtcaaaacttacttcgggaaagttggagaacctgaggaaagagaagattaactttctgagaaataaacacaagatccacgtccaggggaccgacctaccagaccccatcgcaacgttccagcagctcgaccaggaatataaaattaattcacggctgctacagaatatactggacgctggatttcagatgcctacacccattcagatgcaggccattcccgttatgttgcatgggcgtgaattgctagcgtcagctcccactgggagtgggaagacacttgctttcagcatcccaattcttatgcaactgaaacaacctgctaataaaggattccgcgcactgatcatttcgcccaccagggaactggcgagccagatccaccgggagctaatcaaaatctccgaggggaccggttttcgtattcacatgattcataaagcagctgtggccgccaaaaagttcggacccaagtcctcgaagaaattcgatatactggtgaccactcctaaccggctcatctacctcctgaagcaggatccgccgggaattgacctagccagcgtggaatggttggtggtggatgagtcggataaactcttcgaggacggcaagactggctttagagaccagttggcatccatatttctcgcatgtactagccataaagtaaggcgggcgatgtttagcgcgaccttcgcctatgacgttgagcagtggtgtaagcttaatctggacaatgtcatttccgtcagcatcggtgccaggaatagcgcagtggaaaccgtagaacaagaactcctttttgtcggatctgagactgggaagcttctcgcgatgcgagagctcgtgaagaagggcttcaaccctccggttttggtttttgtgcaatctattgagagggcaaaggaactcttccacgaacttatctatgagggaatcaacgtagacgttatccatgctgaaaggacgcaacagcagagggacaatacggtgcactcttttcgtgccggaaagatctgggtcctgatctgcacagccttattggcccgggggatcgatttcaaaggtgtcaatctggtgatcaactacgacttccctacatcatctgttgaatatatacatcgtataggaagaacagggagagccgggaataagggaaaagccattacattttttacagaagacgataagcctctcctgaggtccgtggccaatgttatccagcaagccggctgtccggttccagagtatatcaaggggttccagaaactgctcagcaaacagaagaagaagatgatcaagaagcctttggagagggaatccatctctacaacccccaaatgttttctcgagaaggctaaagacaagcagaaaaaagtgacggggcagaactcaaagaaaaaagtcgcactggaggataagtcttag

SEQ ID NO: 169701 - DNA, 1800 bp, Artificial Sequence
  derived and/or modified sequence
atggatgtgcatgacctcttccggcggctgggcgctggggccaagtttgacacccggcgcttcagcgcagatgctgcccgcttccagatcggcaagaggaaatatgactttgacagcagcgaggtgctgcagggcctggacttctttggaaacaagaagtctgtgcctggggtgtgtggggccagccagacccaccagaagccccagaatggagagaagaaggaggagagcctgacagagaggaagcgggagcagagcaagaagaagaggaagaccatgaccagcgagatcgccagccaggaggagggcgccaccatccagtggatgagctctgtggaggccaagattgaggacaagaaggtgcagcgggagagcaagctgaccagcggcaagctggagaacctgaggaaggagaagatcaacttcctgaggaacaagcacaagatccacgtgcagggcacagacctgcctgaccccatcgccaccttccagcagctggaccaggagtacaagatcaacagccggctgctgcagaacatcctggatgctggcttccagatgcccacccccatccagatgcaggccatccctgtgatgctgcacggccgggagctgctggccagcgcccccactggaagtggcaagaccctggccttcagcatccccatcctgatgcagctgaagcagcctgccaacaagggcttccgggccctgatcatcagccccacccgggagctggccagccagatccaccgggagctgatcaagatcagcgagggcaccggcttccgcatccacatgatccacaaggctgctgtggccgccaagaagtttggccccaagagcagcaagaagtttgacatcctggtgaccacccccaacagactcatctacctgctgaagcaggaccccccaggcatcgacctggcctctgtggagtggctggtggtggatgaaagtgacaagctgtttgaagatggcaagacaggcttccgggaccagctggccagcatcttcctggcctgcaccagccacaaggtgcggcgggccatgttttctgccacctttgcctatgatgtggagcagtggtgcaagctgaacctggacaacgtcatctctgtgtccatcggggccagaaattctgctgtggagaccgtggagcaggagctgctgtttgtgggcagcgagaccgggaagctgctggccatgagggagctggtgaagaagggcttcaacccccctgtgctggtgtttgtgcagagcattgaaagagccaaggagctgttccacgagctgatctatgagggcatcaacgtggatgtgattcatgctgagaggacccagcagcagagggacaacacagtgcacagcttccgggccggcaagatctgggtgctgatctgcacagccctgctggcccggggcatcgacttcaagggcgtgaacctggtgatcaactatgacttccccaccagctctgtggagtacatccaccgcatcggccgcacaggccgggccggcaacaagggcaaggccatcaccttcttcacagaagatgacaagcccctgctgcggtctgtggccaacgtcatccagcaggccggctgccctgtgcctgagtacatcaagggcttccagaagctgctgagcaagcagaagaagaagatgatcaagaagcccctggagcgggagagcatcagcaccacccccaagtgcttcctggagaaggccaaggacaagcagaagaaggtgacaggccagaacagcaagaagaaggtggccctggaggacaagagctag

SEQ ID NO: 169702 - DNA, 1476 bp, Artificial Sequence
  derived and/or modified sequence
atgagctctgtggaggccaagattgaggacaagaaggtgcagcgggagagcaagctgaccagcggcaagctggagaacctgaggaaggagaagatcaacttcctgaggaacaagcacaagatccacgtgcagggcacagacctgcctgaccccatcgccaccttccagcagctggaccaggagtacaagatcaacagccggctgctgcagaacatcctggatgctggcttccagatgcccacccccatccagatgcaggccatccctgtgatgctgcacggccgggagctgctggccagcgcccccactggaagtggcaagaccctggccttcagcatccccatcctgatgcagctgaagcagcctgccaacaagggcttccgggccctgatcatcagccccacccgggagctggccagccagatccaccgggagctgatcaagatcagcgagggcaccggcttccgcatccacatgatccacaaggctgctgtggccgccaagaagtttggccccaagagcagcaagaagtttgacatcctggtgaccacccccaacagactcatctacctgctgaagcaggaccccccaggcatcgacctggcctctgtggagtggctggtggtggatgaaagtgacaagctgtttgaagatggcaagacaggcttccgggaccagctggccagcatcttcctggcctgcaccagccacaaggtgcggcgggccatgttttctgccacctttgcctatgatgtggagcagtggtgcaagctgaacctggacaacgtcatctctgtgtccatcggggccagaaattctgctgtggagaccgtggagcaggagctgctgtttgtgggcagcgagaccgggaagctgctggccatgagggagctggtgaagaagggcttcaacccccctgtgctggtgtttgtgcagagcattgaaagagccaaggagctgttccacgagctgatctatgagggcatcaacgtggatgtgattcatgctgagaggacccagcagcagagggacaacacagtgcacagcttccgggccggcaagatctgggtgctgatctgcacagccctgctggcccggggcatcgacttcaagggcgtgaacctggtgatcaactatgacttccccaccagctctgtggagtacatccaccgcatcggccgcacaggccgggccggcaacaagggcaaggccatcaccttcttcacagaagatgacaagcccctgctgcggtctgtggccaacgtcatccagcaggccggctgccctgtgcctgagtacatcaagggcttccagaagctgctgagcaagcagaagaagaagatgatcaagaagcccctggagcgggagagcatcagcaccacccccaagtgcttcctggagaaggccaaggacaagcagaagaaggtgacaggccagaacagcaagaagaaggtggccctggaggacaagagctag

SEQ ID NO: 169703 - DNA, 1800 bp, Artificial Sequence
  derived and/or modified sequence
atggacgtgcacgacctgttccggcggctgggcgccggcgccaagttcgatacaagacgcttctcggcggacgccgccaggttccagatcggaaaaaggaagtacgacttcgattctagcgaggtcttgcagggcttagacttcttcgggaacaaaaagagtgtgccaggtgtttgtggcgcctctcagactcaccaaaaaccccagaacggcgagaaaaaagaagaatctctgacagagcgtaagcgcgaacagagcaaaaagaaacgaaaaacgatgactagtgagatcgcatctcaggaagaaggcgcaactattcagtggatgagctctgttgaggccaagattgaggacaaaaaagttcagcgagaaagtaaactgacgagcggaaaactcgagaacctccgcaaagaaaaaatcaacttccttaggaataagcataaaatccacgtccagggcacagatctgcccgatccaattgccacttttcagcaattagatcaggaatacaaaataaacagccggctccttcagaacattctggacgctggcttccaaatgcctactcccatccagatgcaggccattcccgtgatgctgcatggtcgcgagctcttggcttccgctccgacagggtcaggaaagacactggccttcagcatcccaatattgatgcagctgaaacagccagctaacaagggttttcgcgcactgatcatatcccccactagagaactggcatcacaaatacatcgggagctgatcaaaattagcgaaggaaccggttttcgcatccatatgatacataaagccgcagtggctgctaaaaaatttggccccaagagctcgaaaaagttcgatattctggtgaccacacccaacaggttgatctacctgctgaaacaggaccctcctgggatagatttggctagtgtggaatggctcgtggttgatgagtctgacaagctttttgaagatggaaaaaccgggtttagggaccaactcgccagcatcttcctggcctgtacatcccataaggttagacgagcaatgttttctgcgacatttgcctatgacgttgagcagtggtgcaagctgaacctggacaacgtaatctccgtgagtattggcgcccgaaatagtgctgtcgagacagtcgaacaggaactcttgtttgtgggctctgagaccgggaagctcctggctatgagggagttagtgaaaaaggggttcaacccgccagtcctagtgtttgtccagtcaatcgaaagagcgaaagaactgttccacgaactaatttacgaagggataaatgtggacgttatccacgccgagcgcacccaacagcagcgcgataataccgttcatagtttccgtgccggaaaaatttgggtcctaatttgtacagctctcttggctaggggcatcgacttcaaaggcgtcaaccttgtgattaattatgattttcccacaagctccgtcgagtacatacatcggattggacggacgggcagagctgggaataaggggaaagctattacctttttcacagaggatgacaaacccctgctgcggtctgttgccaatgtgatccagcaggcaggttgccccgtgcctgagtacattaagggattccagaagctgctgagtaaacagaagaagaaaatgattaaaaaacccttggaaagagaaagcatctccacaaccccgaaatgtttcctggagaaggccaaggataagcagaagaaggtcaccggccagaattccaaaaagaaggttgctctcgaggataaatcgtag

SEQ ID NO: 169704 - DNA, 1476 bp, Artificial Sequence
  derived and/or modified sequence
atgagcagcgtggaggccaagatcgaggacaagaaggtgcagcgggagagtaagctcacgagtggaaagctagagaacctgcgcaaggaaaaaatcaatttcctgcggaacaagcacaagatccatgttcagggcactgacctgccggatcctatcgcgacctttcagcagcttgatcaagaatataagatcaacagccggctgctgcagaatatcctggacgccggcttccagatgcctactcctattcagatgcaagccattccggtgatgctgcacggacgagagctgctggcttctgccccaaccgggagtggaaaaaccctggctttttccataccaattctcatgcagctgaaacagccagcaaacaaaggtttcagggcgctcatcatctctcccacgcgggaattggcctcacagatacatagagaactgattaaaatctccgagggaacaggttttcggattcatatgatccataaagcggccgtggctgctaagaaatttgggcccaagagtagcaaaaaattcgatattcttgtcaccacaccaaacagactcatctacctgttaaagcaagaccctccaggaatagacctcgcgtctgttgagtggttggtggtagacgagtcagacaaactcttcgaggatggtaagacaggtttcagagaccaactcgcctctattttcctcgcatgtacgagccataaagttcgacgagcgatgtttagtgccacttttgcatacgacgtcgaacagtggtgcaaattaaacttggataacgtgatatctgtgtcgatcggcgcgcggaactcagctgtggagaccgttgagcaagaacttctttttgttggctctgagacaggcaagctgctagccatgcgtgagctggtcaagaagggcttcaacccgccagtgctcgtttttgtgcaaagcatcgagagagcaaaagagctgtttcacgagctcatctatgaaggtattaatgttgacgttatccacgctgagcgcacccagcagcagagagacaacaccgtgcactcattcagagcgggaaagatttgggtcctgatctgtaccgccttactcgcaaggggaatagactttaagggggtcaatctggtgattaattacgattttccgactagctcggttgaatacattcaccggataggacggacaggccgagctgggaataaggggaaagccattacatttttcacagaagacgataagccgctgctgagaagcgtggctaatgtgatacagcaggctggatgtccagttcctgagtacattaagggcttccagaagctgctgagtaagcagaagaagaaaatgattaagaaacctctcgagagggagtccatctctactacaccgaaatgcttccttgagaaggctaaggataagcagaaaaaggtgactgggcaaaattctaaaaagaaggtcgccttggaagataagagctag

SEQ ID NO: 169705 - DNA, 1800 bp, Artificial Sequence
  derived and/or modified sequence
atggacgtccatgatctctttcggaggctgggagccggtgccaagtttgacacccgccgattttccgctgatgctgcacggttccagattggcaagcggaagtatgacttcgactcatcagaggtgctgcaggggttggatttctttggaaataaaaagagcgtgcctggggtctgcggtgcttctcagacacaccagaaaccgcaaaatggcgagaagaaggaggaatccctgactgagcggaaaagagaacaaagcaagaagaaaagaaagacgatgactagcgagatcgctagtcaggaggagggcgcaaccattcaatggatgagcagcgtcgaagcaaagattgaagacaaaaaggtgcagcgggagtccaaactgacgagcggtaagcttgagaatctgagaaaggaaaagattaattttctgcgcaacaaacataagattcatgtgcagggtactgatctgccggatcctatcgctacctttcagcagctggaccaggagtacaagattaatagccgacttctgcagaacatcctggatgctggtttccagatgcccacccctattcaaatgcaggccatacccgtcatgctccacgggagagaactgcttgcctccgctccaacaggcagcggcaaaactctggctttttctatccctattctaatgcagctaaaacagccagccaacaagggttttcgcgctctaattatttcgcctacccgagagctggcttcgcagattcaccgggaactgatcaagatctcagagggaacgggttttagaattcacatgatccataaagcagccgtggccgctaagaagttcgggcctaagtctagtaaaaaattcgatatcctcgttacaacacctaatcggctaatctatctgttgaagcaggatccacctgggatcgacttagctagtgttgaatggctggtcgtcgacgaatcggacaagttgttcgaggacggaaagaccggattcagagatcagctggccagtatcttcctagcgtgtaccagccataaggtcagacgtgctatgttttcagccaccttcgcgtatgacgtggaacagtggtgcaagctgaacctagataatgtaatttcagtttcaattggtgctcgaaatagcgccgtggagaccgtagaacaagaactgttgtttgtgggctctgagacgggaaagctgttggcaatgagggaactggtgaaaaaaggatttaatccaccggtgctcgtctttgttcaaagcatagagagggccaaagaactgtttcatgagctgatttacgagggtattaacgttgacgtgatccatgcagaacgtactcagcagcagcgcgacaacacagtccactcctttcgggcaggcaagatctgggttctgatctgcaccgcactactggccagaggcatagatttcaaaggagtcaaccttgtcatcaattacgattttcccacatcgtccgtcgagtatatccaccggatcggcaggacaggaagagctgggaataagggaaaggcaattaccttttttactgaagatgacaagccactgctgagatccgtcgccaatgtcattcagcaagccggttgcccggtacccgagtacataaaaggtttccagaagctgctgtccaagcagaaaaagaaaatgatcaaaaagcccttagagagagagagtatttctacaacccccaaatgttttctcgaaaaggcaaaagacaaacagaaaaaggtgacaggtcagaacagcaagaagaaagtggccctggaagataagtcctag

SEQ ID NO: 169706 - DNA, 1476 bp, Artificial Sequence
  derived and/or modified sequence
atgtcatcagtggaggccaaaattgaggacaaaaaggtccagagagaaagtaagctgacatcgggaaagctggagaatttacgaaaggaaaaaataaatttcttaagaaataagcataagatacacgtacagggaactgatctgcccgatccgatagccacattccagcagctggatcaagaatacaagatcaattctcgactgctacagaacattttggacgctggtttccagatgcccacccctatccagatgcaagcgatcccagttatgcttcatggtagggaactcctggcctctgcgccaacaggatctgggaagacgctcgcgttttcaattcccatcctaatgcagcttaaacagccggcaaacaagggatttagggcgctgattatctcgcctacacgtgagctggcgagccagatacatagggaactaatcaagattagcgagggaaccgggttcagaattcacatgatccataaggctgccgtggccgctaaaaaattcgggccaaagtcaagcaaaaaattcgacattctagtgaccacaccgaaccggctaatctatctgctgaagcaggatcccccagggattgatcttgccagcgtggaatggttagtcgtggacgagtccgataagctctttgaggacgggaagacagggttccgtgatcagctggcgtcaatcttcctagcctgcacatcacacaaagtgaggcgcgctatgttttctgccacgttcgcttacgatgtcgagcagtggtgtaagctgaatttggacaacgtgatttccgttagcataggagcccgtaatagcgcagtggagacggtggaacaggaactgctgttcgtcggctctgaaactgggaaattgctggctatgcgcgaattagtcaagaagggctttaaccccccagtgctggtgtttgttcaatccatcgagagggctaaggagctttttcacgaactgatatatgaaggcattaacgttgacgtaattcacgccgaaaggacgcagcagcagagggacaacacggttcactctttccgagccggtaagatttgggtgctcatctgtactgctctactagcaagaggcatcgattttaaaggggtcaacctcgtgattaactacgattttcccaccagcagtgtcgagtatattcacaggattggtaggaccggtagggcaggcaacaagggaaaagcaatcaccttcttcaccgaggacgataaaccacttctgcgcagcgtcgctaatgtcatccagcaagcagggtgtcctgtaccagagtacatcaagggcttccagaagctcctatctaagcagaaaaaaaagatgattaaaaaaccgctggagcgagagtcaatttcaacgactcccaagtgcttcctggagaaagccaaggataagcagaagaaagtgacaggtcagaactctaagaaaaaagtggccctggaagataaaagctag

SEQ ID NO: 169707 - DNA, 1800 bp, Artificial Sequence
  derived and/or modified sequence
atggacgtgcacgacctgttcagaagactgggcgccggcgccaagttcgacaccagaagattcagcgccgacgccgccagattccagatcggcaagagaaagtacgacttcgacagcagcgaggtgctgcagggcctggacttcttcggcaacaagaagagcgtgcccggcgtgtgcggcgccagccagacccaccagaagccccagaacggcgagaagaaggaggagagcctgaccgagagaaagagagagcagagcaagaagaagagaaagaccatgaccagcgagatcgccagccaggaggagggcgccaccatccagtggatgagcagcgtggaggccaagatcgaggacaagaaggtgcagagagagagcaagctgaccagcggcaagctggagaacctgagaaaggagaagatcaacttcctgagaaacaagcacaagatccacgtgcagggcaccgacctgcccgaccccatcgccaccttccagcagctggaccaggagtacaagatcaacagcagactgctgcagaacatcctggacgccggcttccagatgcccacccccatccagatgcaggccatccccgtgatgctgcacggcagagagctgctggccagcgcccccaccggcagcggcaagaccctggccttcagcatccccatcctgatgcagctgaagcagcccgccaacaagggcttcagagccctgatcatcagccccaccagagagctggccagccagatccacagagagctgatcaagatcagcgagggcaccggcttcagaatccacatgatccacaaggccgccgtggccgccaagaagttcggccccaagagcagcaagaagttcgacatcctggtgaccacccccaacagactgatctacctgctgaagcaggacccccccggcatcgacctggccagcgtggagtggctggtggtggacgagagcgacaagctgttcgaggacggcaagaccggcttcagagaccagctggccagcatcttcctggcctgcaccagccacaaggtgagaagagccatgttcagcgccaccttcgcctacgacgtggagcagtggtgcaagctgaacctggacaacgtgatcagcgtgagcatcggcgccagaaacagcgccgtggagaccgtggagcaggagctgctgttcgtgggcagcgagaccggcaagctgctggccatgagagagctggtgaagaagggcttcaacccccccgtgctggtgttcgtgcagagcatcgagagagccaaggagctgttccacgagctgatctacgagggcatcaacgtggacgtgatccacgccgagagaacccagcagcagagagacaacaccgtgcacagcttcagagccggcaagatctgggtgctgatctgcaccgccctgctggccagaggcatcgacttcaagggcgtgaacctggtgatcaactacgacttccccaccagcagcgtggagtacatccacagaatcggcagaaccggcagagccggcaacaagggcaaggccatcaccttcttcaccgaggacgacaagcccctgctgagaagcgtggccaacgtgatccagcaggccggctgccccgtgcccgagtacatcaagggcttccagaagctgctgagcaagcagaagaagaagatgatcaagaagcccctggagagagagagcatcagcaccacccccaagtgcttcctggagaaggccaaggacaagcagaagaaggtgaccggccagaacagcaagaagaaggtggccctggaggacaagagctag

SEQ ID NO: 169708 - DNA, 1476 bp, Artificial Sequence
  derived and/or modified sequence
atgagcagcgtggaggccaagatcgaggacaagaaggtgcagagagagagcaagctgaccagcggcaagctggagaacctgagaaaggagaagatcaacttcctgagaaacaagcacaagatccacgtgcagggcaccgacctgcccgaccccatcgccaccttccagcagctggaccaggagtacaagatcaacagcagactgctgcagaacatcctggacgccggcttccagatgcccacccccatccagatgcaggccatccccgtgatgctgcacggcagagagctgctggccagcgcccccaccggcagcggcaagaccctggccttcagcatccccatcctgatgcagctgaagcagcccgccaacaagggcttcagagccctgatcatcagccccaccagagagctggccagccagatccacagagagctgatcaagatcagcgagggcaccggcttcagaatccacatgatccacaaggccgccgtggccgccaagaagttcggccccaagagcagcaagaagttcgacatcctggtgaccacccccaacagactgatctacctgctgaagcaggacccccccggcatcgacctggccagcgtggagtggctggtggtggacgagagcgacaagctgttcgaggacggcaagaccggcttcagagaccagctggccagcatcttcctggcctgcaccagccacaaggtgagaagagccatgttcagcgccaccttcgcctacgacgtggagcagtggtgcaagctgaacctggacaacgtgatcagcgtgagcatcggcgccagaaacagcgccgtggagaccgtggagcaggagctgctgttcgtgggcagcgagaccggcaagctgctggccatgagagagctggtgaagaagggcttcaacccccccgtgctggtgttcgtgcagagcatcgagagagccaaggagctgttccacgagctgatctacgagggcatcaacgtggacgtgatccacgccgagagaacccagcagcagagagacaacaccgtgcacagcttcagagccggcaagatctgggtgctgatctgcaccgccctgctggccagaggcatcgacttcaagggcgtgaacctggtgatcaactacgacttccccaccagcagcgtggagtacatccacagaatcggcagaaccggcagagccggcaacaagggcaaggccatcaccttcttcaccgaggacgacaagcccctgctgagaagcgtggccaacgtgatccagcaggccggctgccccgtgcccgagtacatcaagggcttccagaagctgctgagcaagcagaagaagaagatgatcaagaagcccctggagagagagagcatcagcaccacccccaagtgcttcctggagaaggccaaggacaagcagaagaaggtgaccggccagaacagcaagaagaaggtggccctggaggacaagagctag

SEQ ID NO: 169709 - DNA, 6359 bp, Artificial Sequence
  derived and/or modified sequence
agtctgcgcaggcgccgtagaactgtggcgctttctgggtaaagatggacgtccacgatctctttcgccggctcggcgcgggggccaaattcgacacgagacgcttctcggcagacgcagctcgattccagataggaaaaaggaaatatgactttgattcttcggaggtgcttcagggactggacttttttggaaacaagaagtctgtcccaggtgtgtgtggagcatcacaaacacatcagaagccccaaaatggagagaaaaaagaagagagcctaactgaaaggaagagggagcagagcaagaaaaaaaggaagacgatgacttcagaaattgcttcccaagaagaaggtgctactatacagtggatgtcatctgtagaagcaaagattgaagacaaaaaagttcagagagaaagtaaactaacttccggaaagttggagaatctcagaaaagaaaagataaacttcttgcggaataaacacaaaattcacgtccaaggaaccgatcttcctgacccaattgctacatttcagcaacttgaccaggaatataaaatcaattctcgactacttcagaacattctagatgcaggtttccaaatgcctacgccaatccaaatgcaagccatcccagttatgctgcatggtcgggaacttctggcttctgctccaactggatctggaaaaacattagcttttagcattcctattttaatgcagctgaaacaacccgcaaataaaggcttcagagccctgattatatcaccaacacgagaacttgccagccagattcacagagagttaataaaaatttctgagggaacaggattcaggatacacatgatccacaaagcagcagtggcagccaagaaatttggacctaaatcatctaaaaagtttgatattcttgtgactactccaaatcgactaatctatttattaaagcaagatccccccggaatcgacctagcaagtgttgagtggcttgtagtagacgaatcagataaactgtttgaagatggcaaaactgggttcagagaccagctggcttccattttcctggcctgcacatcccacaaggtccgaagagctatgttcagtgcaacttttgcatatgatgttgaacagtggtgcaaactcaacctggacaatgtcatcagtgtgtccattggagcaaggaattctgcagtagaaactgtagaacaagagcttctctttgttggatctgagaccggaaaacttctggccatgagagaacttgttaaaaagggtttcaatccacctgttcttgtttttgttcagtccattgaaagggctaaagaactttttcatgagctcatatatgaaggtattaatgtggatgttattcatgcagagagaacacaacaacagagagataacacagtccacagtttcagagcaggaaaaatctgggttctgatttgtacagccttgctagcaagagggattgattttaaaggtgtgaacttggtgatcaactatgactttccaactagctcagtggaatatatccacaggataggtcgaactggaagagcagggaataagggaaaagcaattacatttttcactgaggatgataagccattattaagaagcgttgctaatgttatacagcaggctgggtgtcctgtaccagaatacataaaaggttttcagaaactactaagcaaacaaaagaaaaagatgattaagaaaccattggaaagggagagcattagtacaactccaaaatgtttcttagaaaaagctaaggataaacagaaaaaggtcactggtcagaacagcaagaagaaagtagctcttgaagacaaaagttaaaaacagactttaaaaatactgtcccagaaatgtaattttatgatcccagcatgaatgttattttcatggaatacttgaagtcttacagtcacctgtaccaaacatttgaaatcaactacaagtacatgggactggtgataaatgatcctaaactatcaagtcagtttcaatttgtaggtgccttttttttttcctgtagagatgagggtcttgccatgttgtccaggctggtcttgaactcctgacctcacacaatcctcctgccttagcctcctgagtaactgagattacaggcacaagctgctgcacccagctctgtaggtgacttttaaatgattatacaatggaaataacattcattgacatttctgtggtttgaatccagagagatacttcttatagaaaaacaaatgtttatgctaaaaataacaccaaaatgtggtgaactcttaaggacttttcccttcaagtgtgaaggaaggtgtgatgaatgctgtggagaggcatctggaacagaaattcaaaataaagccttgacattaaataccccttccactgctcactttgtggatggtagcatgagctgtctaccaagaagaaacctgctgctctcttaattttaatatttcctaatttgttgatggccttttgtgttgtgaaccacaacaaagagaggcctcttttgtggctggttattccagttccctgggattttaaattctttggtctattaagtatccttgtattggatacgtaataccttagtgctgtcataatgttgtacaagatcatgatcagcttctccctttcttcattttctgtgatttaaccatgttctttcctgtctctttccatttaagatattttatttgaatactgataaacattttatcctgataaggaagaatgttcttgttacttgatatacctctgtcttcattctcttacagcttatctttccttaggttgatggtgcctcatttaataagtagatctctacttaagctaaaggattatgatcatatggtgttggagactattagctattagatttttctcaaaatatgagttttgtacaatggaatgaaaaagtgacttcatatacgtaagactggtgcctaagaatgacttgaatgttatcagtactaccacagaactataatatacattgccttttctcagcagcatttgaattcaacttatttatttcctctatttgtagctttttgttctagagtcagaacaggtggactttgctttgaatattttagatgggacaaaaattgttcatcttcggaatttatttaaagaaagatctactggtacagggtgtaaaaatacttacaagaatatgatttttttgtttgttcatgcaaacagatcctttacccaatatatattctggaggtaggtatactggtgcaacccatttgccagctgtgtgactttgagtaagttcttaatttctcagagtttcagtgttctcatctataaaattatgtctccaattgtgagtacctagcactgtacctgatacatagtaaactcacaataaatatttcttaaacatagattttgttaggaatacaggcttgataacacagtccttacccttacaatgtaatgttagagataaaggagcaaatagagtcacgcatcacttaatgacagagatatgttctgagaaatgcatcgttaggtgatattgtcattgtgtaaacatcatgttgtttacttccacaaacctagatggtatagcctaccagtacacctaggctatatggtatagtctgttgctcctaggctacaaacccgtatagcatgttactgtcctgcatgctatagacagttggaacatgtagacttgtataaacactgcacacttaacctatactaaatttattgaaaatatttttcttggccaggcgtagtggctcatgcctgtaatcctaacacttcgggaggcctaggcgggcaggttgtctgagctcaggagtttagagaccagcccgggcaacatggcaaaaccccatctctactaaaaaaaataccaaaaaaagttagccgggtgtggtggcatagtcccggctactcaggagtctgaggcaggagaatagcttgaacctgtgaggcggaggttgcagtaagccgagatcgcgctactgcactccagcctgggcgacagggcaagactgtcttgaaaataaacacacacacacacattatatatattatgtattatatatattagatatatattttttcttcaataaattaaccttagcttactgtaacttttactttatgagtttttttgttttgttttgttttttttttttgagaaacagggtctgttacctaatttggagtttagtggcacaatcatggcccactgcagccttgacctcttagactcaagtgatcctcaaacctcagcctcccgagtagctggtactataggtgcgggccaccaacactcagctaatttttaaattttgtagagacgaggtcttgcttgttgtccagttgggttttttagacttttttttttttttttttttggagatggagtcttgctctgttgcccaggctggagtgcagtggcatgatctcggctcactgcaacctctgactcctgggttcaagtgattctcctgcctcagcctcccgagttgctgggactacaggcatgcgccaccacacccagctaatttttgtatttttagtgacagggtttcaccatgttggccaggctggtctcaaactcctgacctggagtgagccactatatctggcctttataaacttttttgattcttgtcataacacttagcctaaaatgcaaatgtacagctgtagaaaaatactttatttctttatatccttattctagaagctttttttctattaatttttgtttgtttgttttgttttactatttacttctaaaacttttttgttaaaaaccatggcacaaacacacacattatgctaggcatacaaaaggtcaggatcatcagtctcactgtcttccacccccacttctcatcccaccattgtatctgctgtctgtggctgaccaaaacatcatcatgtagcacatgactagtgtggcaagtgctctgttagatgtaaggccatgatgctaaagcatcacaagagggcatctaacccagattggggatgtcatggaaggccgacatcctgagttgaatcctgcaaatgtaaaaaccaataggcaaagaagaggaacaaaaaggattccaggacaaactgaggtcacatctatgatccttgactttattgtgtctgtttaaagtatctacagtaacctgtatcaacttagtcagtgtattaatactaaatttagctccttcaaagcagttggaactatgtgctacataaatttcagcttcacacaaggaagggaaggagtgaaattagtgaacaggcagttacagcaaaagaaaaaacataaaaattgaatagctggctctggtgaaatgagcaaggactttagagtcaaactggcctggatttgaatcctgatcctcattgcttgtagctgtatgatctggacaaatgacagtagctgtttctaaccttgattttctcatctgtaagatgccaattgtaactcctaaggatactgaggattttttaaaatgcgtgtacagttcctgaccagtggtttgtgcctaataacttattacaaattattacccagtaaaaaccttgagacaagagtgaaaacgtaaagctaattaatccattacttgttagcaagcaaactacgtgcttgagaaaattactcaactttcatgttttacttccagacagtagtttgattaaaagaaaaaaaaaaatcacagcccaggcatgtggctcacaccctggcacttggaggccgaggtgggagcatagcttgagcctagcagtttgaaactagcctgggcaacatagatcctatctctacaaaaaaaaaaaaaaaaaaaaaaaaattggcccggtgtggtggtgcatgcctgcggtcccagctactcaggaggctgaggcgagaggatcgcttgagccagggaggctgaggctgctgtgagccatgatcatgccactgcactccagcctggacaacagagcaagaccctgtctcaaaaaaaaaaaaaaatcagtaaaaaatatgccgaaatagcttcagagtaattatgaattgccttccaaaaaccactgttttgcacttgcctgcaagaataggaaaaacaaaaggactgtaaggtggcaggatggcagaaccaaacaagagtagtacaccttggagttttttcgaaatatgggttgggtttttgggctcttggttgatttaaaataaaatttaaatgccttcagcgtctgtgataggtgccaacatgaagctaccgagttccagagaaagaggggagagctgatcactcatcagtgctgcgagactatcaaagggcccttcaggacctatctgttctttgtgtgtaaagagtaaca

SEQ ID NO: 169710 - DNA, 3881 bp, Artificial Sequence
  derived and/or modified sequence
cgcaggcgccgtagaactgtggcgctttctgggtaaagatggacgtccacgatctctttcgccggctcggcgcgggggccaaattcgacacgagacgcttctcggcagacgcagctcgattccagataggaaaaaggaaatatgactttgattcttcggaggtgcttcagggactggacttttttggaaacaagaagtctgtcccaggtgtgtgtggagcatcacaaacacatcagaagccccaaaatggagagaaaaaagaagagagcctaactgaaaggaagagggagcagagcaagaaaaaaaggaagacgatgacttcagagacagggtttcaccatgttagccagtatggtctcgatctcctgacctcgtgattcacccaccttgggctcccaaagtgctgggattacagatgtgagccaccacgcccagccagaaattgcttcccaagaagaaggtgctactatacagtggatgtcatctgtagaagcaaagattgaagacaaaaaagttcagagagaaagtaaactaacttccggaaagttggagaatctcagaaaagaaaagataaacttcttgcggaataaacacaaaattcacgtccaaggaaccgatcttcctgacccaattgctacatttcagcaacttgaccaggaatataaaatcaattctcgactacttcagaacattctagatgcaggtttccaaatgcctacgccaatccaaatgcaagccatcccagttatgctgcatggtcgggaacttctggcttctgctccaactggatctggaaaaacattagcttttagcattcctattttaatgcagctgaaacaacccgcaaataaaggcttcagagccctgattatatcaccaacacgagaacttgccagccagattcacagagagttaataaaaatttctgagggaacaggattcaggatacacatgatccacaaagcagcagtggcagccaagaaatttggacctaaatcatctaaaaagtttgatattcttgtgactactccaaatcgactaatctatttattaaagcaagatccccccggaatcgacctagcaagtgttgagtggcttgtagtagacgaatcagataaactgtttgaagatggcaaaactgggttcagagaccagctggcttccattttcctggcctgcacatcccacaaggtccgaagagctatgttcagtgcaacttttgcatatgatgttgaacagtggtgcaaactcaacctggacaatgtcatcagtgtgtccattggagcaaggaattctgcagtagaaactgtagaacaagagcttctctttgttggatctgagaccggaaaacttctggccatgagagaacttgttaaaaagggtttcaatccacctgttcttgtttttgttcagtccattgaaagggctaaagaactttttcatgagctcatatatgaaggtattaatgtggatgttattcatgcagagagaacacaacaacagagagataacacagtccacagtttcagagcaggaaaaatctgggttctgatttgtacagccttgctagcaagagggattgattttaaaggtgtgaacttggtgatcaactatgactttccaactagctcagtggaatatatccacaggataggtcgaactggaagagcagggaataagggaaaagcaattacatttttcactgaggatgataagccattattaagaagcgttgctaatgttatacagcaggctgggtgtcctgtaccagaatacataaaaggttttcagaaactactaagcaaacaaaagaaaaagatgattaagaaaccattggaaagggagagcattagtacaactccaaaatgtttcttagaaaaagctaaggataaacagaaaaaggtcactggtcagaacagcaagaagaaagtagctcttgaagacaaaagttaaaaacagactttaaaaatactgtcccagaaatgtaattttatgatcccagcatgaatgttattttcatggaatacttgaagtcttacagtcacctgtaccaaacatttgaaatcaactacaagtacatgggactggtgataaatgatcctaaactatcaagtcagtttcaatttgtaggtgccttttttttttcctgtagagatgagggtcttgccatgttgtccaggctggtcttgaactcctgacctcacacaatcctcctgccttagcctcctgagtaactgagattacaggcacaagctgctgcacccagctctgtaggtgacttttaaatgattatacaatggaaataacattcattgacatttctgtggtttgaatccagagagatacttcttatagaaaaacaaatgtttatgctaaaaataacaccaaaatgtggtgaactcttaaggacttttcccttcaagtgtgaaggaaggtgtgatgaatgctgtggagaggcatctggaacagaaattcaaaataaagccttgacattaaataccccttccactgctcactttgtggatggtagcatgagctgtctaccaagaagaaacctgctgctctcttaattttaatatttcctaatttgttgatggccttttgtgttgtgaaccacaacaaagagaggcctcttttgtggctggttattccagttccctgggattttaaattctttggtctattaagtatccttgtattggatacgtaataccttagtgctgtcataatgttgtacaagatcatgatcagcttctccctttcttcattttctgtgatttaaccatgttctttcctgtctctttccatttaagatattttatttgaatactgataaacattttatcctgataaggaagaatgttcttgttacttgatatacctctgtcttcattctcttacagcttatctttccttaggttgatggtgcctcatttaataagtagatctctacttaagctaaaggattatgatcatatggtgttggagactattagctattagatttttctcaaaatatgagttttgtacaatggaatgaaaaagtgacttcatatacgtaagactggtgcctaagaatgacttgaatgttatcagtactaccacagaactataatatacattgccttttctcagcagcatttgaattcaacttatttatttcctctatttgtagctttttgttctagagtcagaacaggtggactttgctttgaatattttagatgggacaaaaattgttcatcttcggaatttatttaaagaaagatctactggtacagggtgtaaaaatacttacaagaatatgatttttttgtttgttcatgcaaacagatcctttacccaatatatattctggaggtaggtatactggtgcaacccatttgccagctgtgtgactttgagtaagttcttaatttctcagagtttcagtgttctcatctataaaattatgtctccaattgtgagtacctagcactgtacctgatacatagtaaactcacaataaatatttcttaaacatagattttgttaggaatacaggcttgataacacagtccttacccttacaatgtaatgttagagataaaggagcaaatagagtcacgcatcacttaatgacagagatatgttctgagaaatgcatcgttaggtgatattgtcattgtgtaaacatcatgttgtttacttccacaaacctagatggtatagcctaccagtacacctaggctatatggtatagtctgttgctcctaggctacaaacccgtatagcatgttactgtcctgcatgctatagacagttggaacatgtagacttgtataaacactgcacacttaacctatactaaatttattgaaaatatttttcttggccaggcg

SEQ ID NO: 169711 - protein, 334 aa, Artificial Sequence
  derived and/or modified sequence
MTENSDKVPIALVGPDDVEFCSPPAYATLTVKPSSPARLLKVGAVVLISGAVLLLFGAIGAFYFWKGSDSHIYNVHYTMSINGKLQDGSMEIDAGNNLETFKMGSGAEEAIAVNDFQNGITGIRFAGGEKCYIKAQVKARIPEVGAVTKQSISSKLEGKIMPVKYEENSLIWVAVDQPVKDNSFLSSKVLELCGDLPIFWLKPTYPKEIQRERREVVRKIVPTTTKRPHSGPRSNPGAGRLNNETRPSVQEDSQAFNPDNPYHQQEGESMTFDPRLDHEGICCIECRRSYTHCQKICEPLGGYYPWPYNYQGCRSACRVIMPCSWWVARILGMV

SEQ ID NO: 169712 - DNA, 1005 bp, Artificial Sequence
  derived and/or modified sequence
atgaccgagaacagcgacaaggtgcccatcgccctggtgggccccgacgacgtggagttctgcagcccccccgcctacgccaccctgaccgtgaagcccagcagccccgccagactgctgaaggtgggcgccgtggtgctgatcagcggcgccgtgctgctgctgttcggcgccatcggcgccttctacttctggaagggcagcgacagccacatctacaacgtgcactacaccatgagcatcaacggcaagctgcaggacggcagcatggagatcgacgccggcaacaacctggagaccttcaagatgggcagcggcgccgaggaggccatcgccgtgaacgacttccagaacggcatcaccggcatcagattcgccggcggcgagaagtgctacatcaaggcccaggtgaaggccagaatccccgaggtgggcgccgtgaccaagcagagcatcagcagcaagctggagggcaagatcatgcccgtgaagtacgaggagaacagcctgatctgggtggccgtggaccagcccgtgaaggacaacagcttcctgagcagcaaggtgctggagctgtgcggcgacctgcccatcttctggctgaagcccacctaccccaaggagatccagagagagagaagagaggtggtgagaaagatcgtgcccaccaccaccaagagaccccacagcggccccagaagcaaccccggcgccggcagactgaacaacgagaccagacccagcgtgcaggaggacagccaggccttcaaccccgacaacccctaccaccagcaggagggcgagagcatgaccttcgaccccagactggaccacgagggcatctgctgcatcgagtgcagaagaagctacacccactgccagaagatctgcgagcccctgggcggctactacccctggccctacaactaccagggctgcagaagcgcctgcagagtgatcatgccctgcagctggtgggtggccagaatcctgggcatggtgtag

SEQ ID NO: 169713 - DNA, 1005 bp, Artificial Sequence
  derived and/or modified sequence
atgacggagaattcggacaaagttcccatcgccctggttggaccagatgacgtagagttctgctccccacccgcttacgcaacactgacagttaaaccttcctcccccgcccgactgctgaaggtgggtgcagtcgtgctcattagcggcgcggttttgctcttgttcggtgccatcggagccttttacttctggaagggctcagattcccacatctacaatgtgcattacacaatgagcatcaacggcaaactccaggacggatcgatggagattgacgccggcaacaacctggagactttcaagatgggatctggcgccgaagaggccatcgcggtgaacgattttcagaatggtataacagggatacggtttgcgggtggagaaaagtgctacataaaggcccaggtaaaagccagaattcccgaggtgggtgcggtgacaaagcaatccatcagctctaagctggaggggaaaattatgccagttaaatacgaggagaatagcctcatatgggtggcggtggaccagcctgttaaagacaacagctttctatccagcaaagtgctggaactttgtggcgacctgccaattttttggttaaaacctacataccctaaagagattcagcgggagcggcgtgaagtggtgaggaagatcgttcctacgaccacaaaacgtccacattctggtccccggtccaatcccggcgcgggtagactgaataacgagactagaccttcagtgcaggaagatagccaggcattcaaccccgacaacccgtaccatcagcaggagggagaatcgatgaccttcgatcccagactggatcacgaaggaatctgttgtatcgaatgcaggagatcctatacgcactgccagaagatctgtgagcctctgggtggctactacccatggccctacaactatcaggggtgccgtagcgcttgtcgggttattatgccctgcagctggtgggttgctaggatcttgggcatggtgtag

SEQ ID NO: 169714 - DNA, 1005 bp, Artificial Sequence
  derived and/or modified sequence
atgacagaaaattctgacaaggtgcccatcgccctggtgggcccagatgatgtggagttctgcagccccccagcctatgccaccctgactgtgaagcccagcagccctgcccggctgctgaaggtgggcgctgtggtgctgatctctggagctgtgctgctgctgtttggagccatcggggccttctacttctggaagggcagtgacagccacatctacaacgtgcactacaccatgagcatcaacgggaagctgcaggacggctccatggagattgatgctggcaacaacctggagaccttcaagatgggcagcggggctgaggaggccatcgctgtgaatgacttccagaatggcatcaccggcatccgctttgctggaggagagaagtgctacatcaaggcccaggtgaaggcccgcatccctgaggtgggcgctgtgaccaagcagagcatcagcagcaagctggagggcaagatcatgcctgtgaagtatgaggagaacagcctcatctgggtggccgtggaccagcctgtgaaggacaacagcttcctgagcagcaaggtgctggagctgtgtggggacctgcccatcttctggctgaagcccacctaccccaaggagatccagcgggagcggcgggaggtggtgaggaagatcgtgcccaccaccaccaagaggccccacagcggccccaggagcaaccctggggccggccgcctgaacaatgagacccggcccagcgtgcaggaggacagccaggccttcaacccagacaacccctaccaccagcaggagggggagagcatgacctttgacccccggctggaccacgagggcatctgctgcattgaatgtagaagaagctacacccactgccagaagatctgtgagcccctgggcggctactacccctggccctacaactaccagggctgccgcagcgcctgcagggtcatcatgccctgctcctggtgggtggcccgcatcctgggcatggtgtag

SEQ ID NO: 169715 - DNA, 1005 bp, Artificial Sequence
  derived and/or modified sequence
atgaccgagaacagcgacaaggtgcccatcgccctggtgggccccgacgatgtggagttctgttcccctcccgcctatgccactttgactgtcaagccgtcgtcccctgcacgtctcctgaaagttggggctgtagtattgatctccggcgccgttttgttactgtttggagccatcggtgctttttatttctggaagggcagtgattcccatatctacaacgtgcactataccatgagtattaatggcaagctccaggatgggagcatggaaattgacgctgggaataacctggaaacttttaaaatgggctctggagccgaggaggccatcgccgtaaacgactttcagaacggcataaccggtatccgcttcgccgggggagagaaatgttatatcaaagcccaagtcaaagccaggattccggaggtgggggctgtcacaaagcagtctatatcatcaaaactggaaggaaaaattatgcctgtgaaatatgaggagaactcactaatctgggtagccgtggatcagcccgtgaaggataacagctttttatccagcaaagtgctggaactgtgtggggatttgcccattttttggctgaagcccacttatcccaaagagatacagcgtgaaagaagagaagtggtacggaagattgtacctactaccacaaagcggccccactcgggacctaggtccaatccaggtgcgggtaggcttaataacgaaacacgaccctccgtccaggaagactcacaagccttcaatccggataatccttaccaccaacaagagggcgagagcatgactttcgaccctcggcttgaccacgaggggatatgctgtatcgaatgtaggagatcttatacacactgccagaagatttgtgaacccttgggtgggtattacccatggccctataattaccagggctgtaggtcggcatgcagagtcattatgccatgctcgtggtgggtcgccaggatcttggggatggtttag

SEQ ID NO: 169716 - DNA, 1005 bp, Artificial Sequence
  derived and/or modified sequence
atgacagagaattccgataaagtccctatcgctttggtgggcccagacgacgtggaattttgttcccctcccgcatacgccaccctcaccgtcaagccatcttcaccggcacgcctgttgaaagtgggcgctgtggtattaataagtggagccgtgctacttctttttggcgctattggcgctttctacttctggaaagggagtgattcacatatctataatgtgcattatacaatgtcaataaacggcaaactccaagacggctctatggagattgacgctggaaacaatttagaaacctttaagatgggttcaggcgcagaggaagctatcgcagtaaatgacttccaaaacggtatcacaggcatacggttcgctggaggtgagaagtgttatataaaggctcaggtgaaagccaggattccagaagtaggggcagtcaccaaacagtccatctccagtaaattagaaggaaaaattatgccagtaaaatacgaggaaaacagcctcatctgggtcgcagttgatcagccagtgaaggacaactctttcctttcaagtaaggttttggagttgtgcggcgaccttcccattttctggctgaagccaacctatcctaaggagattcaacgcgagagaagggaggtggtgagaaagattgtgccaactacgaccaagcgaccccattccggacctcgctcaaaccctggagctgggagattgaataatgagacccggccatccgttcaggaggattcccaggctttcaatccagataacccctatcaccaacaagagggggaatcaatgacgttcgacccccgactggaccatgagggcatttgctgtatcgagtgccggaggagctatacacattgccagaagatttgcgagccgctcgggggatactatccttggccttacaattaccagggctgtcgatcagcatgtagggtaatcatgccctgcagctggtgggttgcccgaattttgggaatggtctag

SEQ ID NO: 169717 - protein, 179 aa, Artificial Sequence
  derived and/or modified sequence
MASQNRDPAATSVAAARKGAEPSGGAARGPVGKRLQQELMTLMMSGDKGISAFPESDNLFKWVGTIHGAAGTVYEDLRYKLSLEFPSGYPYNAPTVKFLTPCYHPNVDTQGNICLDILKEKWSALYDVRTILLSIQSLLGEPNIDSPLNTHAAELWKNPTAFKKYLQETYSKQVTSQEP

SEQ ID NO: 169718 - protein, 140 aa, Artificial Sequence
  derived and/or modified sequence
MTLMMSGDKGISAFPESDNLFKWVGTIHGAAGTVYEDLRYKLSLEFPSGYPYNAPTVKFLTPCYHPNVDTQGNICLDILKEKWSALYDVRTILLSIQSLLGEPNIDSPLNTHAAELWKNPTAFKKYLQETYSKQVTSQEP

SEQ ID NO: 169719 - DNA, 540 bp, Artificial Sequence
  derived and/or modified sequence
atggccagccagaacagagaccccgccgccaccagcgtggccgccgccagaaagggcgccgagcccagcggcggcgccgccagaggccccgtgggcaagagactgcagcaggagctgatgaccctgatgatgagcggcgacaagggcatcagcgccttccccgagagcgacaacctgttcaagtgggtgggcaccatccacggcgccgccggcaccgtgtacgaggacctgagatacaagctgagcctggagttccccagcggctacccctacaacgcccccaccgtgaagttcctgaccccctgctaccaccccaacgtggacacccagggcaacatctgcctggacatcctgaaggagaagtggagcgccctgtacgacgtgagaaccatcctgctgagcatccagagcctgctgggcgagcccaacatcgacagccccctgaacacccacgccgccgagctgtggaagaaccccaccgccttcaagaagtacctgcaggagacctacagcaagcaggtgaccagccaggagccctag

SEQ ID NO: 169720 - DNA, 540 bp, Artificial Sequence
  derived and/or modified sequence
atggcatctcagaatcgcgacccagctgcgacttctgtcgcagccgcaagaaagggggccgagccctccggtggggctgccaggggccccgtcgggaagcgactgcagcaggaactaatgaccctaatgatgtctggagacaagggcatctccgcttttcccgagtctgataacttgtttaagtgggtcggcactatacatggtgccgctggtacagtatatgaagacctgaggtacaagctgagcctagagttcccgtctgggtatccatataatgcacctacagtgaagttcttaaccccctgctatcatcccaacgtggacacccagggtaacatatgccttgatatcttaaaagaaaagtggtccgccttgtacgacgtgagaacaatattactgtcgattcagtcactgctgggcgagcctaatattgattcacctcttaatacacacgccgccgagctatggaagaaccccactgcctttaagaagtatctgcaggaaacttactcaaagcaggttacttctcaggagccttag

SEQ ID NO: 169721 - DNA, 540 bp, Artificial Sequence
  derived and/or modified sequence
atggccagccagaacagagatcctgctgccacctctgtggccgccgccaggaaaggagctgagcccagcggcggggccgcccggggccctgtgggcaagaggctgcagcaggagctgatgaccctgatgatgtctggggacaagggcatcagcgccttccctgagagtgacaacctcttcaagtgggtgggcaccatccatggagctgctggcaccgtgtatgaggacctgcgctacaagctgagcctggagttccccagcggctacccctacaatgcccccaccgtgaagttcctgaccccctgctaccaccccaacgtggacacccagggcaacatctgcctggacatcctgaaggagaagtggagcgccctgtatgatgtgaggaccatcctgctgagcatccagagcctgctgggggagcccaacatcgacagccccctgaacacccacgccgctgagctgtggaagaaccccacagccttcaagaagtacctgcaggagacctacagcaagcaggtgaccagccaggagccctag

SEQ ID NO: 169722 - DNA, 540 bp, Artificial Sequence
  derived and/or modified sequence
atggccagccagaaccgggaccccgccgccaccagcgtggccgccgccaggaaaggagcggaaccatcagggggagccgccaggggaccagtcggtaaacggctgcaacaggagctgatgaccctaatgatgagcggagacaaggggataagcgcctttcctgaaagcgataatctgtttaagtgggtaggcacaatccacggtgcggcagggaccgtgtacgaagacttgaggtacaaattgtcccttgagttcccttctggatatccgtataacgcacctacagtcaaattcctgactccctgttaccacccaaacgttgatacacagggcaacatctgccttgacatactcaaagaaaaatggagcgccctgtacgacgtcaggacaattttactgagcatccagtcccttcttggcgagccaaacatcgacagtcccctaaatacccatgcggccgaactctggaagaaccccaccgcttttaaaaaatatttgcaagagacctattccaagcaggttacctcccaggagccatag

SEQ ID NO: 169723 - DNA, 540 bp, Artificial Sequence
  derived and/or modified sequence
atggccagtcaaaatcgcgaccccgctgccacgtctgttgcggctgccagaaagggggctgagcccagcggtggagccgctcggggaccagtgggaaagcgtctccagcaggaactgatgaccttaatgatgtcgggagataaggggatctccgcctttcctgagagcgataacctgtttaagtgggtgggcacgattcacggggcagcgggtacggtctatgaagatctgagatacaaactaagtctcgaattcccatccggctatccatacaacgcacctaccgtgaagttcctaacaccatgttaccaccccaacgtggacacacagggtaacatctgcctggatatcctcaaagagaagtggtccgccctgtacgacgtgagaacaatcttattgagtatacagagtctgcttggggaacctaatatcgattcgcccctgaatacccacgccgctgaactttggaagaatcccacagccttcaagaagtatctgcaagagacttactctaagcaggtgactagtcaggaaccgtag

SEQ ID NO: 169724 - DNA, 850 bp, Artificial Sequence
  derived and/or modified sequence
gagccattgattggtcgacgcccccagagggttacaattcaaacgcgggcgggcgggcccgcagtcctgcagttgcagtcgtgttctccgagttcctgtctctctgccaacgccgcccggatggcttcccaaaaccgcgacccagccgccactagcgtcgccgccgcccgtaaaggagctgagccgagcgggggcgccgcccggggtccggtgggcaaaaggctacagcaggagctgatgaccctcatgatgtctggcgataaagggatttctgccttccctgaatcagacaaccttttcaaatgggtagggaccatccatggagcagctggaacagtatatgaagacctgaggtataagctctcgctagagttccccagtggctacccttacaatgcgcccacagtgaagttcctcacgccctgctatcaccccaacgtggacacccagggtaacatatgcctggacatcctgaaggaaaagtggtctgccctgtatgatgtcaggaccattctgctctccatccagagccttctaggagaacccaacattgatagtcccttgaacacacatgctgccgagctctggaaaaaccccacagcttttaagaagtacctgcaagaaacctactcaaagcaggtcaccagccaggagccctgacccaggctgcccagcctgtccttgtgtcgtctttttaatttttccttagatggtctgtcctttttgtgatttctgtataggactctttatcttgagctgtggtatttttgttttgtttttgtcttttaaattaagcctcggttgagcccttgtatattaaataaatgcatttttgtccttttttagacaa

SEQ ID NO: 169725 - DNA, 914 bp, Artificial Sequence
  derived and/or modified sequence
ggtgagattcgagagatgggggacaggccaggagctcagaccgctctttgagactctcccgaaggagaatgggagggtaggggcgctgccagactccttccctggtgggcctagatgaagacgctcaaggaccctcgtgacttggccgagacaggggaagggagaagttgagtcgggcaaggaagagatgctaaagcctggggaattaagaacatgccagaatcatcccgagggagtctggaattagggagggtgaggactcgctaggatcgtcctgtggatctggctacagcaggagctgatgaccctcatgatgtctggcgataaagggatttctgccttccctgaatcagacaaccttttcaaatgggtagggaccatccatggagcagctggaacagtatatgaagacctgaggtataagctctcgctagagttccccagtggctacccttacaatgcgcccacagtgaagttcctcacgccctgctatcaccccaacgtggacacccagggtaacatatgcctggacatcctgaaggaaaagtggtctgccctgtatgatgtcaggaccattctgctctccatccagagccttctaggagaacccaacattgatagtcccttgaacacacatgctgccgagctctggaaaaaccccacagcttttaagaagtacctgcaagaaacctactcaaagcaggtcaccagccaggagccctgacccaggctgcccagcctgtccttgtgtcgtctttttaatttttccttagatggtctgtcctttttgtgatttctgtataggactctttatcttgagctgtggtatttttgttttgtttttgtcttttaaattaagcctcggttgagcccttgtatattaaataaatgcatttttgtccttttttagacaa

SEQ ID NO: 169726 - DNA, 1446 bp, Artificial Sequence
  derived and/or modified sequence
aaacgcgggcgggcgggcccgcagtcctgcagttgcagtcgtgttctccgagttcctgtctctctgccaacgccgcccggatggcttcccaaaaccgcgacccagccgccactagcgtcgccgccgcccgtaaaggagctgagccgagcgggggcgccgcccggggtccggtgggcaaaaggtgagtgatgcggcctaccactcgccgggcctgccatgccctaggcattggtacccagagcaaagatttctaggaccaccccccgccgccacctcctggagcgggagatctgcgggtgcaggagaacacaccaggagctcggggcctggcattcccctgggcatgggtgtcgagggcggagacttccgggactcccacctccttgcgcgggtgagattcgagagatgggggacaggccaggagctcagaccgctctttgagactctcccgaaggagaatgggagggtaggggcgctgccagactccttccctggtgggcctagatgaagacgctcaaggaccctcgtgacttggccgagacaggggaagggagaagttgagtcgggcaaggaagagatgctaaagcctggggaattaagaacatgccagaatcatcccgagggagtctggaattagggagggtgaggactcgctaggatcgtcctgtggatctggtgagtataccctgagctgagcctgaccttggtgatgtggggagcctccatgacggctccccctgagattcaggtgggagaagatgcaccgtctggaggcctggcccatccagactcccaggtaaccccgaatactcttttttcaggctacagcaggagctgatgaccctcatgatgtctggcgataaagggatttctgccttccctgaatcagacaaccttttcaaatgggtagggaccatccatggagcagctggaacagtatatgaagacctgaggtataagctctcgctagagttccccagtggctacccttacaatgcgcccacagtgaagttcctcacgccctgctatcaccccaacgtggacacccagggtaacatatgcctggacatcctgaaggaaaagtggtctgccctgtatgatgtcaggaccattctgctctccatccagagccttctaggagaacccaacattgatagtcccttgaacacacatgctgccgagctctggaaaaaccccacagcttttaagaagtacctgcaagaaacctactcaaagcaggtcaccagccaggagccctgacccaggctgcccagcctgtccttgtgtcgtctttttaatttttccttagatggtctgtcctttttgtgatttctgtataggactctttatcttgagctgtggtatttttgttttgtttttgtcttttaaattaagcctcggttgagcccttgtatattaaataaatgcatttttgtccttttttag

SEQ ID NO: 169727 - protein, 212 aa, Artificial Sequence
  derived and/or modified sequence
MRSRLLLSVAHLPTIRETTEEMLLGGPGQEPPPSPSLDDYVRSISRLAQPTSVLDKATAQGQPRPPHRPAQACRKGRPAVSLRDITARFSGQQPTLPMADTVDPLDWLFGESQEKQPSQRDLPRRTGPSAGLWGPHRQMDSSKPMGAPRGRLCEARMPGHSLARPPQDGQQSSDLRSWTFGQSAQAMASRHRPRPSSVLRTLYSHLPVIHEL

SEQ ID NO: 169728 - protein, 127 aa, Artificial Sequence
  derived and/or modified sequence
MRSRLLLSVAHLPTIRETTEEMLLGGPGQEPPPSPSLDDYVRSISRLAQPTSVLDKATAQGQPRPPHRPAQACRKGRPAVSLLASGVHIDRWTAASPWGPPEGGSVKPGCLGIPWQDHRRMGSRALT

SEQ ID NO: 169729 - protein, 84 aa, Artificial Sequence
  derived and/or modified sequence
MRSRLLLSVAHLPTIRETTEEMLLGGPGQEPPPSPSLDDYVRSISRLAQPTSVLDKATAQGQPRPPHRPAQACRKGRPAVSLRD

SEQ ID NO: 169730 - DNA, 2120 bp, Artificial Sequence
  derived and/or modified sequence
cacactgctcagggaagagcctgctacggtggactgtgagactcagtgcactgtcctcctcccagcgaccccacgctggaccccctgccggaccctccacccttcggcccccaagcttcccaggggcttcctttggactggactgtccctgctcatccattctcctgccacccccagacctcctcagctccaggttgccacctcctctcgccagagtgatgaggtcccggcttctgctctccgtggcccatctgcccacaattcgggagaccacggaggagatgctgcttgggggtcctggacaggagcccccaccctctcctagcctggatgactacgtgaggtctatatctcgactggcacagcccacctctgtgctggacaaggccacggcccagggccaacccaggccaccccacaggccagcccaggcctgccggaagggccgccctgctgtgtccctgcgagacatcaccgcacgtttcagtggccagcagcccacactgcccatggctgatactgtggaccccctggactggctttttggggagtcccaggaaaagcagccaagccagagggacctgccaaggaggactggcccctctgctggcctctggggtccacatagacagatggacagcagcaagcccatgggggcccccagagggaggctctgtgaagccaggatgcctgggcattccctggcaagaccaccgcaggatgggcagcagagctctgacctaagaagctggacttttgggcagtctgcccaagccatggcctcccgccaccgcccccgccccagcagtgtcctcagaacactctactcgcacctcccggtgatccatgaactctgacccctccccagtaaaggcttctgtagagagcatgctgggtctgcatctcctctcgtctcctccatggtggtcactgcccctggcaggtctctgaaagggaaatgcttttctgcagaggcccctgcttgggcagttcacagtgagaccgaccccctctgaatatgataacagcctgtttcacatgaggagatgttaccaatcccgttcgctctgacccttgctggctgatcaccttgagcaacttacttaacatctgtgttcctcagtttctcatgggtaatatagggataattactggcacctgcctcccaggccattctgacgtgtaaccgcatataggagcccactggctgagtagctaccatcatcgctggtggggaaactggtggtaggggtgtgagggtagtgggggtgtcagccccccaggtgtttcagaacaaggcctcgggcactcccaagtctgcctcttggctcccaccctcaaagcccatgttctgtgaggcccaagagaacacatggagtcttagcaaatgcactaatgtattccgggggactgtcacctggcaccactggggcactctgctggctacaactcatacgtcctgtggtggcattgggagagttcccccatgatgagggccaagatagaatctgtaccactcagtgctaccatccccacccctacaccacttccacacaggggcctcatggcatggtcagggtcccagctgtgggtgagagcagggcactgtccagctgtccactggggaagtcaagatgtcctaaggcccaggtcagggcatctggagtctgaaggaccctagttcctagaggcatctggcagcaagaaggtgaggcatcagggaacgggaatcaggctgggactgatcagaggtgaagggacagagagaggagaggaggaagattgagctgggggcaacagccaagctcacctgggcaggtctctgccacctccttgctctgtgagctgtcagtctaggttattctctttttttgtggctatttttaattgctttggatttgttaaatgttttctgtcttctgttaagtgtgttttctctggagatagaatgtaaaccatattaaaaggaaaaagtttcagacaagcaattacccagtttccttatctataaaatggggacatcagcaatgttcttcacaccctgcaagggctgggaatctgcgcatgtgaacttggagctgcatttatgagcactgtagacaaatgtttgtatctgtcac

SEQ ID NO: 169731 - DNA, 1127 bp, Artificial Sequence
  derived and/or modified sequence
cacactgctcagggaagagcctgctacggtggactgtgagactcagtgcactgtcctcctcccagcgaccccacgctggaccccctgccggaccctccacccttcggcccccaagcttcccaggggcttcctttggactggactgtccctgctcatccattctcctgccacccccagacctcctcagctccaggttgccacctcctctcgccagagtgatgaggtcccggcttctgctctccgtggcccatctgcccacaattcgggagaccacggaggagatgctgcttgggggtcctggacaggagcccccaccctctcctagcctggatgactacgtgaggtctatatctcgactggcacagcccacctctgtgctggacaaggccacggcccagggccaacccaggccaccccacaggccagcccaggcctgccggaagggccgccctgctgtgtccctgctggcctctggggtccacatagacagatggacagcagcaagcccatgggggcccccagagggaggctctgtgaagccaggatgcctgggcattccctggcaagaccaccgcaggatgggcagcagagctctgacctaagaagctggacttttgggcagtctgcccaagccatggcctcccgccaccgcccccgccccagcagtgtcctcagaacactctactcgcacctcccggtgatccatgaactctgacccctccccagtaaaggcttctgtagagagcatgctgggtctgcatctcctctcgtctcctccatggtggtcactgcccctggcaggtctctgaaagggaaatgcttttctgcagaggcccctgcttgggcagttcacagtgagaccgaccccctctgaatatgataacagcctgtttcacatgaggagatgttaccaatcccgttcgctctgacccttgctggctgatcaccttgagcaacttacttaacatctgtgttcctcagtttctcatgggtaatatagggataattactggcacctgcctcccaggccattctgacgtgtaaccgcatataggagcccactggctgagtagctaccatcatcgctggtggggaaactggtggtaggggtgtgagggtagtggggg

SEQ ID NO: 169732 - DNA, 613 bp, Artificial Sequence
  derived and/or modified sequence
tgctacggtggactgtgagactcagtgcactgtcctcctcccagcgaccccacgctggaccccctgccggaccctccacccttcggcccccaagcttcccaggggcttcctttggactggactgtccctgctcatccattctcctgccacccccagacctcctcagctccaggaagaaaagatcccagcagtcggagctctggtctgggctctgtagacttcaaattgctctcagggcaccggattcctacaggcagccccagaggagtgtggtgacgctgaggggcggtgggacgcatggcaggccctcaccaccaggcttctgtttcccaacaggttgccacctcctctcgccagagtgatgaggtcccggcttctgctctccgtggcccatctgcccacaattcgggagaccacggaggagatgctgcttgggggtcctggacaggagcccccaccctctcctagcctggatgactacgtgaggtctatatctcgactggcacagcccacctctgtgctggacaaggccacggcccagggccaacccaggccaccccacaggccagcccaggcctgccggaagggccgccctgctgtgtccctgcgagac

SEQ ID NO: 169733 - DNA, 639 bp, Artificial Sequence
  derived and/or modified sequence
atgagaagcagactgctgctgagcgtggcccacctgcccaccatcagagagaccaccgaggagatgctgctgggcggccccggccaggagcccccccccagccccagcctggacgactacgtgagaagcatcagcagactggcccagcccaccagcgtgctggacaaggccaccgcccagggccagcccagacccccccacagacccgcccaggcctgcagaaagggcagacccgccgtgagcctgagagacatcaccgccagattcagcggccagcagcccaccctgcccatggccgacaccgtggaccccctggactggctgttcggcgagagccaggagaagcagcccagccagagagacctgcccagaagaaccggccccagcgccggcctgtggggcccccacagacagatggacagcagcaagcccatgggcgcccccagaggcagactgtgcgaggccagaatgcccggccacagcctggccagacccccccaggacggccagcagagcagcgacctgagaagctggaccttcggccagagcgcccaggccatggccagcagacacagacccagacccagcagcgtgctgagaaccctgtacagccacctgcccgtgatccacgagctgtag

SEQ ID NO: 169734 - DNA, 384 bp, Artificial Sequence
  derived and/or modified sequence
atgagaagcagactgctgctgagcgtggcccacctgcccaccatcagagagaccaccgaggagatgctgctgggcggccccggccaggagcccccccccagccccagcctggacgactacgtgagaagcatcagcagactggcccagcccaccagcgtgctggacaaggccaccgcccagggccagcccagacccccccacagacccgcccaggcctgcagaaagggcagacccgccgtgagcctgctggccagcggcgtgcacatcgacagatggaccgccgccagcccctggggcccccccgagggcggcagcgtgaagcccggctgcctgggcatcccctggcaggaccacagaagaatgggcagcagagccctgacctag

SEQ ID NO: 169735 - DNA, 255 bp, Artificial Sequence
  derived and/or modified sequence
atgagaagcagactgctgctgagcgtggcccacctgcccaccatcagagagaccaccgaggagatgctgctgggcggccccggccaggagcccccccccagccccagcctggacgactacgtgagaagcatcagcagactggcccagcccaccagcgtgctggacaaggccaccgcccagggccagcccagacccccccacagacccgcccaggcctgcagaaagggcagacccgccgtgagcctgagagactag

SEQ ID NO: 169736 - DNA, 639 bp, Artificial Sequence
  derived and/or modified sequence
atgcgttcccgattgctcctgagcgtggctcatctacctacaattcgcgagaccacagaggagatgctgttgggcggccctgggcaggagcccccccccagtccttcgttggatgactacgtgcggagtatatccaggctcgctcagcccactagtgtgctggacaaggctaccgcccagggccagcctcgaccaccccatcgtcccgctcaagcctgcaggaaggggaggcccgccgtttctctcagggatattacagcccggtttagtggacagcagcctactctgccaatggccgatactgtcgatccactggattggctcttcggtgaaagtcaggagaagcagcctagccagcgcgatctcccacggcgtacagggcctagtgctggtctctggggacctcatcgccagatggactcttcgaaacccatgggtgccccaaggggaagactgtgcgaggcaaggatgcctgggcactccctcgctaggcctcctcaggatggacagcagtcaagcgaccttcggagttggacatttggccagagtgcgcaggcaatggcttctcgtcataggcctaggccctcctcagtgcttcggaccttgtacagccacttgccagtcattcacgagctgtag

SEQ ID NO: 169737 - DNA, 384 bp, Artificial Sequence
  derived and/or modified sequence
atgcgtagccgcttattactgtctgtggcacacctcccaacaatccgcgaaaccacagaggagatgctgttgggaggcccagggcaggagccccctcccagtccttctttggatgattatgtgagatccatttccaggctcgctcagcctacttctgttttagacaaagccaccgctcagggccaacccagaccacctcatcgacccgcccaggcatgccgtaagggacgcccggccgtgagtctcctggcctcaggcgtgcacatcgacagatggactgcagctagtccatgggggccgccggaaggcggatccgtcaaaccaggctgcctcggtatcccctggcaggaccacaggcggatgggatccagggctttgacatag

SEQ ID NO: 169738 - DNA, 255 bp, Artificial Sequence
  derived and/or modified sequence
atgcgaagtcggcttctcctgtctgtggcccacctccctacaattcgcgaaaccaccgaggagatgctgctagggggccccgggcaggagcccccccctagcccttccttggacgactatgtacgctcaatctcacggttagcccagcctacctctgtgcttgataaagccaccgcacaggggcaacctcggccaccccatcgcccggcccaggcttgtcgtaaaggccggcccgctgtgtccctgcgggattag

SEQ ID NO: 169739 - DNA, 639 bp, Artificial Sequence
  derived and/or modified sequence
atgaggagccggctgctgctgtctgtggcccacctgcccaccatccgggagaccacagaggagatgctgctgggcggccctggccaggagcccccacccagccccagcctggatgattatgtgcgcagcatcagccggctggcccagcccacctctgtgctggacaaggccacagcccagggccagcccaggcctccccacaggcctgcccaggcctgcaggaagggccggcctgctgtgtccctgcgggacatcacagcccgcttcagcggccagcagcccaccctgcccatggctgacacagtggaccccctggactggctgtttggagagagccaggagaagcagcccagccagagggacctgcccaggagaacaggccccagcgctggcctgtggggcccccaccggcagatggacagcagcaagcccatgggcgccccccggggccgcctgtgtgaggccaggatgcctggccacagcctggcccggcccccccaggacggccagcagagcagtgacctgcgctcctggaccttcggccagagcgcccaggccatggccagccgccaccggccccggcccagctctgtgctgcggaccctgtacagccacctgcctgtgatccacgagctgtag

SEQ ID NO: 169740 - DNA, 384 bp, Artificial Sequence
  derived and/or modified sequence
atgaggagccggctgctgctgtctgtggcccacctgcccaccatccgggagaccacagaggagatgctgctgggcggccctggccaggagcccccacccagccccagcctggatgattatgtgcgcagcatcagccggctggcccagcccacctctgtgctggacaaggccacagcccagggccagcccaggcctccccacaggcctgcccaggcctgcaggaagggccggcctgctgtgtccctgctggccagcggcgtgcacatcgaccgctggacagctgccagcccctggggccccccagagggcggctctgtgaagccaggctgcctgggcatcccctggcaggaccacaggaggatgggcagccgggccctgacctag

SEQ ID NO: 169741 - DNA, 255 bp, Artificial Sequence
  derived and/or modified sequence
atgaggagccggctgctgctgtctgtggcccacctgcccaccatccgggagaccacagaggagatgctgctgggcggccctggccaggagcccccacccagccccagcctggatgattatgtgcgcagcatcagccggctggcccagcccacctctgtgctggacaaggccacagcccagggccagcccaggcctccccacaggcctgcccaggcctgcaggaagggccggcctgctgtgtccctgcgggactag

SEQ ID NO: 169742 - DNA, 639 bp, Artificial Sequence
  derived and/or modified sequence
atgcggagccggctgctgctgagcgtggcccacctgcccaccatcagggaaacgactgaggaaatgctcctgggaggcccgggtcaggaaccccccccctcccccagcttggatgactatgttaggtcaatcagtcgtttggctcaacccacaagcgtgctggacaaagcaacagcccagggtcagccgcggccgccccatagaccagctcaagcatgcaggaaggggcgcccggctgtgtctctcagagacattacagccagattctccggccagcaacctaccctgcctatggccgacactgttgatccgctagattggttgtttggtgagtcccaggagaagcagcctagccagcgggatttaccacgacgcaccggcccctcagctggcctgtggggtccccatcgccaaatggactcttctaaacccatgggagctccacgaggtcgtttgtgcgaagcccgcatgccaggccattctttggccaggcccccacaagacggtcaacaatcctctgatcttcggtcatggacattcggccagagtgcccaggccatggcatcaagacaccggccaaggcctagctcagtcctcagaacactgtatagccatttgcctgtgatccatgaactgtag

SEQ ID NO: 169743 - DNA, 384 bp, Artificial Sequence
  derived and/or modified sequence
atgcggagccggctgctgctgagcgtggcccacctgcccaccatccgggagactactgaagaaatgctgctcggaggcccaggccaggagccgccaccctccccaagtctggatgactatgtgaggagcatttctagactcgcccagcccacatctgtgctcgataaagcaacggcccaaggccaacccaggcccccacatcgccctgcgcaggcctgtcgcaagggtcgcccggcggtgtcactcctggcaagcggagtccacattgacagatggaccgccgcctcaccatggggacctcctgaaggggggtctgttaaacccggctgtttgggaataccgtggcaggaccatcgtagaatgggttctagggctcttacgtag

SEQ ID NO: 169744 - DNA, 255 bp, Artificial Sequence
  derived and/or modified sequence
atgcggagccggctgctgctgagcgtggcccacctgcccaccatccgcgagactacggaagagatgcttctgggtggacccgggcaggaacctccaccatctccctccctggacgactacgttagatcaatctccagattggcacagcccactagcgttctggacaaggcaaccgcccagggacagccaaggcccccgcacagaccagcgcaggcatgcaggaaaggtcgccccgctgtgtccttgcgcgactag

SEQ ID NO: 169745 - DNA, 639 bp, Artificial Sequence
  derived and/or modified sequence
atgaggtcgagactgctcctcagcgtcgcccatcttcctactatcagagagacgaccgaggagatgcttctcggtggacccggacaggagcctcctccatccccgtccttggatgattacgtgaggtcaatttctagacttgctcagcccacaagcgtgctagacaaggccactgcccaaggtcagccaagaccccctcaccgacccgctcaggcctgccggaaaggacgccctgctgtcagcctccgggacattaccgcacgcttttctggacagcaacccaccctgcctatggccgatactgtggaccctctggattggctgtttggcgaaagtcaggaaaagcaaccatcacagagagacctgcctagacgcactggacccagcgccggtctgtggggaccccaccgccagatggattcctctaagccgatgggagcgcctcgtggaagattgtgcgaggctcggatgcctggtcattcacttgccaggcctcctcaggatgggcagcaaagttcagacctgaggagctggacctttggccagagtgcgcaagctatggcgtcgcgccacaggcctcgcccatcaagtgtactgcgaactctttatagtcacctccccgtcattcacgaactctag

SEQ ID NO: 169746 - DNA, 384 bp, Artificial Sequence
  derived and/or modified sequence
atgcggtcgcgactgttattgtctgtagctcacctcccaactataagggaaactaccgaggagatgctgctggggggacccggtcaggagcccccacccagcccgtccctggacgactacgtgagatccataagtcgtctggcccaacccacgtctgtgttggataaggcgacggcccagggtcaaccacggcctcctcaccgcccagcccaagcttgtaggaagggccgacccgctgtgagtttgctggcttcgggcgtacatatcgatcgctggaccgctgccagtccatggggtccgcctgagggcggttcagtgaaacctgggtgcttgggcattccctggcaagaccacagacgcatgggtagtagggccctgacctag

SEQ ID NO: 169747 - DNA, 255 bp, Artificial Sequence
  derived and/or modified sequence
atgagaagccggctgctcctgtctgtcgcccacctccctaccattcgagagaccacagaagagatgctgcttggaggcccaggtcaagagcctccaccatcaccctccctggacgattatgtacgaagcatttctcgtttagcacagcccacaagcgtgctcgacaaggccacagcgcaaggccaacccaggcccccacaccgcccagcccaggcctgccggaaaggtcgacctgcagtgtccttacgcgactag

SEQ ID NO: 169748 - protein, 1010 aa, Artificial Sequence
  derived and/or modified sequence
MVAAHAAHSSSSAEWIACLDKRPLERSSEDVDIIFTRLKEVKAFEKFHPNLLHQICLCGYYENLEKGITLFRQGDIGTNWYAVLAGSLDVKVSETSSHQDAVTICTLGIGTAFGESILDNTPRHATIVTRESSELLRIEQKDFKALWEKYRQYMAGLLAPPYGVMETGSNNDNIFKEMTPLIEPHVPLRPANTITKVPSEKILRAGKILRNAILSRAPHMIRDRKYHLKTYRQCCVGTELVDWMMQQTPCVHSRTQAVGMWQVLLEDGVLNHVDQEHHFQDKYLFYRFLDDEHEDAPLPTEEEKKECDEELQDTMLLLSQMGPDAHMRMILRKPPGQRTVDDLEIIYEELLHIKALSHLSTTVKRELAGVLIFESHAKGGTVLFNQGEEGTSWYIILKGSVNVVIYGKGVVCTLHEGDDFGKLALVNDAPRAASIVLREDNCHFLRVDKEDFNRILRDVEANTVRLKEHDQDVLVLEKVPAGNRASNQGNSQPQQKYTVMSGTPEKILEHFLETIRLEATLNEATDSVLNDFIMMHCVFMPNTQLCPALVAHYHAQPSQGTEQEKMDYALNNKRRVIRLVLQWAAMYGDLLQEDDVSMAFLEEFYVSVSDDARMIAALKEQLPELEKIVKQISEDAKAPQKKHKVLLQQFNTGDERAQKRQPIRGSDEVLFKVYCMDHTYTTIRVPVATSVKEVISAVADKLGSGEGLIIVKMSSGGEKVVLKPNDVSVFTTLTINGRLFACPREQFDSLTPLPEQEGPTVGTVGTFELMSSKDLAYQMTIYDWELFNCVHELELIYHTFGRHNFKKTTANLDLFLRRFNEIQFWVVTEICLCSQLSKRVQLLKKFIKIAAHCKEYKNLNSFFAIVMGLSNVAVSRLALTWEKLPSKFKKFYAEFESLMDPSRNHRAYRLTVAKLEPPLIPFMPLLIKDMTFTHEGNKTFIDNLVNFEKMRMIANTARTVRYYRSQPFNPDAAQANKNHQDVRSYVRQLNVIDNQRTLSQMSHRLEPRRP

SEQ ID NO: 169749 - protein, 1011 aa, Artificial Sequence
  derived and/or modified sequence
MVAAHAAHSSSSAEWIACLDKRPLERSSEDVDIIFTRLKEVKAFEKFHPNLLHQICLCGYYENLEKGITLFRQGDIGTNWYAVLAGSLDVKVSETSSHQDAVTICTLGIGTAFGESILDNTPRHATIVTRESSELLRIEQKDFKALWEKYRQYMAGLLAPPYGVMETGSNNDRIPDKENTPLIEPHVPLRPANTITKVPSEKILRAGKILRNAILSRAPHMIRDRKYHLKTYRQCCVGTELVDWMMQQTPCVHSRTQAVGMWQVLLEDGVLNHVDQEHHFQDKYLFYRFLDDEHEDAPLPTEEEKKECDEELQDTMLLLSQMGPDAHMRMILRKPPGQRTVDDLEIIYEELLHIKALSHLSTTVKRELAGVLIFESHAKGGTVLFNQGEEGTSWYIILKGSVNVVIYGKGVVCTLHEGDDFGKLALVNDAPRAASIVLREDNCHFLRVDKEDFNRILRDVEANTVRLKEHDQDVLVLEKVPAGNRASNQGNSQPQQKYTVMSGTPEKILEHFLETIRLEATLNEATDSVLNDFIMMHCVFMPNTQLCPALVAHYHAQPSQGTEQEKMDYALNNKRRVIRLVLQWAAMYGDLLQEDDVSMAFLEEFYVSVSDDARMIAALKEQLPELEKIVKQISEDAKAPQKKHKVLLQQFNTGDERAQKRQPIRGSDEVLFKVYCMDHTYTTIRVPVATSVKEVISAVADKLGSGEGLIIVKMSSGGEKVVLKPNDVSVFTTLTINGRLFACPREQFDSLTPLPEQEGPTVGTVGTFELMSSKDLAYQMTIYDWELFNCVHELELIYHTFGRHNFKKTTANLDLFLRRFNEIQFWVVTEICLCSQLSKRVQLLKKFIKIAAHCKEYKNLNSFFAIVMGLSNVAVSRLALTWEKLPSKFKKFYAEFESLMDPSRNHRAYRLTVAKLEPPLIPFMPLLIKDMTFTHEGNKTFIDNLVNFEKMRMIANTARTVRYYRSQPFNPDAAQANKNHQDVRSYVRQLNVIDNQRTLSQMSHRLEPRRP

SEQ ID NO: 169750 - protein, 943 aa, Artificial Sequence
  derived and/or modified sequence
MVAAHAAHSSSSAEWIACLDKRPLERSSEDVDIIFTRLKEVKAFEKFHPNLLHQICLCGYYENLEKGITLFRQGDIGTNWYAVLAGSLDVKVSETSSHQDAVTICTLGIGTAFGESILDNTPRHATIVTRESSELLRIEQKDFKALWEKYRQYMAGLLAPPYGVMETGSNNDRIPDKENTPLIEPHVPLRPANTITKVPSEKILRAGKILRNAILSRAPHMIRDRKYHLKTYRQCCVGTELVDWMMQQTPCVHSRTQAVGMWQVLLEDGVLNHVDQEHHFQDKYLFYRFLDDEHEDAPLPTEEEKKECDEELQDTMLLLSQMGPDAHMRMILRKPPGQRTVDDLEIIYEELLHIKALSHLSTTVKRELAGVLIFESHAKGGTVLFNQGEEGTSWYIILKGSVNVVIYGKGVVCTLHEGDDFGKLALVNDAPRAASIVLREDNCHFLRVDKEDFNRILRDVEANTVRLKEHDQDVLVLEKVPAGNRASNQGNSQPQQKYTVMSGTPEKILEHFLETIRLEATLNEATDSVLNDFIMMHCVFMPNTQLCPALVAHYHAQPSQGTEQEKMDYALNNKRRVIRLVLQWAAMYGDLLQEDDVSMAFLEEFYVSVSDDARMIAALKEQLPELEKIVKQISEDAKAPQKKHKVLLQQFNTGDERAQKRQPIRGSDEVLFKVYCMDHTYTTIRVPVATSVKEVISAVADKLGSGEGLIIVKMSSGGEKVVLKPNDVSVFTTLTINGRLFACPREQFDSLTPLPEQEGPTVGTVGTFELMSSKDLAYQMTIYDWELFNCVHELELIYHTFGRHNFKKTTANLDLFLRRFNEIQFWVVTEICLCSQLSKRVQLLKKFIKIAAHCKEYKNLNSFFAIVMGLSNVAVSRLALTWERMIANTARTVRYYRSQPFNPDAAQANKNHQDVRSYVRQLNVIDNQRTLSQMSHRLEPRRP

SEQ ID NO: 169751 - DNA, 3033 bp, Artificial Sequence
  derived and/or modified sequence
atggtggccgcccacgccgcccacagcagcagcagcgccgagtggatcgcctgcctggacaagagacccctggagagaagcagcgaggacgtggacatcatcttcaccagactgaaggaggtgaaggccttcgagaagttccaccccaacctgctgcaccagatctgcctgtgcggctactacgagaacctggagaagggcatcaccctgttcagacagggcgacatcggcaccaactggtacgccgtgctggccggcagcctggacgtgaaggtgagcgagaccagcagccaccaggacgccgtgaccatctgcaccctgggcatcggcaccgccttcggcgagagcatcctggacaacacccccagacacgccaccatcgtgaccagagagagcagcgagctgctgagaatcgagcagaaggacttcaaggccctgtgggagaagtacagacagtacatggccggcctgctggcccccccctacggcgtgatggagaccggcagcaacaacgacaacatcttcaaggagatgacccccctgatcgagccccacgtgcccctgagacccgccaacaccatcaccaaggtgcccagcgagaagatcctgagagccggcaagatcctgagaaacgccatcctgagcagagccccccacatgatcagagacagaaagtaccacctgaagacctacagacagtgctgcgtgggcaccgagctggtggactggatgatgcagcagaccccctgcgtgcacagcagaacccaggccgtgggcatgtggcaggtgctgctggaggacggcgtgctgaaccacgtggaccaggagcaccacttccaggacaagtacctgttctacagattcctggacgacgagcacgaggacgcccccctgcccaccgaggaggagaagaaggagtgcgacgaggagctgcaggacaccatgctgctgctgagccagatgggccccgacgcccacatgagaatgatcctgagaaagccccccggccagagaaccgtggacgacctggagatcatctacgaggagctgctgcacatcaaggccctgagccacctgagcaccaccgtgaagagagagctggccggcgtgctgatcttcgagagccacgccaagggcggcaccgtgctgttcaaccagggcgaggagggcaccagctggtacatcatcctgaagggcagcgtgaacgtggtgatctacggcaagggcgtggtgtgcaccctgcacgagggcgacgacttcggcaagctggccctggtgaacgacgcccccagagccgccagcatcgtgctgagagaggacaactgccacttcctgagagtggacaaggaggacttcaacagaatcctgagagacgtggaggccaacaccgtgagactgaaggagcacgaccaggacgtgctggtgctggagaaggtgcccgccggcaacagagccagcaaccagggcaacagccagccccagcagaagtacaccgtgatgagcggcacccccgagaagatcctggagcacttcctggagaccatcagactggaggccaccctgaacgaggccaccgacagcgtgctgaacgacttcatcatgatgcactgcgtgttcatgcccaacacccagctgtgccccgccctggtggcccactaccacgcccagcccagccagggcaccgagcaggagaagatggactacgccctgaacaacaagagaagagtgatcagactggtgctgcagtgggccgccatgtacggcgacctgctgcaggaggacgacgtgagcatggccttcctggaggagttctacgtgagcgtgagcgacgacgccagaatgatcgccgccctgaaggagcagctgcccgagctggagaagatcgtgaagcagatcagcgaggacgccaaggccccccagaagaagcacaaggtgctgctgcagcagttcaacaccggcgacgagagagcccagaagagacagcccatcagaggcagcgacgaggtgctgttcaaggtgtactgcatggaccacacctacaccaccatcagagtgcccgtggccaccagcgtgaaggaggtgatcagcgccgtggccgacaagctgggcagcggcgagggcctgatcatcgtgaagatgagcagcggcggcgagaaggtggtgctgaagcccaacgacgtgagcgtgttcaccaccctgaccatcaacggcagactgttcgcctgccccagagagcagttcgacagcctgacccccctgcccgagcaggagggccccaccgtgggcaccgtgggcaccttcgagctgatgagcagcaaggacctggcctaccagatgaccatctacgactgggagctgttcaactgcgtgcacgagctggagctgatctaccacaccttcggcagacacaacttcaagaagaccaccgccaacctggacctgttcctgagaagattcaacgagatccagttctgggtggtgaccgagatctgcctgtgcagccagctgagcaagagagtgcagctgctgaagaagttcatcaagatcgccgcccactgcaaggagtacaagaacctgaacagcttcttcgccatcgtgatgggcctgagcaacgtggccgtgagcagactggccctgacctgggagaagctgcccagcaagttcaagaagttctacgccgagttcgagagcctgatggaccccagcagaaaccacagagcctacagactgaccgtggccaagctggagccccccctgatccccttcatgcccctgctgatcaaggacatgaccttcacccacgagggcaacaagaccttcatcgacaacctggtgaacttcgagaagatgagaatgatcgccaacaccgccagaaccgtgagatactacagaagccagcccttcaaccccgacgccgcccaggccaacaagaaccaccaggacgtgagaagctacgtgagacagctgaacgtgatcgacaaccagagaaccctgagccagatgagccacagactggagcccagaagaccctag

SEQ ID NO: 169752 - DNA, 3036 bp, Artificial Sequence
  derived and/or modified sequence
atggtggccgcccacgccgcccacagcagcagcagcgccgagtggatcgcctgcctggacaagagacccctggagagaagcagcgaggacgtggacatcatcttcaccagactgaaggaggtgaaggccttcgagaagttccaccccaacctgctgcaccagatctgcctgtgcggctactacgagaacctggagaagggcatcaccctgttcagacagggcgacatcggcaccaactggtacgccgtgctggccggcagcctggacgtgaaggtgagcgagaccagcagccaccaggacgccgtgaccatctgcaccctgggcatcggcaccgccttcggcgagagcatcctggacaacacccccagacacgccaccatcgtgaccagagagagcagcgagctgctgagaatcgagcagaaggacttcaaggccctgtgggagaagtacagacagtacatggccggcctgctggcccccccctacggcgtgatggagaccggcagcaacaacgacagaatccccgacaaggagaacacccccctgatcgagccccacgtgcccctgagacccgccaacaccatcaccaaggtgcccagcgagaagatcctgagagccggcaagatcctgagaaacgccatcctgagcagagccccccacatgatcagagacagaaagtaccacctgaagacctacagacagtgctgcgtgggcaccgagctggtggactggatgatgcagcagaccccctgcgtgcacagcagaacccaggccgtgggcatgtggcaggtgctgctggaggacggcgtgctgaaccacgtggaccaggagcaccacttccaggacaagtacctgttctacagattcctggacgacgagcacgaggacgcccccctgcccaccgaggaggagaagaaggagtgcgacgaggagctgcaggacaccatgctgctgctgagccagatgggccccgacgcccacatgagaatgatcctgagaaagccccccggccagagaaccgtggacgacctggagatcatctacgaggagctgctgcacatcaaggccctgagccacctgagcaccaccgtgaagagagagctggccggcgtgctgatcttcgagagccacgccaagggcggcaccgtgctgttcaaccagggcgaggagggcaccagctggtacatcatcctgaagggcagcgtgaacgtggtgatctacggcaagggcgtggtgtgcaccctgcacgagggcgacgacttcggcaagctggccctggtgaacgacgcccccagagccgccagcatcgtgctgagagaggacaactgccacttcctgagagtggacaaggaggacttcaacagaatcctgagagacgtggaggccaacaccgtgagactgaaggagcacgaccaggacgtgctggtgctggagaaggtgcccgccggcaacagagccagcaaccagggcaacagccagccccagcagaagtacaccgtgatgagcggcacccccgagaagatcctggagcacttcctggagaccatcagactggaggccaccctgaacgaggccaccgacagcgtgctgaacgacttcatcatgatgcactgcgtgttcatgcccaacacccagctgtgccccgccctggtggcccactaccacgcccagcccagccagggcaccgagcaggagaagatggactacgccctgaacaacaagagaagagtgatcagactggtgctgcagtgggccgccatgtacggcgacctgctgcaggaggacgacgtgagcatggccttcctggaggagttctacgtgagcgtgagcgacgacgccagaatgatcgccgccctgaaggagcagctgcccgagctggagaagatcgtgaagcagatcagcgaggacgccaaggccccccagaagaagcacaaggtgctgctgcagcagttcaacaccggcgacgagagagcccagaagagacagcccatcagaggcagcgacgaggtgctgttcaaggtgtactgcatggaccacacctacaccaccatcagagtgcccgtggccaccagcgtgaaggaggtgatcagcgccgtggccgacaagctgggcagcggcgagggcctgatcatcgtgaagatgagcagcggcggcgagaaggtggtgctgaagcccaacgacgtgagcgtgttcaccaccctgaccatcaacggcagactgttcgcctgccccagagagcagttcgacagcctgacccccctgcccgagcaggagggccccaccgtgggcaccgtgggcaccttcgagctgatgagcagcaaggacctggcctaccagatgaccatctacgactgggagctgttcaactgcgtgcacgagctggagctgatctaccacaccttcggcagacacaacttcaagaagaccaccgccaacctggacctgttcctgagaagattcaacgagatccagttctgggtggtgaccgagatctgcctgtgcagccagctgagcaagagagtgcagctgctgaagaagttcatcaagatcgccgcccactgcaaggagtacaagaacctgaacagcttcttcgccatcgtgatgggcctgagcaacgtggccgtgagcagactggccctgacctgggagaagctgcccagcaagttcaagaagttctacgccgagttcgagagcctgatggaccccagcagaaaccacagagcctacagactgaccgtggccaagctggagccccccctgatccccttcatgcccctgctgatcaaggacatgaccttcacccacgagggcaacaagaccttcatcgacaacctggtgaacttcgagaagatgagaatgatcgccaacaccgccagaaccgtgagatactacagaagccagcccttcaaccccgacgccgcccaggccaacaagaaccaccaggacgtgagaagctacgtgagacagctgaacgtgatcgacaaccagagaaccctgagccagatgagccacagactggagcccagaagaccctag

SEQ ID NO: 169753 - DNA, 2832 bp, Artificial Sequence
  derived and/or modified sequence
atggtggccgcccacgccgcccacagcagcagcagcgccgagtggatcgcctgcctggacaagagacccctggagagaagcagcgaggacgtggacatcatcttcaccagactgaaggaggtgaaggccttcgagaagttccaccccaacctgctgcaccagatctgcctgtgcggctactacgagaacctggagaagggcatcaccctgttcagacagggcgacatcggcaccaactggtacgccgtgctggccggcagcctggacgtgaaggtgagcgagaccagcagccaccaggacgccgtgaccatctgcaccctgggcatcggcaccgccttcggcgagagcatcctggacaacacccccagacacgccaccatcgtgaccagagagagcagcgagctgctgagaatcgagcagaaggacttcaaggccctgtgggagaagtacagacagtacatggccggcctgctggcccccccctacggcgtgatggagaccggcagcaacaacgacagaatccccgacaaggagaacacccccctgatcgagccccacgtgcccctgagacccgccaacaccatcaccaaggtgcccagcgagaagatcctgagagccggcaagatcctgagaaacgccatcctgagcagagccccccacatgatcagagacagaaagtaccacctgaagacctacagacagtgctgcgtgggcaccgagctggtggactggatgatgcagcagaccccctgcgtgcacagcagaacccaggccgtgggcatgtggcaggtgctgctggaggacggcgtgctgaaccacgtggaccaggagcaccacttccaggacaagtacctgttctacagattcctggacgacgagcacgaggacgcccccctgcccaccgaggaggagaagaaggagtgcgacgaggagctgcaggacaccatgctgctgctgagccagatgggccccgacgcccacatgagaatgatcctgagaaagccccccggccagagaaccgtggacgacctggagatcatctacgaggagctgctgcacatcaaggccctgagccacctgagcaccaccgtgaagagagagctggccggcgtgctgatcttcgagagccacgccaagggcggcaccgtgctgttcaaccagggcgaggagggcaccagctggtacatcatcctgaagggcagcgtgaacgtggtgatctacggcaagggcgtggtgtgcaccctgcacgagggcgacgacttcggcaagctggccctggtgaacgacgcccccagagccgccagcatcgtgctgagagaggacaactgccacttcctgagagtggacaaggaggacttcaacagaatcctgagagacgtggaggccaacaccgtgagactgaaggagcacgaccaggacgtgctggtgctggagaaggtgcccgccggcaacagagccagcaaccagggcaacagccagccccagcagaagtacaccgtgatgagcggcacccccgagaagatcctggagcacttcctggagaccatcagactggaggccaccctgaacgaggccaccgacagcgtgctgaacgacttcatcatgatgcactgcgtgttcatgcccaacacccagctgtgccccgccctggtggcccactaccacgcccagcccagccagggcaccgagcaggagaagatggactacgccctgaacaacaagagaagagtgatcagactggtgctgcagtgggccgccatgtacggcgacctgctgcaggaggacgacgtgagcatggccttcctggaggagttctacgtgagcgtgagcgacgacgccagaatgatcgccgccctgaaggagcagctgcccgagctggagaagatcgtgaagcagatcagcgaggacgccaaggccccccagaagaagcacaaggtgctgctgcagcagttcaacaccggcgacgagagagcccagaagagacagcccatcagaggcagcgacgaggtgctgttcaaggtgtactgcatggaccacacctacaccaccatcagagtgcccgtggccaccagcgtgaaggaggtgatcagcgccgtggccgacaagctgggcagcggcgagggcctgatcatcgtgaagatgagcagcggcggcgagaaggtggtgctgaagcccaacgacgtgagcgtgttcaccaccctgaccatcaacggcagactgttcgcctgccccagagagcagttcgacagcctgacccccctgcccgagcaggagggccccaccgtgggcaccgtgggcaccttcgagctgatgagcagcaaggacctggcctaccagatgaccatctacgactgggagctgttcaactgcgtgcacgagctggagctgatctaccacaccttcggcagacacaacttcaagaagaccaccgccaacctggacctgttcctgagaagattcaacgagatccagttctgggtggtgaccgagatctgcctgtgcagccagctgagcaagagagtgcagctgctgaagaagttcatcaagatcgccgcccactgcaaggagtacaagaacctgaacagcttcttcgccatcgtgatgggcctgagcaacgtggccgtgagcagactggccctgacctgggagagaatgatcgccaacaccgccagaaccgtgagatactacagaagccagcccttcaaccccgacgccgcccaggccaacaagaaccaccaggacgtgagaagctacgtgagacagctgaacgtgatcgacaaccagagaaccctgagccagatgagccacagactggagcccagaagaccctag

SEQ ID NO: 169754 - DNA, 2376 bp, Artificial Sequence
  derived and/or modified sequence
atgatcagagacagaaagtaccacctgaagacctacagacagtgctgcgtgggcaccgagctggtggactggatgatgcagcagaccccctgcgtgcacagcagaacccaggccgtgggcatgtggcaggtgctgctggaggacggcgtgctgaaccacgtggaccaggagcaccacttccaggacaagtacctgttctacagattcctggacgacgagcacgaggacgcccccctgcccaccgaggaggagaagaaggagtgcgacgaggagctgcaggacaccatgctgctgctgagccagatgggccccgacgcccacatgagaatgatcctgagaaagccccccggccagagaaccgtggacgacctggagatcatctacgaggagctgctgcacatcaaggccctgagccacctgagcaccaccgtgaagagagagctggccggcgtgctgatcttcgagagccacgccaagggcggcaccgtgctgttcaaccagggcgaggagggcaccagctggtacatcatcctgaagggcagcgtgaacgtggtgatctacggcaagggcgtggtgtgcaccctgcacgagggcgacgacttcggcaagctggccctggtgaacgacgcccccagagccgccagcatcgtgctgagagaggacaactgccacttcctgagagtggacaaggaggacttcaacagaatcctgagagacgtggaggccaacaccgtgagactgaaggagcacgaccaggacgtgctggtgctggagaaggtgcccgccggcaacagagccagcaaccagggcaacagccagccccagcagaagtacaccgtgatgagcggcacccccgagaagatcctggagcacttcctggagaccatcagactggaggccaccctgaacgaggccaccgacagcgtgctgaacgacttcatcatgatgcactgcgtgttcatgcccaacacccagctgtgccccgccctggtggcccactaccacgcccagcccagccagggcaccgagcaggagaagatggactacgccctgaacaacaagagaagagtgatcagactggtgctgcagtgggccgccatgtacggcgacctgctgcaggaggacgacgtgagcatggccttcctggaggagttctacgtgagcgtgagcgacgacgccagaatgatcgccgccctgaaggagcagctgcccgagctggagaagatcgtgaagcagatcagcgaggacgccaaggccccccagaagaagcacaaggtgctgctgcagcagttcaacaccggcgacgagagagcccagaagagacagcccatcagaggcagcgacgaggtgctgttcaaggtgtactgcatggaccacacctacaccaccatcagagtgcccgtggccaccagcgtgaaggaggtgatcagcgccgtggccgacaagctgggcagcggcgagggcctgatcatcgtgaagatgagcagcggcggcgagaaggtggtgctgaagcccaacgacgtgagcgtgttcaccaccctgaccatcaacggcagactgttcgcctgccccagagagcagttcgacagcctgacccccctgcccgagcaggagggccccaccgtgggcaccgtgggcaccttcgagctgatgagcagcaaggacctggcctaccagatgaccatctacgactgggagctgttcaactgcgtgcacgagctggagctgatctaccacaccttcggcagacacaacttcaagaagaccaccgccaacctggacctgttcctgagaagattcaacgagatccagttctgggtggtgaccgagatctgcctgtgcagccagctgagcaagagagtgcagctgctgaagaagttcatcaagatcgccgcccactgcaaggagtacaagaacctgaacagcttcttcgccatcgtgatgggcctgagcaacgtggccgtgagcagactggccctgacctgggagaagctgcccagcaagttcaagaagttctacgccgagttcgagagcctgatggaccccagcagaaaccacagagcctacagactgaccgtggccaagctggagccccccctgatccccttcatgcccctgctgatcaaggacatgaccttcacccacgagggcaacaagaccttcatcgacaacctggtgaacttcgagaagatgagaatgatcgccaacaccgccagaaccgtgagatactacagaagccagcccttcaaccccgacgccgcccaggccaacaagaaccaccaggacgtgagaagctacgtgagacagctgaacgtgatcgacaaccagagaaccctgagccagatgagccacagactggagcccagaagaccctag

SEQ ID NO: 169755 - DNA, 2577 bp, Artificial Sequence
  derived and/or modified sequence
atggccggcctgctggcccccccctacggcgtgatggagaccggcagcaacaacgacagaatccccgacaaggagaacacccccctgatcgagccccacgtgcccctgagacccgccaacaccatcaccaaggtgcccagcgagaagatcctgagagccggcaagatcctgagaaacgccatcctgagcagagccccccacatgatcagagacagaaagtaccacctgaagacctacagacagtgctgcgtgggcaccgagctggtggactggatgatgcagcagaccccctgcgtgcacagcagaacccaggccgtgggcatgtggcaggtgctgctggaggacggcgtgctgaaccacgtggaccaggagcaccacttccaggacaagtacctgttctacagattcctggacgacgagcacgaggacgcccccctgcccaccgaggaggagaagaaggagtgcgacgaggagctgcaggacaccatgctgctgctgagccagatgggccccgacgcccacatgagaatgatcctgagaaagccccccggccagagaaccgtggacgacctggagatcatctacgaggagctgctgcacatcaaggccctgagccacctgagcaccaccgtgaagagagagctggccggcgtgctgatcttcgagagccacgccaagggcggcaccgtgctgttcaaccagggcgaggagggcaccagctggtacatcatcctgaagggcagcgtgaacgtggtgatctacggcaagggcgtggtgtgcaccctgcacgagggcgacgacttcggcaagctggccctggtgaacgacgcccccagagccgccagcatcgtgctgagagaggacaactgccacttcctgagagtggacaaggaggacttcaacagaatcctgagagacgtggaggccaacaccgtgagactgaaggagcacgaccaggacgtgctggtgctggagaaggtgcccgccggcaacagagccagcaaccagggcaacagccagccccagcagaagtacaccgtgatgagcggcacccccgagaagatcctggagcacttcctggagaccatcagactggaggccaccctgaacgaggccaccgacagcgtgctgaacgacttcatcatgatgcactgcgtgttcatgcccaacacccagctgtgccccgccctggtggcccactaccacgcccagcccagccagggcaccgagcaggagaagatggactacgccctgaacaacaagagaagagtgatcagactggtgctgcagtgggccgccatgtacggcgacctgctgcaggaggacgacgtgagcatggccttcctggaggagttctacgtgagcgtgagcgacgacgccagaatgatcgccgccctgaaggagcagctgcccgagctggagaagatcgtgaagcagatcagcgaggacgccaaggccccccagaagaagcacaaggtgctgctgcagcagttcaacaccggcgacgagagagcccagaagagacagcccatcagaggcagcgacgaggtgctgttcaaggtgtactgcatggaccacacctacaccaccatcagagtgcccgtggccaccagcgtgaaggaggtgatcagcgccgtggccgacaagctgggcagcggcgagggcctgatcatcgtgaagatgagcagcggcggcgagaaggtggtgctgaagcccaacgacgtgagcgtgttcaccaccctgaccatcaacggcagactgttcgcctgccccagagagcagttcgacagcctgacccccctgcccgagcaggagggccccaccgtgggcaccgtgggcaccttcgagctgatgagcagcaaggacctggcctaccagatgaccatctacgactgggagctgttcaactgcgtgcacgagctggagctgatctaccacaccttcggcagacacaacttcaagaagaccaccgccaacctggacctgttcctgagaagattcaacgagatccagttctgggtggtgaccgagatctgcctgtgcagccagctgagcaagagagtgcagctgctgaagaagttcatcaagatcgccgcccactgcaaggagtacaagaacctgaacagcttcttcgccatcgtgatgggcctgagcaacgtggccgtgagcagactggccctgacctgggagaagctgcccagcaagttcaagaagttctacgccgagttcgagagcctgatggaccccagcagaaaccacagagcctacagactgaccgtggccaagctggagccccccctgatccccttcatgcccctgctgatcaaggacatgaccttcacccacgagggcaacaagaccttcatcgacaacctggtgaacttcgagaagatgagaatgatcgccaacaccgccagaaccgtgagatactacagaagccagcccttcaaccccgacgccgcccaggccaacaagaaccaccaggacgtgagaagctacgtgagacagctgaacgtgatcgacaaccagagaaccctgagccagatgagccacagactggagcccagaagaccctag

SEQ ID NO: 169756 - DNA, 3033 bp, Artificial Sequence
  derived and/or modified sequence
atggttgccgcccatgccgcccactcttcttcctcagccgagtggatcgcctgcttagacaagcggcccctagagcggtctagtgaagatgttgatatcatcttcaccaggctgaaagaggtcaaagcttttgagaagttccaccccaaccttctgcatcagatctgtctgtgtggctactacgagaacctcgagaagggcatcactctgttcagacagggggacatcggaacgaactggtatgccgtgctcgctggtagccttgacgttaaggtatctgagacatccagtcatcaggacgccgttaccatatgtacactcggtattggtaccgcatttggagagtcaatactggacaacacaccacgacatgcgactattgtcacccgcgagagttctgaactgttacgaattgaacaaaaggactttaaggcgctatgggaaaaatatcggcaatacatggccggcctgttggccccaccgtatggcgtgatggaaaccggcagcaacaatgacaacatcttcaaagaaatgacccccttaattgagccccatgtgccacttcggccggccaataccattactaaggtcccatcagagaaaatccttcgggcaggcaagatcttaagaaatgcgattctttctcgggctccacacatgattagggaccggaaatatcatctaaagacctacagacaatgctgcgtcgggacagaactggtcgactggatgatgcagcaaaccccatgcgtccattcacggacacaggcagtcgggatgtggcaggtcctgctcgaagacggagtcctgaaccacgtggaccaggagcatcacttccaagataagtatctcttctaccgctttttagatgatgaacatgaggatgcacccctcccaaccgaagaggagaaaaaggaatgtgacgaagagctccaggataccatgctccttctgtctcagatgggaccagacgctcatatgcgcatgattttgcggaagcctcccggacagcggaccgtggatgatttagagattatctatgaggaattgctccacattaaagcccttagtcacctctctacgactgtgaagagggaactcgccggcgttctgatctttgaaagccacgccaaaggcggaacggttttgtttaaccagggggaagagggaaccagttggtacattatcctcaagggcagcgtaaacgtggtgatatatgggaagggagtggtttgtacgctgcatgagggggatgactttgggaagctagctttagtgaacgatgccccccgtgccgcttccatcgtgcttcgtgaggacaactgtcattttctgagggttgacaaggaggattttaatagaattcttagggatgtcgaggccaacacagtcaggctgaaggagcatgatcaggacgttctggtgctggaaaaggtgccagctggcaatcgggccagcaatcaagggaactcacaaccccaacagaagtatactgtgatgtcaggaactcctgaaaaaatactcgagcacttcctggagacaatcagactggaagctacacttaacgaggccacagacagcgtcctcaatgattttataatgatgcactgcgttttcatgccgaatacccagttatgccccgccctggtagcccattatcacgcacagccctctcaagggacggaacaggagaagatggattatgcacttaataacaaaaggcgtgtgatacggctggtgctgcagtgggcggctatgtacggagatctcctgcaagaagatgatgtgtccatggcctttctggaagaattctacgtgtctgtgtcagacgatgcacgcatgatcgctgctttgaaagagcaattgcctgaattagagaagatcgttaagcagatctccgaggatgctaaagctcctcagaagaagcacaaggttctgttgcagcagttcaataccggcgacgagcgggcacaaaagcgtcaacccattcgggggtctgatgaggtcctttttaaggtgtattgtatggaccatacatataccaccataagagtcccagtggctacaagcgttaaagaggtaatatcagctgtagcggataagctcggttcaggagaagggctcattattgtcaaaatgtcatccggcggtgaaaaggtagtgctaaagccgaatgacgtctctgtctttaccactctaacgataaacggtaggctcttcgcttgccccagggagcagtttgattcccttactccgctgccagagcaggaaggccccacagttggaacagtgggaacatttgagcttatgtcttcaaaggacctcgcctaccagatgaccatatatgattgggaattgtttaattgcgttcacgagctggaactcatctaccacacattcggccggcataatttcaaaaagaccacagccaacctcgaccttttcctcagacgctttaacgaaatccagttctgggttgtgactgaaatatgtctatgttctcagctgtccaagagggtccaactccttaagaagttcattaaaattgcagcccattgtaaagaatacaagaacctcaattctttctttgctattgttatgggtctgtctaatgtcgctgtctctcgcttggctctgacctgggaaaagctcccgtcaaagtttaaaaagttttatgccgagtttgagtcattgatggatcccagtcggaaccacagagcttaccgccttaccgttgcgaaacttgaaccccccttaattccctttatgcctttgcttattaaggatatgaccttcacgcacgagggcaataagacttttatcgacaatctggtcaacttcgagaagatgagaatgatagctaatacagccaggaccgtgcgatattacagatcgcagcccttcaatcctgatgccgctcaggctaataaaaaccaccaggatgttcgttcttacgttcggcaactcaacgtgatcgacaaccagaggactctgagccaaatgagccataggttggagcctcggagaccatag

SEQ ID NO: 169757 - DNA, 3036 bp, Artificial Sequence
  derived and/or modified sequence
atggtcgccgcccacgctgcccacagttcctcttccgccgaatggatcgcatgcttggataagaggccactcgagcgtagctctgaagacgttgatatcatctttacccgccttaaggaagtcaaagctttcgagaagttccaccccaacttgcttcaccagatctgcctctgcggctattatgagaatctcgagaaggggattactctgtttagacaaggcgacattggcacaaattggtatgccgttctcgccggctctttggatgtgaaggtgtccgaaacttctagccaccaggatgctgtaacaatttgcactctcggaatcggaacagcctttggggagagtatcttggacaacactccacgacacgccacaatcgtcacccgagagtcgtctgagttgctcaggatcgagcagaaagactttaaggccttgtgggagaagtaccggcagtatatggccggcctccttgcacccccctacggcgtcatggagacaggctcaaacaacgacaggatcccagataaagagaatactcctttgatagagcctcacgtgccattgaggccagcgaatacgataactaaggtgcccagtgagaagattctcagagccggcaagatcctgaggaatgctatcctttcccgcgctccccatatgattcgagaccgcaagtatcatctgaaaacctatcgccaatgctgtgtaggcactgagctggtggattggatgatgcagcagacgccttgcgtgcattcccggacacaagccgtcgggatgtggcaggttctgctcgaggatggagttttaaatcacgttgatcaagagcatcatttccaggacaaatacctgttctacaggtttctggatgatgagcacgaagacgctcccctcccgacagaagaggaaaagaaggaatgtgacgaggagctgcaggatactatgcttctgctgtcacagatgggccccgatgcccatatgaggatgattttgaggaagccacctggtcagagaaccgtcgacgatttggaaataatttatgaggagctactgcatattaaagccctatcacatttaagcaccactgtcaagcgggagctggctggcgtcctcatcttcgagagccatgccaagggcggcacagttctgtttaatcagggtgaagaggggacgtcatggtacatcatcctcaaaggctccgtcaatgtcgtcatctacggtaagggcgtggtttgtacactccatgagggagatgactttggcaagctcgctctagtcaacgacgcacctagagctgcatccattgtcctccgcgaggataactgccatttcctgagagtcgataaggaagattttaaccgtatcctgagggatgttgaagcgaacactgttcggttaaaagagcatgatcaggatgttttggtcctggagaaagttcccgcaggtaacagagcttcgaatcaagggaacagccaaccccagcagaaatatacagtgatgagtggaacccctgaaaagatcctggagcacttcctggagaccatccggctggaggctacactaaacgaagccactgactctgttctcaacgacttcatcatgatgcactgcgtgttcatgcctaacacccagctgtgtccagccctcgtcgctcactaccacgctcaacctagccaaggcaccgagcaggagaaaatggactacgcgttgaacaacaaacgccgtgtgatccgcctcgtccttcagtgggccgccatgtacggagacctgctgcaggaggatgacgtgagtatggctttcctcgaggagttttacgtgagtgtgagcgacgatgcgcgcatgattgccgcactcaaggaacaactacccgaacttgagaagattgtcaaacagatatcagaagatgccaaggctccacaaaaaaagcataaagtccttctccagcagttcaataccggagatgaacgggcccaaaagcgacagcccatacgtggatcagacgaggttctgtttaaggtttattgcatggatcacacctacactaccattcgcgtccccgtggcaacaagcgtcaaagaggtgatttccgccgtggctgataaacttgggagcggcgaagggttgatcattgtcaagatgagttccgggggcgagaaggtggtccttaaaccaaacgacgtctccgttttcaccaccctaaccatcaatggacgcttatttgcgtgtcccagggagcagttcgattctcttacacccttaccagaacaagaggggcctacagtcggaactgtaggtaccttcgagcttatgtccagtaaagacttggcataccaaatgactatttacgactgggaactatttaattgcgtccacgagctggagctaatctaccatacttttggcagacataactttaagaaaaccacagccaatctagatttgttcctgcgccgattcaatgaaattcagttctgggtcgtgactgagatttgcctttgtagccagctgagcaagcgagtgcaattgctgaaaaaattcataaagatagcagcgcattgtaaggagtacaaaaatctcaattcttttttcgcaatcgtgatgggcctgtctaatgtggccgtgtcccgtttagcccttacgtgggagaaactgcccagcaagtttaaaaagttttatgcagagtttgagagcctcatggacccctcccggaatcaccgggcctaccggctgacggtggccaaactggagcctcccctgatacccttcatgcccttactaatcaaggatatgacatttacacatgagggcaataaaacttttatagataacttggtaaatttcgaaaagatgcggatgattgcgaacaccgcaaggacggtccgctactatcgctctcaaccatttaatccagatgctgcacaggccaataaaaaccaccaggatgtcaggagttatgtgcggcagctcaatgttattgacaaccagcgaacactgtcacagatgtcgcataggttggagcctaggcggccatag

SEQ ID NO: 169758 - DNA, 2832 bp, Artificial Sequence
  derived and/or modified sequence
atggtggcggctcacgctgcccacagtagctcgagtgctgagtggatcgcttgtctggacaagcgtcctttggaaagatcctccgaggatgttgatatcatttttacacggcttaaggaagtgaaagccttcgaaaagtttcatccaaatttgctccatcagatctgcctttgcggctactatgaaaacctggagaaaggtattactttgtttagacagggcgacattggaactaattggtacgccgtgctcgccggttccctggatgttaaagtgtccgaaacctcatcccaccaggatgccgtgaccatttgtaccctgggcatcggaaccgcgttcggggagtctatacttgacaatacacctagacatgctaccatcgtcaccagagaatcatccgaactgctcaggattgagcaaaaggattttaaagccctctgggaaaagtatcgccagtatatggccgggctcttggcccctccttacggcgtcatggaaaccggctctaacaacgatcgcattcccgacaaagagaacacgccactgatcgagccccacgttccgctgaggcccgctaatactatcacaaaagtgcccagtgaaaagattctcagggcgggcaagatcttgcgaaacgccatccttagccgagcgcctcacatgatcagagatcgaaagtatcatctgaaaacctatagacaatgttgcgtgggaactgagctggtcgactggatgatgcagcaaacaccttgcgtccacagtcgcacacaggccgtggggatgtggcaggtcctgctcgaggacggagtgctgaaccatgtagaccaggaacatcactttcaggacaaatatctcttttacagatttctggacgacgagcatgaggatgcccctctcccaacagaggaggaaaagaaggagtgtgacgaagaacttcaagatacaatgctcttgctatcccagatgggaccagacgcccatatgaggatgatactgaggaaacccccggggcaacgcaccgttgacgacctggagatcatatacgaggagctcctgcacattaaagctctgtcacacctctcgactaccgtgaaacgggaactggcgggagtgctgatctttgaatcccacgctaagggtggtactgtcctgttcaaccagggggaagagggcaccagctggtacatcatattgaaaggtagcgttaacgtggtgatttacgggaagggggtggtatgtacccttcacgagggtgatgatttcgggaagctcgcactggtcaatgatgcacctcgggccgctagcattgtcctcagggaagataactgtcatttcctacgcgtggataaagaggacttcaatagaatcttgcgggacgtggaagcaaatacagtgcggctgaaagagcacgatcaggatgttcttgtgcttgaaaaagtacctgccgggaaccgtgcctccaatcagggaaatagccagccccagcagaaatataccgtaatgagcggaacccctgagaaaatcttggagcactttctcgagacaattcgactagaggccacccttaatgaggcaacagacagcgtgctcaacgactttatcatgatgcactgcgttttcatgccaaatacccagttatgtcccgcattagtggcccactatcacgctcagcccagccaggggacggagcaggagaaaatggattacgcactcaataataaaagaagagtgatacgtctggtgctgcagtgggctgccatgtacggggatcttcttcaggaggacgacgtctctatggctttcctggaggagttctacgtgtcagtgtcggatgacgccagaatgattgccgccctgaaagaacagcttcctgaattggagaagattgttaaacagatctctgaggacgcgaaagccccccagaaaaagcataaggtcctcctacaacaattcaacacaggggacgaacgggcgcagaagcgccagcccatcagaggctcggatgaagttctgttcaaggtgtactgcatggaccatacttatacgacaatccgcgtcccggttgccacatcggtgaaagaggtgatctccgctgttgcagataaacttggcagcggagagggcttaatcatagtcaagatgtcctctggcggcgagaaggttgtccttaagcccaatgatgtaagcgtattcacaaccctgacaatcaacgggcgtctctttgcttgcccaagggagcaatttgactccttgactccattgcctgagcaagaaggtcccacagtaggcaccgttggaacctttgaattgatgagtagtaaagacttagcatatcagatgacgatttatgattgggagctgttcaattgcgttcacgagctcgagctgatctatcacacctttggccgccacaactttaaaaaaactacagctaacctcgatctctttttgcggagatttaatgaaatccagttctgggtagtgactgagatatgtctctgttcacagctatccaagcgggtacagttgcttaagaagttcatcaaaattgctgctcactgtaaagagtataagaatctaaacagtttcttcgccatagtgatgggtctgagtaatgtggccgtgagccggctggctctcacatgggagaggatgattgcgaataccgcaagaacggtacgttactacagaagccagccttttaatcctgacgcagcgcaggctaacaagaatcatcaagacgtaagaagctatgttcggcagctaaatgtcatcgacaaccagaggactctgagccagatgtcccatcgactggaaccacgccgaccttag

SEQ ID NO: 169759 - DNA, 2376 bp, Artificial Sequence
  derived and/or modified sequence
atgattagagaccggaaataccacctgaagacgtaccgccaatgctgcgtggggaccgaactggtcgattggatgatgcagcagacgccctgtgtgcacagcagaacccaagcagtcggaatgtggcaagtcttactggaggatggcgtcctgaatcacgtggatcaagaacaccacttccaagacaaatacttattttatcgctttctggacgacgagcatgaagatgcacccttgcctactgaggaggaaaagaaggaatgcgacgaggaattgcaagacactatgctcctcctgtctcagatggggcctgatgcacatatgcggatgattcttcgtaaaccacccgggcagagaaccgtcgacgatcttgaaatcatctacgaagagttactgcacattaaggctctgagtcacttgagtacgaccgttaaaagggagctcgctggggtgctgatattcgagtctcacgccaaaggaggcactgtgctctttaatcagggagaagaaggtacttcttggtacatcattcttaagggcagcgtaaatgtggtcatatatggcaaaggcgtcgtttgtaccttgcacgagggagacgactttggtaagctggcgctggtcaacgacgcaccgcgagctgcttccattgttctccgtgaggataattgccacttcctccgcgtcgacaaggaggattttaaccgtatcctccgtgacgtcgaggcaaatacagtccgattgaaagaacacgaccaagatgtgcttgtcctggaaaaggtaccagctgggaaccgggccagtaaccaggggaatagtcagcctcagcaaaaatatacggtgatgtcggggacccccgaaaaaatcctggagcactttctcgaaaccataaggctggaggcaactttaaatgaagccaccgattcagtgttaaatgactttataatgatgcactgtgtcttcatgcctaacacgcaactatgccccgctttagttgcccactaccacgcacagccctcccaagggaccgaacaggagaagatggactacgccctgaataacaagcggagagtcatcaggctggtccttcagtgggccgcaatgtatggcgatctgctgcaggaagatgatgtcagtatggcatttctggaggagttctacgtgtcggtctcagacgacgctcggatgatcgctgctttaaaggaacagctacccgaattggagaaaatcgttaagcagatttctgaagatgccaaggctccccaaaagaagcataaggtgttactgcagcagtttaataccggcgacgaacgcgcccagaaaagacaaccgattcgcggttccgacgaagtcttgtttaaagtatattgcatggatcacacatatacaacaatccgcgtaccagttgcaacctccgtcaaagaagtgatcagcgccgtggccgataagctagggagtggagaaggattgatcatcgtgaaaatgtcttctggaggagagaaggtcgttcttaaacctaacgacgtttcggtcttcaccactctgactattaatggtcggctattcgcttgtccacgtgaacagtttgattctcttactcccctgccagagcaggagggcccaacagtcggtaccgttggcaccttcgaactgatgtctagtaaggatctggcctaccagatgacaatatatgattgggagctctttaactgcgtgcacgaactcgagttgatttatcacactttcgggcgccataacttcaagaaaacaaccgcgaatctcgacttgttcctgcggcgcttcaatgagatacagttttgggtggttacggagatttgcctctgctcccagctgtcaaagagagtacagctgctgaaaaagttcatcaagatagccgcccactgcaaagagtataagaatttaaatagcttcttcgccattgtgatgggtctatccaatgtggctgtttctaggctcgccttaacgtgggagaaactgccttctaagttcaagaagttttacgccgaatttgaaagtctgatggaccccagtcggaatcatcgagcgtaccgactcacggtcgctaagctcgagccgccattaattccatttatgccactgctgattaaagacatgacatttacacatgagggaaataagacattcattgataatctggttaactttgagaagatgcgcatgatcgctaataccgcaagaactgttagatattaccgtagccagccatttaaccctgatgcagcccaagccaacaagaaccaccaggatgtgaggtcatacgtacgccaattgaacgtcattgacaaccagagaaccctgtcccagatgtcgcatcggcttgaaccgcggaggccctag

SEQ ID NO: 169760 - DNA, 2577 bp, Artificial Sequence
  derived and/or modified sequence
atggccggcctccttgcacctccttatggagttatggagaccggcagtaacaatgacagaatccctgacaaagagaatacaccccttattgagccacacgttccactgcggccagccaacactataacaaaggtgccgtcagagaagatccttagggctggaaagattcttagaaatgctatcttatctcgcgcaccgcatatgatcagagaccggaaataccacctcaagacataccggcagtgctgtgtagggaccgagctcgtagactggatgatgcagcaaacaccctgtgtgcacagccggacacaggccgtcggtatgtggcaagtgctactcgaagatggcgtcctgaatcacgtggaccaggaacatcatttccaggataagtatctgttctataggttcctagatgacgagcacgaagatgcgcctctgccaaccgaagaggagaagaaagagtgtgacgaagagctgcaagataccatgttgttgctcagccaaatgggcccagatgcacacatgagaatgatcctgaggaaaccaccaggacagcgcaccgtggacgacttggagattatctatgaagagctgttgcacattaaagctctctctcatcttagtactacagtcaagagggagctggcaggggtgcttatattcgaaagtcacgccaaaggcgggaccgttctgttcaatcagggcgaggaaggaacgagttggtacatcattctgaagggctcggtgaatgtggtaatttacggcaaaggagtggtctgcactttacatgaaggagatgattttgggaaattagcgctcgtcaatgacgcgccccgggcagcgtctattgtgctaagggaagacaactgccactttctgagagtggataaagaggactttaaccggattttacgggatgtggaggccaacacagtccgcctgaaggaacacgatcaggatgtgctggtgctcgagaaagtccccgctggcaaccgcgcctcaaaccagggaaatagccagcctcagcagaagtataccgtgatgtctggtactcccgagaagattctcgagcacttcctggagactatccggcttgaggctactcttaacgaagcaactgacagcgtgcttaatgacttcattatgatgcactgcgtgtttatgccaaacacgcagttgtgccccgctttggtggctcactaccacgctcaaccttctcagggtaccgaacaagaaaagatggactatgctctcaacaataagagacgggtgatccgcttggttctgcagtgggctgcaatgtatggagacctattgcaggaggatgatgtgtctatggcatttttggaagaattctatgtgagcgtcagcgatgacgcgaggatgattgcggcactgaaagagcagctgcccgaacttgaaaagattgtgaaacagattagtgaggatgctaaggctcctcagaagaaacataaagtactgttgcagcagttcaacactggagatgaaagagcacagaaacggcaacccatacgtggcagcgacgaagtgctgtttaaagtgtactgcatggaccatacatataccacaattagggtccccgtagcgacgtctgtgaaagaggtgatcagcgcggtagctgacaagctgggatcgggagaaggccttattatcgttaaaatgagctccggcggcgaaaaggtcgtcctaaaaccgaacgacgtatctgtgtttacaaccctgactatcaatggaaggctatttgcctgtcccagagagcagtttgatagtttaacgcccctccccgagcaagaagggcccacagtcggaacagtgggaacttttgaacttatgtcgtccaaggacctcgcctatcagatgaccatctacgactgggaactgttcaactgtgtccacgaactcgagctcatttaccacacgtttggaagacataacttcaagaaaaccaccgcaaacctcgacctgtttttgcgccgatttaatgagatccagttctgggtggtcactgagatatgtctttgctctcagttgtccaaaagggtgcagctactcaagaaatttattaaaattgccgctcactgcaaggaatacaaaaatctgaatagtttttttgctattgtcatggggctcagcaacgtggcagtgtccagacttgctttaacgtgggagaagttgccctctaagttcaagaagttttatgctgaatttgagtcactcatggaccccagtcggaaccatagagcgtaccggctgactgtcgccaagctcgaaccacctctgattcctttcatgccacttctgatcaaggatatgacatttactcatgaggggaacaaaacctttattgataatctagtaaattttgaaaagatgaggatgattgcaaacaccgctcggactgtccgatactatagatcccagccctttaaccccgatgctgcccaggctaacaagaaccatcaggacgtccggtcatatgtaaggcagttgaatgtgatcgacaatcaaaggactctatcccagatgtcacaccggttagagcctcgccgaccttag

SEQ ID NO: 169761 - DNA, 2577 bp, Artificial Sequence
  derived and/or modified sequence
atggccggtctcctcgcaccaccctatggggtcatggaaacagggtcaaataatgataggatccctgataaggaaaacactccccttattgaaccacacgtgcctttgcgtccagcaaatacaatcacaaaggtgccaagcgaaaagattcttcgcgcagggaagatactccggaacgctatattgagccgcgcacctcacatgatcagggatagaaaatatcatctgaaaacatatcgtcagtgctgtgtgggcactgagctggtcgattggatgatgcagcaaaccccatgcgtacacagccgaacacaagctgtgggcatgtggcaggtgctgttggaggatggcgtgttgaaccacgttgaccaagagcaccactttcaagataaatacttgttctatcggtttctggatgacgagcatgaggatgctcctctgccaactgaggaggagaagaaggagtgtgatgaagagcttcaggatacaatgttactgctgagccagatgggtcccgacgcgcacatgaggatgatcttaagaaagccccccggccaaagaaccgtggatgatttggagattatctacgaggagctgctacacataaaagctctcagtcatctcagtaccactgtcaagcgtgagttagctggcgtcctgatttttgaatctcacgcaaagggaggcaccgtactgtttaaccaaggcgaagagggtacctcttggtacattatattgaagggtagtgtgaacgtcgtgatttacggaaaaggagtggtgtgcacactgcacgaaggcgacgacttcgggaagctcgccctggtgaacgatgcccctcgggctgccagtattgtgctgcgggaggataactgtcattttctgcgtgtggacaaggaggattttaataggattctcagagacgtggaggccaacacagtccgactaaaggaacatgatcaggatgtgctggtgctggagaaagtgcccgctggcaaccgcgccagcaaccagggaaactcgcaacctcagcagaaatacacagtaatgtccggaacccccgagaaaatcctggaacatttcctggaaactatccgactggaagcaactcttaacgaagccactgactcggtgcttaatgatttcatcatgatgcactgtgtttttatgcccaacacccagttatgccctgccttagtggcccattaccatgcgcagccttcccaaggaactgagcaagagaaaatggattacgccttgaataacaagcgcagagttatccgtctagtgctacaatgggcagccatgtatggtgatctcttacaagaagacgatgtctctatggcttttctggaggaattttatgtttcagtctccgatgacgcccggatgattgctgctttaaaagagcagttacctgaattggagaagatcgttaaacaaatatcggaagacgccaaggccccacagaagaaacataaagtgctgctgcagcagttcaacactggggacgagcgagcacagaagcgccagccaatccggggctccgatgaggtactgttcaaagtctactgcatggaccatacctacaccacgataagggttcccgttgcgacctctgttaaggaggtgatctcagccgtcgccgataagttggggtcaggagaaggcctcattatcgtgaagatgtcgtctgggggagaaaaagtcgtgttgaagcctaacgatgttagcgtctttacaacgctgacaataaatggccgactattcgcctgtcccagagagcagttcgactccctcaccccccttcctgagcaagaaggtcctaccgttggtacggttgggacattcgaactgatgagcagcaaggatctcgcttaccaaatgaccatctatgactgggagttatttaattgtgtgcacgaactcgaattaatataccacacctttgggcgtcacaacttcaaaaagacaaccgccaacttggatctttttttgcgaaggttcaatgaaattcaattttgggtggtaacagagatttgtctgtgttcccagctaagtaagcgggtccagcttttgaaaaagtttatcaagattgcagctcattgcaaggaatacaaaaatctcaattccttctttgctatagtgatggggctgtctaatgtggctgtgtcacgccttgctcttacctgggagaaactgccttctaagtttaagaagttttatgcagaatttgagtctctcatggacccaagccggaaccatcgggcctacagactcaccgtggccaagttggagccccccctaatacctttcatgccgttactgattaaagatatgaccttcacgcacgagggcaataaaacgtttatcgataatctcgtcaatttcgagaagatgcgaatgattgctaacactgcccgaacagtgcgttactaccgcagtcagccctttaaccccgatgcggctcaggccaacaaaaatcaccaggacgtcaggtcctacgtgcggcagctaaatgtgattgataatcagcgtactctttcgcagatgtcccacagattggagccccggcgcccatag

SEQ ID NO: 169762 - DNA, 3033 bp, Artificial Sequence
  derived and/or modified sequence
atggtggccgcccacgccgcccacagcagcagcagcgctgagtggatcgcctgcctggacaagaggcccctggagaggagcagtgaagatgtggacatcatcttcacccggctgaaggaggtgaaggcctttgagaagttccaccccaacctgctgcaccagatctgcctgtgtggctactatgagaacctggagaagggcatcaccctcttccggcagggcgacatcggcaccaactggtatgctgtgctggccggcagcctggatgtgaaggtgtctgagaccagcagccaccaggatgctgtgaccatctgcaccctgggcattggaacagcctttggagagagcatcctggacaacacccccaggcatgccaccatcgtgacccgggagagcagcgagctgctgcgcatcgagcagaaggacttcaaggccctgtgggagaagtaccggcagtacatggccggcctgctggccccaccctacggcgtgatggagaccggcagcaacaatgacaacatcttcaaggagatgacccccctcatcgagccccacgtgcccctgcggcctgccaacaccatcaccaaggtgcccagcgagaagatcctgcgggccggcaagatcctgagaaatgccatcctgagccgggccccccacatgatccgggacaggaagtaccacctgaagacctaccggcagtgctgcgtgggcacagagctggtggactggatgatgcagcagaccccctgtgtgcacagcaggacccaggccgtgggcatgtggcaggtgctgctggaggatggagtgctgaaccacgtggaccaggagcaccacttccaggacaagtacctgttctaccgcttcctggatgatgaacatgaagatgcccccctgcccacagaggaggagaagaaggaatgtgatgaggagctgcaggacaccatgctgctgctgagccagatgggcccagatgcccacatgaggatgatcctgaggaagcccccaggccagaggacagtggatgacctggagatcatctatgaggagctgctgcacatcaaggccctgagccacctgagcaccaccgtgaagcgggagctggccggcgtgctgatctttgagagccacgccaagggcggcaccgtgctcttcaaccagggcgaggagggcacctcctggtacatcatcctgaagggctctgtgaatgtggtgatctacggcaagggcgtggtgtgcaccctgcatgaaggagatgactttgggaagctggccctggtgaatgatgccccccgggccgccagcatcgtgctgcgggaggacaactgccacttcctgcgggtggacaaggaggacttcaaccgcatcctgagagatgtggaggccaacacagtgcggctgaaggagcatgaccaggatgtgctggtgctggagaaggtgcctgctggcaacagagccagcaaccagggcaacagccagccccagcagaagtacacagtgatgagcggcaccccagagaagatcctggagcacttcctggagaccatccggctggaggccaccctgaatgaggccacagattctgtgctgaatgacttcatcatgatgcactgtgtgttcatgcccaacacccagctgtgcccagccctggtggcccactaccacgcccagcccagccagggcacagagcaggagaagatggactatgccctgaacaacaagagaagagtcatccggctggtgctgcagtgggccgccatgtatggagacctgctgcaggaggatgatgtgtccatggccttcctggaggagttctacgtgtctgtgtctgatgatgccaggatgattgctgccctgaaggagcagctgcctgagctggagaagatcgtgaagcagatcagtgaagatgccaaggccccccagaagaagcacaaggtgctgctgcagcagttcaacacaggagatgagcgggcccagaagaggcagcccatccggggcagtgatgaggtgctcttcaaggtgtactgcatggaccacacctacaccaccatccgggtgcctgtggccacctctgtgaaggaggtgatctctgctgtggccgacaagctgggcagcggggagggcctcatcatcgtgaagatgagcagtggaggagagaaggtggtgctgaagcccaatgatgtgtctgtgttcaccaccctgaccatcaatggccgcctgtttgcctgcccccgggagcagtttgacagcctgacccccctgcctgagcaggagggccccaccgtgggcaccgtgggcacctttgagctgatgagcagcaaggacctggcctaccagatgaccatctatgactgggagctgttcaactgtgtgcatgagctggagctgatctaccacaccttcggccgccacaacttcaagaagaccacagccaacctggacctcttcctgcggcgcttcaatgagatccagttctgggtggtgacagagatctgcctgtgcagccagctgagcaagagggtgcagctgctgaagaagttcatcaagattgctgcccactgcaaggagtacaagaacctgaacagcttctttgccatcgtgatgggcctgagcaatgtggccgtgtcccggctggccctgacctgggagaagctgcccagcaagttcaagaagttctatgcagagtttgagagcctgatggaccccagcaggaaccaccgggcctaccgcctgactgtggccaagctggagcccccactcatccccttcatgcccctgctgatcaaggacatgaccttcacccatgagggcaacaagaccttcatcgacaacctggtgaactttgagaagatgaggatgattgccaacacagccaggacagtgcgctactaccgcagccagcccttcaacccagatgctgcccaggccaacaagaaccaccaggatgtgcgctcctatgtgcggcagctgaatgtcatcgacaaccagaggaccctgagccagatgagccaccggctggagccccggcggccctag

SEQ ID NO: 169763 - DNA, 3036 bp, Artificial Sequence
  derived and/or modified sequence
atggtggccgcccacgccgcccacagcagcagcagcgctgagtggatcgcctgcctggacaagaggcccctggagaggagcagtgaagatgtggacatcatcttcacccggctgaaggaggtgaaggcctttgagaagttccaccccaacctgctgcaccagatctgcctgtgtggctactatgagaacctggagaagggcatcaccctcttccggcagggcgacatcggcaccaactggtatgctgtgctggccggcagcctggatgtgaaggtgtctgagaccagcagccaccaggatgctgtgaccatctgcaccctgggcattggaacagcctttggagagagcatcctggacaacacccccaggcatgccaccatcgtgacccgggagagcagcgagctgctgcgcatcgagcagaaggacttcaaggccctgtgggagaagtaccggcagtacatggccggcctgctggccccaccctacggcgtgatggagaccggcagcaacaatgaccgcatcccagacaaggagaacacccccctgattgagccccacgtgcccctgcggcctgccaacaccatcaccaaggtgcccagcgagaagatcctgcgggccggcaagatcctgagaaatgccatcctgagccgggccccccacatgatccgggacaggaagtaccacctgaagacctaccggcagtgctgcgtgggcacagagctggtggactggatgatgcagcagaccccctgtgtgcacagcaggacccaggccgtgggcatgtggcaggtgctgctggaggatggagtgctgaaccacgtggaccaggagcaccacttccaggacaagtacctgttctaccgcttcctggatgatgaacatgaagatgcccccctgcccacagaggaggagaagaaggaatgtgatgaggagctgcaggacaccatgctgctgctgagccagatgggcccagatgcccacatgaggatgatcctgaggaagcccccaggccagaggacagtggatgacctggagatcatctatgaggagctgctgcacatcaaggccctgagccacctgagcaccaccgtgaagcgggagctggccggcgtgctgatctttgagagccacgccaagggcggcaccgtgctcttcaaccagggcgaggagggcacctcctggtacatcatcctgaagggctctgtgaatgtggtgatctatggaaaaggagtggtgtgcaccctgcacgagggagatgactttgggaagctggccctggtgaatgatgcccccagggctgccagcatcgtgctgcgggaggacaactgccacttcctgcgggtggacaaggaggacttcaaccgcatcctgagagatgtggaggccaacacagtgcggctgaaggagcatgaccaggatgtgctggtgctggagaaggtgcctgctggcaacagagccagcaaccagggcaacagccagccccagcagaagtacacagtgatgagcggcaccccagagaagatcctggagcacttcctggagaccatccggctggaggccaccctgaatgaggccacagacagcgtgctgaatgacttcatcatgatgcactgtgtgttcatgcccaacacccagctgtgcccagccctggtggcccactaccacgcccagcccagccagggcacagagcaggagaagatggactatgccctgaacaacaagagaagagtcatccggctggtgctgcagtgggccgccatgtacggggacctgctgcaggaggatgatgtgtccatggccttcctggaggagttctacgtgtctgtgtctgatgatgccaggatgattgctgccctgaaggagcagctgcctgagctggagaagatcgtgaagcagatcagtgaagatgccaaggccccccagaagaagcacaaggtgctgctgcagcagttcaacacaggagatgagcgggcccagaagaggcagcccatccggggcagtgatgaggtgctcttcaaggtgtactgcatggaccacacctacaccaccatccgggtgcctgtggccacctctgtgaaggaggtgatctctgctgtggccgacaagctgggcagcggggagggcctcatcatcgtgaagatgagcagcggcggggagaaggtggtgctgaagcccaatgatgtgtctgtgttcaccaccctgaccatcaatggccgcctgtttgcctgcccccgggagcagtttgacagcctgacccccctgcctgagcaggagggccccaccgtgggcaccgtgggcacctttgagctgatgagcagcaaggacctggcctaccagatgaccatctatgactgggagctgttcaactgtgtgcatgagctggagctgatctaccacaccttcggccgccacaacttcaagaagaccacagccaacctggacctcttcctgcggcgcttcaatgagatccagttctgggtggtgacagagatctgcctgtgcagccagctgagcaagagggtgcagctgctgaagaagttcatcaagattgctgcccactgcaaggagtacaagaacctgaacagcttctttgccatcgtgatgggcctgagcaatgtggccgtgtcccggctggccctgacctgggagaagctgcccagcaagttcaagaagttctacgccgagtttgagagcctgatggaccccagcaggaaccaccgggcctaccgcctgactgtggccaagctggagcccccactcatccccttcatgcccctgctgatcaaggacatgaccttcacccatgagggcaacaagaccttcatcgacaacctggtgaactttgagaagatgaggatgattgccaacacagccaggacagtgcgctactaccgcagccagcccttcaacccagatgctgcccaggccaacaagaaccaccaggatgtgcgctcctatgtgcggcagctgaatgtgattgacaaccagaggaccctgagccagatgagccaccggctggagccccggcggccctag

SEQ ID NO: 169764 - DNA, 2832 bp, Artificial Sequence
  derived and/or modified sequence
atggtggccgcccacgccgcccacagcagcagcagcgctgagtggatcgcctgcctggacaagaggcccctggagaggagcagtgaagatgtggacatcatcttcacccggctgaaggaggtgaaggcctttgagaagttccaccccaacctgctgcaccagatctgcctgtgtggctactatgagaacctggagaagggcatcaccctcttccggcagggcgacatcggcaccaactggtatgctgtgctggccggcagcctggatgtgaaggtgtctgagaccagcagccaccaggatgctgtgaccatctgcaccctgggcattggaacagcctttggagagagcatcctggacaacacccccaggcatgccaccatcgtgacccgggagagcagcgagctgctgcgcatcgagcagaaggacttcaaggccctgtgggagaagtaccggcagtacatggccggcctgctggccccaccctacggcgtgatggagaccggcagcaacaatgaccgcatcccagacaaggagaacacccccctgattgagccccacgtgcccctgcggcctgccaacaccatcaccaaggtgcccagcgagaagatcctgcgggccggcaagatcctgagaaatgccatcctgagccgggccccccacatgatccgggacaggaagtaccacctgaagacctaccggcagtgctgcgtgggcacagagctggtggactggatgatgcagcagaccccctgtgtgcacagcaggacccaggccgtgggcatgtggcaggtgctgctggaggatggagtgctgaaccacgtggaccaggagcaccacttccaggacaagtacctgttctaccgcttcctggatgatgaacatgaagatgcccccctgcccacagaggaggagaagaaggaatgtgatgaggagctgcaggacaccatgctgctgctgagccagatgggcccagatgcccacatgaggatgatcctgaggaagcccccaggccagaggacagtggatgacctggagatcatctatgaggagctgctgcacatcaaggccctgagccacctgagcaccaccgtgaagcgggagctggccggcgtgctgatctttgagagccacgccaagggcggcaccgtgctcttcaaccagggcgaggagggcacctcctggtacatcatcctgaagggctctgtgaatgtggtgatctatggaaaaggagtggtgtgcaccctgcacgagggagatgactttgggaagctggccctggtgaatgatgcccccagggctgccagcatcgtgctgcgggaggacaactgccacttcctgcgggtggacaaggaggacttcaaccgcatcctgagagatgtggaggccaacacagtgcggctgaaggagcatgaccaggatgtgctggtgctggagaaggtgcctgctggcaacagagccagcaaccagggcaacagccagccccagcagaagtacacagtgatgagcggcaccccagagaagatcctggagcacttcctggagaccatccggctggaggccaccctgaatgaggccacagacagcgtgctgaatgacttcatcatgatgcactgtgtgttcatgcccaacacccagctgtgcccagccctggtggcccactaccacgcccagcccagccagggcacagagcaggagaagatggactatgccctgaacaacaagagaagagtcatccggctggtgctgcagtgggccgccatgtacggggacctgctgcaggaggatgatgtgtccatggccttcctggaggagttctacgtgtctgtgtctgatgatgccaggatgattgctgccctgaaggagcagctgcctgagctggagaagatcgtgaagcagatcagtgaagatgccaaggccccccagaagaagcacaaggtgctgctgcagcagttcaacacaggagatgagcgggcccagaagaggcagcccatccggggcagtgatgaggtgctcttcaaggtgtactgcatggaccacacctacaccaccatccgggtgcctgtggccacctctgtgaaggaggtgatctctgctgtggccgacaagctgggcagcggggagggcctcatcatcgtgaagatgagcagcggcggggagaaggtggtgctgaagcccaatgatgtgtctgtgttcaccaccctgaccatcaatggccgcctgtttgcctgcccccgggagcagtttgacagcctgacccccctgcctgagcaggagggccccaccgtgggcaccgtgggcacctttgagctgatgagcagcaaggacctggcctaccagatgaccatctatgactgggagctgttcaactgtgtgcatgagctggagctgatctaccacaccttcggccgccacaacttcaagaagaccacagccaacctggacctcttcctgcggcgcttcaatgagatccagttctgggtggtgacagagatctgcctgtgcagccagctgagcaagagggtgcagctgctgaagaagttcatcaagattgctgcccactgcaaggagtacaagaacctgaacagcttctttgccatcgtgatgggcctgagcaatgtggccgtgtcccggctggccctgacctgggagaggatgattgccaacacagccaggacagtgcgctactaccgcagccagcccttcaacccagatgctgcccaggccaacaagaaccaccaggatgtgcgctcctatgtgcggcagctgaatgtgattgacaaccagaggaccctgagccagatgagccaccggctggagccccggcggccctag

SEQ ID NO: 169765 - DNA, 2376 bp, Artificial Sequence
  derived and/or modified sequence
atgatccgggacaggaagtaccacctgaagacctaccggcagtgctgcgtgggcacagagctggtggactggatgatgcagcagaccccctgtgtgcacagcaggacccaggccgtgggcatgtggcaggtgctgctggaggatggagtgctgaaccacgtggaccaggagcaccacttccaggacaagtacctgttctaccgcttcctggatgatgaacatgaagatgcccccctgcccacagaggaggagaagaaggaatgtgatgaggagctgcaggacaccatgctgctgctgagccagatgggcccagatgcccacatgaggatgatcctgaggaagcccccaggccagaggacagtggatgacctggagatcatctatgaggagctgctgcacatcaaggccctgagccacctgagcaccaccgtgaagcgggagctggccggcgtgctgatctttgagagccacgccaagggcggcaccgtgctcttcaaccagggcgaggagggcacctcctggtacatcatcctgaagggctctgtgaatgtggtgatctatggaaaaggagtggtgtgcaccctgcacgagggagatgactttgggaagctggccctggtgaatgatgcccccagggctgccagcatcgtgctgcgggaggacaactgccacttcctgcgggtggacaaggaggacttcaaccgcatcctgagagatgtggaggccaacacagtgcggctgaaggagcatgaccaggatgtgctggtgctggagaaggtgcctgctggcaacagagccagcaaccagggcaacagccagccccagcagaagtacacagtgatgagcggcaccccagagaagatcctggagcacttcctggagaccatccggctggaggccaccctgaatgaggccacagacagcgtgctgaatgacttcatcatgatgcactgtgtgttcatgcccaacacccagctgtgcccagccctggtggcccactaccacgcccagcccagccagggcacagagcaggagaagatggactatgccctgaacaacaagagaagagtcatccggctggtgctgcagtgggccgccatgtacggggacctgctgcaggaggatgatgtgtccatggccttcctggaggagttctacgtgtctgtgtctgatgatgccaggatgattgctgccctgaaggagcagctgcctgagctggagaagatcgtgaagcagatcagtgaagatgccaaggccccccagaagaagcacaaggtgctgctgcagcagttcaacacaggagatgagcgggcccagaagaggcagcccatccggggcagtgatgaggtgctcttcaaggtgtactgcatggaccacacctacaccaccatccgggtgcctgtggccacctctgtgaaggaggtgatctctgctgtggccgacaagctgggcagcggggagggcctcatcatcgtgaagatgagcagcggcggggagaaggtggtgctgaagcccaatgatgtgtctgtgttcaccaccctgaccatcaatggccgcctgtttgcctgcccccgggagcagtttgacagcctgacccccctgcctgagcaggagggccccaccgtgggcaccgtgggcacctttgagctgatgagcagcaaggacctggcctaccagatgaccatctatgactgggagctgttcaactgtgtgcatgagctggagctgatctaccacaccttcggccgccacaacttcaagaagaccacagccaacctggacctcttcctgcggcgcttcaatgagatccagttctgggtggtgacagagatctgcctgtgcagccagctgagcaagagggtgcagctgctgaagaagttcatcaagattgctgcccactgcaaggagtacaagaacctgaacagcttctttgccatcgtgatgggcctgagcaatgtggccgtgtcccggctggccctgacctgggagaagctgcccagcaagttcaagaagttctacgccgagtttgagagcctgatggaccccagcaggaaccaccgggcctaccgcctgactgtggccaagctggagcccccactcatccccttcatgcccctgctgatcaaggacatgaccttcacccatgagggcaacaagaccttcatcgacaacctggtgaactttgagaagatgaggatgattgccaacacagccaggacagtgcgctactaccgcagccagcccttcaacccagatgctgcccaggccaacaagaaccaccaggatgtgcgctcctatgtgcggcagctgaatgtgattgacaaccagaggaccctgagccagatgagccaccggctggagccccggcggccctag

SEQ ID NO: 169766 - DNA, 2577 bp, Artificial Sequence
  derived and/or modified sequence
atggccggcctgctggccccaccctatggagtgatggagaccggcagcaacaatgaccgcatcccagacaaggagaacacccccctcatcgagccccacgtgcccctgcggcctgccaacaccatcaccaaggtgcccagcgagaagatcctgcgggccggcaagatcctgagaaatgccatcctgagccgggccccccacatgatccgggacaggaagtaccacctgaagacctaccggcagtgctgcgtgggcacagagctggtggactggatgatgcagcagaccccctgtgtgcacagcaggacccaggccgtgggcatgtggcaggtgctgctggaggatggagtgctgaaccacgtggaccaggagcaccacttccaggacaagtacctgttctaccgcttcctggatgatgaacatgaagatgcccccctgcccacagaggaggagaagaaggaatgtgatgaggagctgcaggacaccatgctgctgctgagccagatgggcccagatgcccacatgaggatgatcctgaggaagcccccaggccagaggacagtggatgacctggagatcatctatgaggagctgctgcacatcaaggccctgagccacctgagcaccaccgtgaagcgggagctggccggcgtgctgatctttgagagccacgccaagggcggcaccgtgctcttcaaccagggcgaggagggcacctcctggtacatcatcctgaagggctctgtgaatgtggtgatctacggcaagggcgtggtgtgcaccctgcatgaaggagatgactttgggaagctggccctggtgaatgatgccccccgggccgccagcatcgtgctgcgggaggacaactgccacttcctgcgggtggacaaggaggacttcaaccgcatcctgagagatgtggaggccaacacagtgcggctgaaggagcatgaccaggatgtgctggtgctggagaaggtgcctgctggcaacagagccagcaaccagggcaacagccagccccagcagaagtacacagtgatgagcggcaccccagagaagatcctggagcacttcctggagaccatccggctggaggccaccctgaatgaggccacagattctgtgctgaatgacttcatcatgatgcactgtgtgttcatgcccaacacccagctgtgcccagccctggtggcccactaccacgcccagcccagccagggcacagagcaggagaagatggactatgccctgaacaacaagagaagagtcatccggctggtgctgcagtgggccgccatgtatggagacctgctgcaggaggatgatgtgtccatggccttcctggaggagttctacgtgtctgtgtctgatgatgccaggatgattgctgccctgaaggagcagctgcctgagctggagaagatcgtgaagcagatcagtgaagatgccaaggccccccagaagaagcacaaggtgctgctgcagcagttcaacacaggagatgagcgggcccagaagaggcagcccatccggggcagtgatgaggtgctcttcaaggtgtactgcatggaccacacctacaccaccatccgggtgcctgtggccacctctgtgaaggaggtgatctctgctgtggccgacaagctgggcagcggggagggcctcatcatcgtgaagatgagcagtggaggagagaaggtggtgctgaagcccaatgatgtgtctgtgttcaccaccctgaccatcaatggccgcctgtttgcctgcccccgggagcagtttgacagcctgacccccctgcctgagcaggagggccccaccgtgggcaccgtgggcacctttgagctgatgagcagcaaggacctggcctaccagatgaccatctatgactgggagctgttcaactgtgtgcatgagctggagctgatctaccacaccttcggccgccacaacttcaagaagaccacagccaacctggacctcttcctgcggcgcttcaatgagatccagttctgggtggtgacagagatctgcctgtgcagccagctgagcaagagggtgcagctgctgaagaagttcatcaagattgctgcccactgcaaggagtacaagaacctgaacagcttctttgccatcgtgatgggcctgagcaatgtggccgtgtcccggctggccctgacctgggagaagctgcccagcaagttcaagaagttctatgcagagtttgagagcctgatggaccccagcaggaaccaccgggcctaccgcctgactgtggccaagctggagcccccactcatccccttcatgcccctgctgatcaaggacatgaccttcacccatgagggcaacaagaccttcatcgacaacctggtgaactttgagaagatgaggatgattgccaacacagccaggacagtgcgctactaccgcagccagcccttcaacccagatgctgcccaggccaacaagaaccaccaggatgtgcgctcctatgtgcggcagctgaatgtcatcgacaaccagaggaccctgagccagatgagccaccggctggagccccggcggccctag

SEQ ID NO: 169767 - DNA, 3033 bp, Artificial Sequence
  derived and/or modified sequence
atggtggccgcccacgccgcccacagcagcagcagcgccgagtggatagcctgccttgataaacggcctctcgagcggagttccgaggacgtggacatcatattcactcggctgaaggaggttaaagcatttgagaagttccatcccaaccttttgcatcagatatgcctttgcggctactatgagaacctcgagaagggaatcacgttgtttaggcaaggcgacatcggcactaactggtatgccgtactcgccggctctctggacgtgaaagtttcggagacctcttctcaccaggatgcagtaaccatatgtactttgggaattgggaccgcatttggtgaaagcatcctagacaatacgccacgccacgccacaatcgtcaccagggagagctccgagttgctgaggatcgaacagaaggacttcaaggcgttgtgggagaagtatcggcaatatatggccgggctgctggcacccccttacggagttatggagacgggctctaataacgataacatttttaaggaaatgacccccttaattgaaccacacgtgccactgcgcccagccaacaccataacaaaggtgccctctgaaaaaattctgcgcgccggaaaaattctgcggaacgcgattttgtcccgagcaccccacatgataagggatcggaaatatcatctcaagacctataggcagtgctgcgtcggtactgagcttgtggattggatgatgcaacagaccccttgtgtgcactcacggactcaggccgttggcatgtggcaggtcctgcttgaggacggtgttctgaatcatgtcgaccaggaacatcatttccaggataagtacctgttctaccgcttcctcgacgatgagcatgaggatgcccccctgcctacagaggaggagaagaaagagtgcgatgaggaactgcaagacactatgctccttttgtctcaaatggggccggacgcccatatgaggatgatcttgagaaaaccccccggtcagagaactgttgatgatttggaaatcatttatgaggaactgctgcatatcaaggcgctcagtcatctttccacaaccgtgaaaagggaacttgccggggtactgatcttcgaatctcatgccaaaggcggcaccgtgctctttaatcagggggaggaaggcacatcgtggtatattatcctgaaaggatccgtgaacgtggttatctatggaaaaggtgtggtctgcacgctgcacgagggggacgatttcggcaagctggctctcgttaacgacgcaccaagagcggcttcaattgtcttacgagaagacaattgtcacttccttcgtgtggataaagaagattttaatagaattctgcgggacgttgaggctaataccgttcgactgaaggagcacgatcaggacgtgttagtgctggagaaagtcccagccgggaacagggcttcgaatcagggcaacagccagccccagcagaaatacactgttatgagcggtactccagagaagatcctcgagcactttctggagaccatacgattggaagcgaccctaaacgaggccaccgacagtgtgctgaatgatttcataatgatgcactgtgtgttcatgcccaacacgcaactgtgccccgctctggtggcacactaccacgcccagccttcccaaggtacagagcaggagaagatggactatgccctcaacaacaaacgccgggtgattagactcgtactgcaatgggctgcaatgtatggagacctcctccaggaggatgacgtgagcatggcttttcttgaggaattttacgtgagcgtgagcgatgatgccaggatgatcgccgctctcaaggagcagctgccagaattagaaaagattgtaaaacagatcagcgaggatgcaaaggcgccccagaagaaacataaggtactcctccaacagtttaataccggtgacgaacgtgcccagaaaaggcagccgatccgaggttcggacgaggttctgttcaaggtatattgcatggatcacacttacaccaccattcgggtgcccgtcgccacctctgtgaaggaagtgatctccgccgtggccgacaagctggggtctggtgagggattgattattgtaaagatgagctccgggggagagaaagtggttttgaaacccaatgacgtttctgtgttcactacgctgactataaacggcagactctttgcgtgccctagggagcagtttgactcacttactcccctaccagagcaagagggccccactgttggcaccgtaggtacgttcgaactgatgtcgagcaaagatctcgcctaccagatgacaatctacgactgggaacttttcaactgtgttcatgagctagaactgatctatcacaccttcggaagacataatttcaagaagactactgctaatctggatcttttcctgaggcggttcaatgagatccagttttgggttgtgactgagatttgcttgtgttcccaactgtcaaagcgtgtgcagttgttgaagaagtttatcaaaattgccgcccattgtaaagagtataagaacctaaacagcttttttgcaatcgtgatgggactgagcaacgttgccgtgtcccgcctcgcccttacgtgggagaaactgcctagcaaattcaaaaagttttatgcagagttcgagtcgctaatggacccgtcgcgaaatcatagggcctatagactcacggtcgccaaactcgagccccccttgattccatttatgccactgctaattaaggatatgacgttcactcatgagggtaacaagacattcatcgataatttggtgaacttcgagaaaatgcgcatgatcgccaataccgcgagaacagtcaggtattaccggagccagccattcaatccagatgcagcccaagcgaacaaaaatcatcaggacgtgagaagctatgtacggcagttgaacgtgatagacaatcagagaaccctttcacaaatgtctcatagactggagcccaggaggccatag

SEQ ID NO: 169768 - DNA, 3036 bp, Artificial Sequence
  derived and/or modified sequence
atggtggccgcccacgccgcccacagcagcagcagcgccgagtggatcgcttgtctcgataaacgaccactcgagcgatctagtgaggatgtagacatcattttcacacgccttaaggaggtgaaagcctttgaaaaattccaccctaatctcctgcaccaaatttgtctgtgtggatactacgaaaatcttgagaagggaattacccttttccgacaaggggatattggaactaattggtacgccgtgctggcaggcagcttagacgtgaaggtgtcagaaacgtccagtcatcaggacgccgtcaccatctgtactttaggcatcgggacggccttcggggagtccatcttggacaatactccacggcacgccacaattgtgacaagagaatcttctgaacttctgagaattgagcagaaggactttaaagccctgtgggagaagtatagacagtacatggcaggactgttggctcctccgtacggcgtgatggagacgggctccaacaacgatcggattcccgacaaggaaaacactccattgatagagccacatgttccacttcgcccggcaaatactatcaccaaagtccctagtgagaaaatcctgcgtgcaggcaaaatcttgagaaacgcaatcctatctagagcgcctcacatgatccgcgacaggaagtaccatctaaagacttataggcagtgctgcgtagggacagagctggtcgattggatgatgcagcagacaccctgcgtgcacagtagaactcaagccgtgggaatgtggcaggtgctgctggaagacggagtgctgaaccatgtggatcaggaacaccacttccaggataaatacctgttctatcggttcttggatgatgagcatgaggacgcacccctcccaaccgaggaagagaagaaggagtgtgatgaggagctacaggacacaatgcttttactgtcccaaatggggccagatgcccatatgagaatgatcttacggaaaccacctggacagcgtaccgtggacgatttagagataatttatgaagaactcctacatataaaggcattaagtcatctcagtaccacagtgaagagggagctagccggagtgctcatcttcgagagtcacgccaagggcgggaccgttctttttaatcaaggtgaagaagggacaagctggtacatcatactgaaaggttccgttaacgtagtgatatatggaaagggggttgtttgtacgttacacgagggtgatgacttcgggaagctggctttggtcaatgatgcaccgcgagcagctagtatcgtgctgcgagaagataattgccattttttaagggtagacaaggaggatttcaatcgcattcttagggacgtcgaagcaaatactgtgaggctcaaggagcatgaccaggatgtcttggtactcgagaaagtgccggccggcaacagggcctcaaatcagggcaattcacaacctcaacagaaatatactgtgatgtcagggacacctgagaaaattctggagcacttcctggaaaccattaggttggaggcaactcttaatgaggccacagacagcgttcttaatgattttatcatgatgcactgtgtgtttatgccaaatacccaactgtgtccagccctggtggctcattaccacgcccagcctagtcagggcaccgagcaagagaagatggattacgcactcaataacaagagaagggtgatcagactcgtgctgcagtgggcggcaatgtatggcgatcttttgcaggaggacgatgtgagtatggccttcctcgaagagttctatgtctccgtcagcgatgacgcaaggatgatcgccgcgttgaaagagcagctacctgaactggagaaaattgtgaaacaaatcagtgaagacgcaaaggcaccccaaaagaaacacaaggtgctcctgcagcaatttaacacaggcgacgagagagcacagaagagacaacccattcgagggtccgatgaagttctgttcaaggtgtattgcatggatcacacatatacaacgatccgggtgcctgttgcaacatctgtgaaagaagtcattagtgccgtcgcagacaaattaggatctggggaaggtttgataatcgttaagatgagcagcggtggggagaaggtggtactgaagcctaatgacgtatccgttttcaccacactgacaataaatggaaggctcttcgcgtgccctcgggagcagtttgatagtcttactcctctccctgaacaggagggacccaccgttggcaccgtgggaacttttgagctcatgtcttccaaggatctcgcttaccagatgacaatctacgactgggagttgtttaattgtgttcatgagctcgagctgatctatcatacttttggacgccataacttcaaaaaaactaccgcaaacctggacctgtttcttcgcaggtttaacgaaatacaattttgggttgttactgagatttgtctgtgttctcagttgtccaagcgcgtccaactcctcaaaaagttcatcaaaatcgctgcgcattgtaaggagtataagaatctgaattcattttttgctatagtaatgggccttagcaacgtcgctgtctcccggctcgccctgacttgggagaaactaccttcaaaattcaagaaattttatgctgagtttgagtcgcttatggacccatccagaaaccacagagcttacaggttgaccgtggcaaagctggaaccgcctcttatcccatttatgcccctgttaattaaggacatgacattcacgcatgagggtaacaaaacctttatcgacaacctggtcaacttcgaaaagatgcggatgattgccaacacagcccgaacggtccgctattaccgcagtcagccctttaatccagatgccgcccaggccaacaagaaccaccaggacgtccggtcatatgtgcggcaattgaacgttattgataaccagcgtactctgagtcaaatgagccacagacttgagcccaggaggccatag

SEQ ID NO: 169769 - DNA, 2832 bp, Artificial Sequence
  derived and/or modified sequence
atggtggccgcccacgccgcccacagcagcagcagcgccgagtggatcgcttgcctggacaagcgacctcttgagcgctcctcagaggacgtcgacattatatttacccggctgaaggaagtgaaggctttcgagaaatttcaccccaacctgctacatcagatttgtctgtgcggctactatgaaaacttggaaaaagggattacattatttcgccagggcgacattggaaccaactggtacgctgtgctggccgggtctctggatgtcaaagtttccgagaccagctcccatcaagacgctgtaaccatctgcactttgggtatcggcacagccttcggcgagagcattttggataatactcccagacacgcaaccattgtgactagggaaagtagtgagctgctgcgaattgagcagaaagacttcaaggctttatgggaaaagtacaggcagtatatggcagggctgctggcccctccctacggagtgatggaaacaggatcaaataatgatcgaatcccagacaaggagaacacgccactgatcgagccacacgtgcctctccggccagccaatacgattacaaaagtcccgagtgagaaaattttgcgggccggaaaaatcctacgaaatgccattctttcccgagccccccacatgataagagacaggaagtaccacttgaaaacatatcgccaatgctgcgtcgggacggagctggtcgattggatgatgcagcagacaccgtgcgtgcatagccgcacccaggcagtgggaatgtggcaggtgctgctcgaggacggcgtattaaatcacgtagaccaggaacatcacttccaggataaatatctattctaccggtttctggatgatgagcacgaggacgctcctctgccaaccgaagaggagaagaaagagtgcgacgaggagctgcaggataccatgttgttgctgtcccagatggggccagatgctcacatgagaatgatattaaggaagcccccgggccagcggacggttgacgatctggagattatctacgaagagctcctgcacattaaagctctgagccatctgtcaacaactgtgaagcgggagctggccggggtgctgatatttgagagccacgctaaggggggcactgtgctctttaatcagggcgaggaagggacttcctggtatataattctaaagggatctgtaaatgtcgtcatatatggcaaaggcgtcgtctgcaccctccatgaaggcgacgacttcggcaaactcgcactggtaaatgacgcgcctcgggcagcgtccattgtccttagagaggataattgtcactttctgcgggtggacaaagaggactttaaccggatcctgagagatgtcgaagcaaacaccgtgcggctgaaagaacacgatcaggatgttcttgtcctcgaaaaagtgcccgcaggcaatcgggcttctaaccaaggcaattcacagccgcagcagaagtacacagtcatgtccggtactccagagaaaattcttgaacactttttagagacaatccgccttgaggcgaccctaaatgaggccacagactctgtgctgaacgacttcattatgatgcattgtgtgttcatgcctaacacccagctttgtcctgctttagtggcccattaccatgcacagccaagccagggcaccgaacaagaaaaaatggactatgcgctgaacaataaaaggagggtgatacgcctggtactccaatgggccgccatgtacggcgatttactgcaggaggatgacgtctccatggctttcttagaagaattctacgtttctgtctctgacgacgcccgcatgatcgctgcccttaaagagcaactgcccgagttagaaaagatagtgaagcagatatctgaagacgcaaaagctccccagaagaagcataaggtgctcctccagcaatttaatacgggagacgagagggcccaaaagcgccagcccattagaggcagcgatgaagtcctcttcaaggtctactgcatggatcatacatacactacaatcagagtgcccgtggctacttctgtgaaagaggtcatttcagcggtcgccgataaacttgggtccggcgaaggactcatcatagttaaaatgagcagcggcggagagaaagtcgtgcttaagccaaacgacgtctcagtgttcacaacactcactattaacggcaggctgtttgcttgccctagggagcaattcgactcccttacccctctacccgagcaagaaggccctaccgtgggaaccgtgggcactttcgaactgatgagctctaaggatcttgcgtaccaaatgacgatatacgattgggaactgttcaactgcgtacacgagctggaactgatttatcacactttcggcagacacaattttaagaaaactacggctaatctcgacctctttctgagacggttcaacgaaatacagttttgggttgtaacggaaatctgtctgtgcagtcagttgagcaagagggtgcaactgctgaagaagttcatcaagatcgcagctcactgcaaggagtacaaaaatcttaattccttctttgctatcgttatgggcctgagcaatgtggcggtcagccgcctggctcttacctgggagcgcatgatagctaataccgcgaggaccgtcagatactaccgcagccaaccttttaatccagacgcagcccaggctaacaagaatcatcaagatgtgcgaagctacgttcggcagctgaacgtgattgataaccagaggacactgtcccagatgagtcaccgcctcgagccacgtcggccttag

SEQ ID NO: 169770 - DNA, 2376 bp, Artificial Sequence
  derived and/or modified sequence
atgatccgggaccggaagtaccacctgaagacctaccggcagtgctgcgtggggaccgaactggtcgattggatgatgcagcaaaccccatgtgtgcactctagaactcaggccgtgggaatgtggcaggtccttttggaagacggcgtgctgaatcatgtcgaccaggagcaccactttcaggataaatacctgttttatcgcttcctggacgacgaacacgaggacgcaccactgcccaccgaggaagaaaagaaggagtgtgacgaagagcttcaggacacaatgcttctgctctctcaaatgggacctgacgcacacatgagaatgattttgaggaagccccctggacagagaactgttgatgacctcgagatcatctacgaggaactgttacacatcaaggcattgtcacacctgagtacgactgtcaaacgtgaactggccggggttttgattttcgaaagccacgcaaaggggggtacggtcctctttaaccagggggaggaggggacctcatggtatatcatcctgaaagggagcgtgaatgtggtcatctacggcaaaggggtcgtctgcaccctgcacgagggcgacgactttgggaagctcgccctggtcaacgacgcccccagggctgcatccatcgtcttgagagaggacaactgtcactttctgcgtgtagataaagaagattttaaccggatcctgagagatgttgaagccaatactgttcgtctgaaggaacacgaccaagacgtcctggtgctcgagaaggtaccggctggcaatcgggcctccaatcagggcaacagccagccacaacagaagtataccgtcatgagcgggactcctgaaaagattttggagcatttcttggagactatacgtctggaggcgaccctcaatgaggccacagatagtgtcctaaatgactttattatgatgcattgcgtctttatgccaaacacccagttatgcccagctctggtcgcccattatcacgcacagccttctcagggcacggagcaggaaaaaatggactacgctctaaataacaaacgacgcgtgatccgcctggtgcttcagtgggctgccatgtatggagatctcctccaagaggatgatgtctctatggccttcctggaagagttttatgtgtctgtgagtgatgacgcgaggatgatagccgctcttaaggaacagttgcccgagctggagaaaatcgtcaaacagatttctgaggacgccaaggcgccacagaaaaagcacaaggtgctattgcagcagtttaacacgggggatgaacgcgctcagaagcggcagcccattagaggcagcgatgaggtgttgttcaaagtgtattgcatggatcatacctatactactatccgggtgcctgttgctacaagcgtgaaagaggtcatctccgctgtggccgacaagctgggcagcggtgaaggactaattattgtgaagatgtcatccggcggcgagaaggtggtgttaaaaccaaacgacgtgtcagtcttcacaacattgactattaacggtcggctcttcgcttgccctcgggaacagttcgattcacttacacccctgcccgaacaggagggaccaaccgtcggaacagttggcaccttcgagctgatgtcaagtaaagacctggcgtatcagatgacgatatacgattgggaactattcaattgtgttcatgagctcgagctgatctatcacaccttcggacggcataactttaagaagaccacagccaatcttgatttatttctgcggagatttaatgagatccagttctgggtggtaaccgagatctgtctttgtagccagctaagcaaaagggtacagcttctgaaaaagtttattaagatcgccgcacattgcaaggagtataagaacctaaacagttttttcgccattgtgatggggctctcaaacgtggccgtatccagactcgccctgacctgggaaaagctcccttctaaattcaaaaagttctatgccgagttcgaatccctaatggatcccagtaggaaccatagggcctatcggctgacagtggctaaactggagccaccccttatcccattcatgcctctcctgatcaaggatatgacctttacacacgaaggcaacaagactttcatagacaacctggtgaactttgaaaagatgcgcatgatcgccaacacggcgcggacagtgcggtactaccgctcgcagccattcaatccagacgcagctcaggctaataaaaaccaccaggacgttcggagttatgtccgccagctgaatgtgattgacaaccagcgcacattgtctcaaatgtcacacaggctcgaaccaaggcgtccttag

SEQ ID NO: 169771 - DNA, 2577 bp, Artificial Sequence
  derived and/or modified sequence
atggccggcctgctggcccccccctacggcgtgatggagaccggcagtaataacgatcgtattcctgataaggagaatactcctctcatcgagccacatgtccccctcagacccgcgaacacgattactaaagttcccagcgaaaagatattgagagcaggcaaaattcttagaaatgccatcttaagcagggcccctcacatgatccgtgatagaaagtaccatctgaaaacgtatcggcagtgctgtgttggaaccgagctcgtcgattggatgatgcagcaaactccctgtgtgcatagccggacacaggcagtgggaatgtggcaggttctcctggaagacggtgtactgaatcacgtggaccaggaacaccacttccaggacaaatatctgttctatcgattcctggatgatgagcacgaggatgcccccctccctaccgaggaagaaaaaaaggaatgcgacgaagaactgcaggacaccatgctgttgctgagccagatgggcccagacgctcacatgaggatgatcctccgcaagcccccagggcaacggaccgtcgacgaccttgaaatcatctacgaagagcttcttcacatcaaagccctgagccacttgtctacaactgtgaaaagagagctggcgggtgtcctaatttttgaatcgcacgccaagggtggcactgttctgttcaaccagggggaagaggggacatcttggtacattatccttaaagggtctgtcaacgtcgtaatctacggtaagggcgtcgtctgcacactgcacgaaggcgacgactttggaaaacttgccctcgtgaacgacgccccgagagccgcctccattgtgcttcgggaagacaattgccatttcctgagagttgacaaagaagattttaacagaattctccgggatgttgaagctaacacagtccggctgaaggagcacgatcaagacgtgctggtgttagagaaggtcccggctggtaaccgggcatcaaatcaaggcaattcccagcctcagcagaaatacacggtaatgtccgggacgcctgagaaaatcctggagcacttcctcgagacaattagactggaagcaactctcaatgaggctactgacagcgtcctgaatgacttcataatgatgcactgtgttttcatgcccaatacgcagttgtgcccagcactggtagcccactatcacgcacaaccctctcagggaaccgagcaggaaaagatggactacgccctcaacaacaaaagacgcgtgattcggcttgtactgcagtgggctgcgatgtatggggatctgcttcaggaggacgacgtgagtatggcttttctggaagagttttacgtcagtgtctccgacgacgcgcgtatgatagccgccctgaaggaacagcttcccgagctagaaaaaatagttaagcagatctccgaggatgcaaaggcccctcaaaaaaagcacaaggtcttactccagcagtttaacaccggcgacgagagagctcagaaacggcaaccaatcaggggcagcgacgaggttctgtttaaggtgtattgcatggaccacacttacacaaccattcgggtgcctgtggcaacgtcagtaaaggaagtcatctccgccgttgctgataagctgggcagtggggaaggcttgataattgtcaaaatgtcgtccggcggggagaaagtggtgttgaaacccaatgacgtgtctgtgtttacaaccctgactatcaacggcaggctcttcgcttgtcctcgggagcagtttgactctctaaccccactcccggagcaggaaggacccaccgtgggtacagtcggaaccttcgagctgatgagttctaaagacctggcctatcagatgaccatctacgattgggagctgtttaattgtgtacacgaactggagctcatatatcacacttttggcaggcacaactttaagaagaccaccgccaatctggacttgttcctcaggcgctttaatgagatccagttctgggtcgtcactgaaatctgcctgtgttctcagttgtccaagagggtccagcttcttaagaagtttataaagatcgccgcacactgtaaagagtacaaaaacctgaattcattcttcgctatcgtgatgggcctgtccaacgttgcagtgagtaggctagctcttacgtgggaaaagctgcctagcaagttcaaaaaattttatgcggagtttgaatccctcatggacccttctcggaaccaccgcgcgtatcgcctgacagtagcgaagcttgagcctccactgattcctttcatgcccctgctcatcaaggatatgacatttacccatgaaggaaataagaccttcatcgacaaccttgtgaactttgaaaagatgagaatgattgctaacaccgccagaaccgttaggtattatcggtctcaaccttttaacccagacgctgcacaggccaataaaaaccaccaggatgtgaggagttatgtcagacagctcaacgtgatcgataatcagcgcacactctctcaaatgtcacacagattagaaccaagacgaccttag

SEQ ID NO: 169772 - DNA, 2577 bp, Artificial Sequence
  derived and/or modified sequence
atggccggcctgctggcccccccctacggcgtgatggagaccggcagtaacaatgataggattcccgacaaggagaacaccccccttattgaaccacacgtgccactgcggcctgcaaacacgataaccaaggtgccttccgagaaaattcttcgagcaggaaagatcctgcgcaacgctatcctgagccgcgccccacacatgatcagagacagaaaataccacctcaagacatatcgtcagtgctgtgtcggcactgaactggtcgattggatgatgcagcagactccctgtgtccactcccggacccaggctgtgggtatgtggcaggttctcctggaggatggagtcctgaaccacgtggatcaggaacaccattttcaagataagtacctgttttacagatttcttgacgacgagcatgaagatgctccacttcccactgaagaagaaaagaaagaatgtgatgaagagctccaggatactatgctgctgttatctcaaatgggaccagatgcccacatgagaatgatactccggaagccacctgggcagcgtaccgtcgacgatctagaaatcatttacgaggaactgctccacattaaagcactttctcatctcagcacaacagttaagagggagctggctggcgtgctaattttcgaatcccacgccaaggggggaacagtactctttaaccagggcgaggagggcacgtcctggtacatcattcttaagggctccgtgaatgtcgtcatatacggcaaaggcgtggtatgcacactgcatgaaggtgatgatttcgggaaactagcgctggtgaacgacgctccccgagcagcctccatcgtgttacgtgaagacaattgtcatttcctccgtgtggataaggaggacttcaacaggatactacgggacgtggaagccaataccgtgcgcctgaaggagcatgaccaggacgttttagtgctcgaaaaagttcctgctgggaatcgagcctccaatcaaggcaactcacaaccacagcagaagtatacggtaatgagcgggacacctgagaagatactggagcacttcttggagacgatacggttggaggctacacttaatgaggctacagacagcgtattgaacgattttataatgatgcactgcgtttttatgccaaacacccaactctgccccgctctggtggctcactatcatgcccagccaagccaagggacagagcaagagaagatggactacgccttaaacaataagcggcgagtcatcaggctggtgctccagtgggcagccatgtacggggacctacttcaggaggacgatgtcagcatggcattccttgaggagttctacgtgagtgtgtccgacgacgcccgcatgatcgccgcgctgaaagaacaattgcctgagttggagaaaatagtgaagcagattagcgaggacgctaaggccccgcaaaagaagcacaaagttctgctccagcagttcaacaccggggatgaacgggctcagaaacgccagcctatccgggggagcgatgaagtgctctttaaggtgtactgtatggatcacacctataccaccatccgagtgcctgtggccacatctgtgaaagaggttataagcgccgtggcagacaaactgggcagcggggagggtttgattatcgtaaagatgagttcggggggtgaaaaagtggtacttaaacccaacgacgtgtcagtgtttaccacattgacaatcaacgggaggctgtttgcatgtccccgagagcagttcgatagcctgacaccgctacccgaacaagaggggcccactgtgggtactgttggcacctttgagcttatgtcctcaaaagacctggcgtatcagatgactatctacgattgggagctctttaactgcgtccatgagctggagctaatttaccataccttcggcagacacaatttcaagaaaaccaccgccaacctggacttgttcttaaggaggttcaatgagatccagttctgggtagtgacagagatctgcctctgcagccagctttctaagcgcgttcagttgctgaaaaaatttatcaagatcgccgcccattgcaaagaatacaagaacctgaatagtttttttgctatcgtgatgggtctcagcaatgtggccgtcagtaggttggcactgacttgggagaaactgccaagcaagtttaaaaaattttacgctgaattcgagtccctaatggacccctcacgcaatcaccgggcataccgcctgactgtggcgaaactcgagcccccactaattccgttcatgcccttactgattaaggacatgacatttacccatgaagggaacaagacgtttattgacaacctggttaatttcgaaaaaatgcgcatgatagccaataccgcccgcacagtccggtattaccggagccagcccttcaatcccgacgcagcccaggccaataaaaaccatcaggacgtgcggtcctatgtcaggcagctaaatgtgatcgacaatcagcgaaccctctcacagatgtcacacagactggagccccggcggccatag

SEQ ID NO: 169773 - DNA, 3033 bp, Artificial Sequence
  derived and/or modified sequence
atggtggcggcacacgcagcccacagctcttccagcgctgagtggattgcctgtctggacaagcgtcctttggagaggtctagcgaggacgtggatatcatcttcacgagactcaaggaagttaaggcttttgaaaaattccatccaaacttgctgcatcaaatttgcctttgtgggtactatgagaaccttgaaaaaggcatcactctgttccgtcagggggacattggcacgaactggtatgccgtgctggccggttcactcgatgtcaaggtcagtgaaacaagcagtcaccaggatgcggttacgatctgcacactcggcatcggaacagcctttggagaaagtattcttgacaatacaccgcgacacgccacgatagtcacaagggaaagcagcgagctcctcagaattgagcagaaggacttcaaggccctgtgggagaagtatagacagtatatggctggcttgttggccccaccatatggggtaatggaaaccgggtccaacaatgataacatcttcaaagaaatgaccccactgattgaacctcatgtccctctccggcctgctaatactattaccaaggttcctagtgaaaagatcctccgagcgggaaaaatcctgcgcaacgcaatcctatcaagggcaccccacatgattcgcgaccgcaaatatcacctaaagacataccgacaatgctgtgtcgggacagaactagttgattggatgatgcagcaaaccccgtgtgtccacagccgcacacaagcggtgggcatgtggcaggtcttactggaagacggtgtgcttaatcatgtggatcaggagcatcactttcaggacaagtacctgttttataggttcttggatgacgagcatgaggacgctccacttccaaccgaagaagagaagaaggaatgtgacgaggaattgcaggatacaatgttgttgctgtctcagatgggcccagacgcacatatgaggatgatcctgaggaagccccctggccagcgcactgtcgacgacctggaaattatttacgaagagctgctgcatatcaaagccctttcacacctgtccaccaccgtgaaacgagagttggccggtgtgctgatcttcgagagccacgcaaaagggggtacagtactctttaaccagggcgaggagggtacctcttggtacattatattgaaagggagtgtgaacgtggtgatttacggcaagggggttgtgtgcacacttcacgaaggagatgacttcgggaaactggccttagttaacgacgctcccagggccgcttccatcgtgctccgcgaggataattgtcatttcctgcgtgtcgataaggaggattttaatcggattctccgtgacgtggaagctaatacagtaagactcaaggagcacgatcaggatgtgctcgtcctggagaaagttcccgcaggtaaccgagcaagcaatcagggcaattctcagccccagcagaaatacacagtgatgagcggaacaccggagaagatcctagaacactttctggagaccattagattggaggccaccctgaacgaggcaacagattctgtcctgaacgatttcatcatgatgcactgcgtgttcatgccgaacacacagctatgtccagccttggttgctcattaccatgctcagcctagtcaggggacggagcaggaaaaaatggattatgctttaaacaacaaacgtagggtgattcgcttggtcctccagtgggccgctatgtatggagatttattgcaggaagacgacgtcagcatggcctttttggaagaattttacgtcagtgtgtccgacgatgccaggatgatcgccgctctgaaagaacagctgccagagttggaaaagattgtgaagcagatctctgaggacgccaaggccccacagaagaaacacaaggttcttttacagcaattcaacaccggcgatgaacgggctcagaagagacagccaattcgcggaagtgacgaggtattattcaaggtgtattgcatggaccacacttacacaactatcagagtgcccgtcgctacctcagtaaaggaggtcatttctgccgtggctgataagctcggatcaggggagggcctgattatcgtcaagatgtcatctggaggcgagaaggtggtcttaaagcctaacgacgtgagcgtgttcactacactgactatcaacggccgattgtttgcgtgtccacgggaacagttcgactcactcacacctctacccgagcaagaaggcccaaccgtcggcaccgtgggcacttttgagctcatgtcttccaaagacttggcctaccagatgacaatttacgattgggagctcttcaattgcgtgcacgaactagagttgatttatcacacttttggtagacacaacttcaagaagacgaccgcaaacctggatcttttccttcgaagattcaacgaaatccagttctgggtggttactgagatttgtctctgctctcagctgtcgaagcgtgtccaactgttaaaaaaatttatcaagatagccgctcattgtaaagagtataagaacctgaattcgtttttcgccattgtgatgggcctttcaaacgttgccgtctcacgactcgctctgacatgggaaaaactgccttccaagtttaaaaagttctatgcggagtttgagagcctgatggatccatctagaaaccatcgggcatatcgtttaacagtggctaaacttgagcctccactcattcccttcatgcccctgctgataaaggacatgacctttacccacgaaggaaacaagacttttattgacaatttagtaaactttgagaagatgcgcatgattgccaatacagcaaggacagtgcgctattatcgctcccagcccttcaaccccgatgcagcccaggctaacaagaatcatcaagacgtgcgcagctatgtgcgccagcttaatgttatcgacaatcagcgtaccctgtcccaaatgtcacatagactggagccacgcaggccatag

SEQ ID NO: 169774 - DNA, 3036 bp, Artificial Sequence
  derived and/or modified sequence
atggtggccgcacatgctgcacacagctcctcctccgcagaatggatagcctgtctcgataagaggcccctggagcggtcatcagaggatgtggatataatcttcacccgactgaaggaagtgaaggcatttgaaaagtttcaccctaacctgcttcatcagatttgcctgtgtggctattacgagaatctagagaagggcatcacactatttaggcagggagatattggcaccaattggtacgcagtccttgccggatcccttgatgtcaaggttagtgagaccagttcacatcaagatgctgtgactatttgtacgctcggcattggaacagcgttcggagagagcatcttagacaacactcctagacacgccactatagtcacaagagagtccagcgagctcctccgcatagaacagaaggatttcaaggctctgtgggaaaaatatcgtcagtatatggctggccttttggcgccaccatacggagtaatggaaacaggcagtaacaacgaccggattcctgataaagagaacaccccccttatagagccacacgtaccacttcgccctgcaaataccatcaccaaggtgccctctgaaaaaatcctgcgcgcagggaaaattctgcgcaacgctatcctgtcgagagcccctcacatgatccgcgaccgtaaataccatctgaaaacctacagacagtgctgcgtgggaaccgagctggtcgactggatgatgcagcagaccccttgcgtacatagtcggacccaggcagtgggaatgtggcaggtgcttcttgaggatggagtcctgaatcacgtggaccaggagcaccacttccaggacaaatatctcttctatagatttctagatgacgaacatgaggatgccccattgcccacggaagaggaaaagaaggaatgtgatgaagaactccaggacactatgttgcttctgtcccagatggggccagatgctcacatgaggatgatactccgcaaacccccagggcagcggactgtggatgacctcgaaataatttacgaggagctgctccacataaaggccctgagtcatctgagcaccactgtcaagagagagctggccggagtgcttattttcgaatcccacgctaaggggggtaccgtcctttttaaccagggagaggagggaacaagctggtatattatactgaagggctctgtgaacgtagtgatctatggcaaaggcgttgtctgtacacttcacgagggagatgacttcgggaagctggcgctagtaaatgatgcaccacgagccgcttccattgttttgagggaagacaactgtcattttctcagagttgacaaagaggactttaaccgtatcctgcgggatgtggaagccaacaccgtgaggctcaaggaacacgaccaagatgtgctggtgctggagaaggtccctgccggaaaccgcgcaagtaatcagggtaattctcaacctcagcagaagtacacagtaatgtcagggacaccggaaaagattctggagcacttcctggagacaatacggctcgaggccactctgaacgaggctactgacagcgtgcttaacgacttcataatgatgcattgcgtattcatgccgaatactcagctgtgtcccgctttagtcgcccattatcacgctcaaccaagccagggaacagagcaggaaaagatggattatgccttaaataataaaaggcgggtgatccgcctggtgctgcagtgggcagctatgtatggcgatttgctccaggaagacgacgtgtcaatggcattcctcgaggagttttacgtgtcagtgtcggacgacgcgcgaatgatagccgcactcaaagagcaactccccgagttggaaaagatcgtcaagcagatatctgaggatgccaaggcacctcaaaagaagcacaaagttctgctgcagcagtttaacactggagacgaacgcgctcagaaaagacagccaataaggggatccgacgaggtgctgttcaaagtatactgtatggatcacacttatacaacaattagagtccctgtggcaacttccgtgaaagaggttatcagcgccgttgcggacaagctcggaagcggcgaggggcttatcatcgtaaagatgagctctggtggggagaaggtggtgctgaaacctaacgacgtgtctgtgtttaccacacttactattaacggcagactgttcgcctgcccaagggagcaattcgactcactaacgcccctacccgagcaagaaggcccaacagtgggtaccgtgggtaccttcgaactgatgtcctcaaaagatctggcgtaccagatgacaatttatgactgggagctgttcaattgcgtgcacgagttagagttgatttaccacacatttggcagacataattttaagaaaacgaccgctaatctggatttgttcctaagaaggttcaatgaaatccagttttgggtggtcactgaaatatgcctatgttcacagctttcgaaacgagtgcagctcctgaagaagtttattaaaattgccgcacactgcaaagaatataaaaatctgaatagcttcttcgccattgtgatgggtttgtcgaatgtcgctgtttccagactggccctgacctgggagaagctcccctccaaatttaagaagttctatgccgaattcgaatccctaatggatccctcgaggaatcatagagcctacaggttaaccgtggcaaagttggagccaccactgatcccgtttatgcctcttctaattaaggacatgaccttcacccatgagggcaacaaaacattcattgataacctagttaacttcgagaaaatgcggatgatcgccaacacagcgaggaccgtgcgttattatcgatcgcagcccttcaaccccgacgctgcccaggccaataagaatcatcaagacgtccgcagctacgtgcgacagctgaacgtgattgacaatcagaggaccctcagtcaaatgtctcatcggttagagcccaggaggccctag

SEQ ID NO: 169775 - DNA, 2832 bp, Artificial Sequence
  derived and/or modified sequence
atggttgccgctcatgccgctcatagttcctcttcagcagagtggatcgcatgtctggacaaacgaccgttagaacgctcctctgaggacgtggacattatctttacgagattgaaggaggtgaaggcatttgagaaattccacccaaatctgttacatcagatatgtttgtgcggctactacgagaacttagaaaagggcatcacactgttccggcaaggcgatattggcacaaattggtatgctgtcctggccggttcactcgacgtcaaggtgtctgagacctcaagccaccaggatgctgtgaccatatgtactttagggattgggactgcattcggcgagagcatcctcgacaacacccctaggcacgccaccatagtgacgagggaatctagtgaattgctgagaatcgaacagaaagatttcaaggctttatgggaaaagtaccgacaatatatggcagggctgctggcccctccctatggcgtgatggaaactgggtccaataatgatagaattcctgacaaagaaaatactccactgattgagcctcacgtcccacttagacctgctaataccatcacaaaagtaccgtcagagaagatactgagggccggaaagatcttgcgaaacgcaatactaagcagggcaccgcacatgattcgggatcgaaagtatcacctcaagacctataggcagtgctgtgtcggcaccgagctggtggactggatgatgcagcagacaccttgtgtccacagcagaacccaagccgtcggtatgtggcaagtgctgcttgaggatggtgtccttaatcacgtcgaccaggagcatcactttcaggataagtatctattctatcggtttctggacgatgaacacgaggacgctcccttgccaacggaagaggaaaaaaaggagtgcgacgaagaactacaggacacaatgttactcttatcacaaatggggcctgacgcacatatgaggatgattttgaggaagcctcctggacaacgcacagtggatgatttggaaattatctacgaagaactcctccatattaaggcactgtctcaccttagcacaaccgtgaaaagagagctcgccggtgtcctgattttcgagagccacgccaagggaggcaccgtgttgtttaatcaaggtgaggaaggtacaagctggtacataatactcaagggcagcgtcaatgtggtgatctatgggaaaggggtcgtgtgcacgctccacgagggagacgattttgggaagctggcactggttaacgatgcccctcgggctgccagcatcgttctgagagaagataactgtcactttctgagagtggataaggaagactttaaccgcatcctccgcgatgtggaagccaacactgttaggctgaaagaacatgatcaagatgtgcttgtgctggagaaggtgccagcaggtaatagagcctctaatcaaggtaactctcagcctcaacagaaatatactgttatgtcaggcacccctgagaagattcttgagcacttcctcgagactattagactggaggccaccttgaatgaagcaaccgattctgtactgaatgatttcataatgatgcactgcgtcttcatgccgaacacccaactgtgtccagccctcgtggcccattatcacgcccaaccctctcagggcaccgagcaggaaaagatggattacgccttaaataacaaacgcagggtcatcagattggtcctccagtgggccgcaatgtacggagacttactgcaggaagatgacgtctcgatggccttccttgaagaattctacgtgtccgtgtcggacgatgccaggatgatagccgcattaaaggagcagctgccagaactggagaaaatcgttaaacagattagcgaggatgccaaggcacctcaaaagaaacacaaagtcctgctgcaacagttcaacaccggtgacgaaagggcacagaagagacaacccatacgtgggtccgacgaggtgctgttcaaggtgtattgtatggaccatacctatacaaccatcagggtacccgtagctacttccgtaaaggaggtgattagcgctgtggccgacaagctgggatccggagaaggcctgatcatagtgaaaatgtccagcgggggagagaaggtggtcctcaagcccaatgatgtgtctgtgttcacaaccctcacgattaatggtagactcttcgcatgtccacgcgagcaattcgattcactgactcctctgcctgagcaggagggccctacagtcgggaccgtgggaactttcgagcttatgagcagcaaagatctggcttaccagatgactatctacgattgggagttattcaattgcgtacatgaacttgagctcatataccacacatttgggagacataattttaaaaagaccacagctaatctggatctgtttctccgtcgctttaatgaaatccaattttgggtggtgacagaaatttgtctctgcagtcagctcagcaagcgagttcagctcctgaagaagttcatcaaaattgccgctcactgcaaggagtataagaatcttaactcattttttgccattgtgatgggcctttccaacgtggccgttagtcggctggcgctgacctgggagagaatgatcgctaacaccgctcgtactgtccggtattataggtcgcaacctttcaatcccgacgccgctcaggctaataaaaaccaccaggacgtcaggtcatatgtaagacagctgaacgtgatagacaatcaacgaacccttagccagatgtctcacaggctcgaaccgagaagaccatag

SEQ ID NO: 169776 - DNA, 2376 bp, Artificial Sequence
  derived and/or modified sequence
atgattagagaccgcaagtatcatctgaaaacgtatcgccagtgctgcgtaggaacagaattagttgactggatgatgcaacagacaccctgtgtacattctagaacccaggccgtggggatgtggcaggttctcctggaagatggagtgctgaaccacgtggatcaggagcaccattttcaggataaatacctgttttacaggtttctggatgacgagcatgaggatgcccctctgcccacagaggaggaaaaaaaagaatgtgacgaggagttgcaagacaccatgctactgctgagccagatgggccctgatgctcatatgcgcatgatcctcagaaagcccccaggtcagcgcaccgttgacgatttggaaatcatatatgaggaactgctccatataaaggccctgagccatctttcgacaactgtgaagagagagttggccggagtgttgatattcgaatcccacgccaagggcggaactgttttgtttaaccagggggaggagggtacatcctggtatattattctcaagggatcagtaaacgtcgtaatatacggcaaaggcgtcgtgtgtacactgcacgaaggcgacgacttcgggaagctagccctggtgaacgacgctccccgagctgcatctattgtcctgcgcgaagataattgtcattttctgagagtggacaaggaggattttaataggatactcagggacgtggaggccaataccgttaggctgaaggagcacgatcaggacgtcctggtgctagagaaggtcccagctgggaacagagcctctaaccagggaaattctcaacctcagcaaaagtatactgttatgagtggcacaccagagaaaatactggaacacttcttggaaactatacggctggaagccaccctgaatgaagccaccgacagtgtcctgaatgattttatcatgatgcattgcgtatttatgcctaacacacagctctgccctgcattggttgcacattaccacgcacagccttcacaggggacagagcaggaaaagatggattacgcactgaataacaagcgccgtgtgatcaggttagtgttacagtgggcagcaatgtatggcgacctgctgcaagaggacgatgtgagtatggcttttctcgaggagttctacgtgagcgtcagcgatgacgcacgcatgatcgctgccctgaaggagcagttacccgaactagagaagatagtcaagcaaatatcagaggacgctaaggcgccacaaaaaaagcataaagtcttgctacagcagtttaacacaggcgatgagagggcccaaaagcgtcaacctattaggggctctgacgaggttcttttcaaggtgtactgcatggaccatacttacacaaccataagggtccccgttgccacctcggtgaaggaggtgatttccgcagtcgccgataaacttggcagtggagagggtctaatcatagtgaagatgagttcaggcggtgaaaaggtggtgttgaagcccaatgacgtgtccgtgttcacaaccctcactatcaacggaaggcttttcgcatgcccgcgagaacagtttgatagtctgactccgcttccagagcaggaggggccaacagttggaaccgtggggactttcgagctgatgagctccaaggacctggcttaccagatgacaatctatgattgggagctgtttaactgcgttcacgaactagagctgatttaccacaccttcggtcgacacaactttaaaaaaacgactgccaatctggacctctttctcaggcggttcaatgagatccagttctgggtggtgactgagatctgcttatgctcacaactttcaaagcgcgtgcagctgctcaagaaattcatcaaaatcgcggctcattgcaaggaatacaagaaccttaattcctttttcgccatagtcatgggcttgtctaacgtggcggtgtcaaggctggcccttacatgggaaaagctgccgagcaaatttaaaaaattctatgccgagtttgagtctcttatggatccatcccgcaaccaccgcgcttatagactgacggtagccaaactagagccaccactgatcccctttatgccacttctgattaaggatatgaccttcacccatgagggaaacaaaacttttatcgacaatctggtgaactttgaaaagatgcggatgatagccaacactgctcgtaccgttcggtactaccggtcccagcccttcaatcccgacgcagctcaggccaacaagaatcatcaggatgtccgctcatatgtaagacagttgaacgttatagataaccagcggacccttagccaaatgtcacaccgcctcgagccacgacgtccctag

SEQ ID NO: 169777 - DNA, 2577 bp, Artificial Sequence
  derived and/or modified sequence
atggcaggccttctagctcctccttacggagtgatggagaccggctctaacaacgataggattcctgataaggagaacacacctcttattgaaccccatgtgccgctcaggcccgctaacacaattaccaaggtcccctcagagaagatactgcgcgcaggtaagatactgcggaacgctatactatcaagggcccctcacatgatccgcgatcgtaagtatcaccttaagacctaccgacaatgctgcgtcggaacagaactagtcgactggatgatgcaacagaccccttgtgtgcactctagaacacaggccgtaggcatgtggcaagtgctgctggaggacggagtgcttaaccacgtagatcaggaacaccactttcaggataagtaccttttctacaggtttctggatgacgaacatgaagacgcccctcttcctacagaagaggaaaagaaagagtgcgacgaagagctccaagacaccatgttgcttctttcacaaatgggccctgacgcccacatgagaatgatccttaggaaacctcctgggcaaaggacagtggatgacctcgaaattatttacgaagagctcctgcatataaaagcactgtctcaccttagcactacagtgaaacgggagctcgctggagtcctgatctttgagagccacgcaaaagggggaaccgtcctcttcaaccaaggcgaggaggggacgtcctggtatataatcttgaagggcagtgtgaatgttgtcatctacggaaagggcgtggtttgcaccctccatgaaggggacgactttggtaagctggcactggttaacgacgcgccacgagccgcttcgattgtattgcgcgaagataattgtcactttctccgggtggacaaggaggacttcaatcgtattcttagggacgtagaagccaacactgtgcgcctcaaagagcacgaccaggatgtcctggtgctggaaaaggtgcctgccggaaatcgtgcgagcaatcaaggtaatagtcaaccccagcagaaatatacagtaatgtccggtaccccagaaaaaatattggaacatttcctcgaaacaatccgattagaagctactttaaatgaggcgaccgactccgttcttaacgacttcatcatgatgcactgcgtttttatgcccaacacacagctttgccctgcgttagtggcacattatcatgcccagcccagtcaaggcacagagcaggagaagatggactatgcactgaataacaaaaggcgagttattcggctcgtgcttcagtgggctgccatgtatggtgacctgctgcaggaggacgatgtgagcatggcctttctggaagaattctacgtttccgtctcagacgacgccagaatgattgcagctctcaaagagcaactcccggagttggagaagatagtaaaacagatatctgaggatgcaaaggctcctcaaaagaagcataaggtgctgctccagcaattcaacacaggggacgagagagctcagaaaaggcagccgatcaggggtagcgacgaagtcttgttcaaggtctactgtatggaccacacttatacaactatccgagtccctgttgccacgagtgtgaaggaggtgatttcagctgtcgcagataagctcggctctggagaaggtctgattattgtgaagatgagttccggaggagagaaggtggtgctcaagcccaacgacgtttcagtattcacaaccctgaccataaatggacgtttgtttgcctgtcccagggagcagttcgattctttaacaccgcttccagaacaagaaggccctaccgtgggaactgtgggcacattcgagctgatgagctccaaagatctggcttatcagatgaccatatacgattgggaactgtttaactgcgttcacgagctcgagctaatataccatacctttggtcggcacaacttcaagaagacaaccgccaatttggatttgtttcttcgccgttttaatgagattcaattctgggtggtcacggagatctgtctttgttcccagcttagcaagcgtgtacagttactgaagaaattcatcaagatcgccgctcattgtaaggagtataaaaatttgaatagcttcttcgccattgtgatgggactgtcaaatgtggccgtgagcagattggcactgacctgggaaaagttacctagcaaattcaagaagttttacgctgagtttgaatctctgatggaccccagccgcaatcatagagcgtatcgactgactgtggcaaagctggaaccccctttgatcccatttatgcctctcttaataaaggatatgaccttcacccatgagggtaacaaaaccttcatcgacaatctggtcaattttgagaaaatgaggatgatcgcaaacaccgctcggaccgtaagatactacagaagtcaaccctttaaccccgacgccgctcaggctaacaaaaatcatcaggatgtcaggagctacgtaagacagttaaacgtgattgataaccagaggaccttatctcaaatgtcccatcggctggagccaagacgcccttag

SEQ ID NO: 169778 - DNA, 2577 bp, Artificial Sequence
  derived and/or modified sequence
atggccggattgctggcccctccgtacggtgtgatggaaacgggctcaaacaatgaccgaatacctgacaaggagaacacccccctaatcgaaccacatgtgcctcttcggccagccaacacaattactaaagtaccctctgagaaaatcctcagagcaggcaaaatcttgcgaaatgccattctgagtcgggctccccacatgatcagagatcgaaagtatcatctcaagacctacagacaatgctgcgttggaaccgaactggtggattggatgatgcagcagaccccatgtgtgcatagtaggacccaggccgtcgggatgtggcaagttctgcttgaggatggtgtgcttaatcacgtggatcaggagcaccatttccaggataagtacctcttctacaggtttttggatgatgagcacgaagatgcacccttgcccactgaagaggaaaagaaagagtgtgacgaggagcttcaggataccatgctgctgctcagtcaaatgggacctgacgcccacatgcgtatgatcctcagaaagcctcctgggcagagaactgtggatgacctggagattatctacgaagagctgctgcacatcaaggccctgtctcacctgtccaccaccgtcaagcgcgagctggctggggtgctgatattcgagtctcatgccaagggaggtaccgtattattcaatcagggcgaagagggaacgtcatggtacattatccttaaaggaagcgtgaatgtggtgatctatggtaagggggttgtgtgcactctccacgagggcgatgatttcggaaagctggcactggttaacgatgcgccaagagcagcgtctattgttttgcgcgaagataattgccacttcctgagagtggataaagaggattttaaccgaattctgagggacgtagaggccaataccgtccgactgaaagagcacgaccaagatgtcctagtgctagagaaagtgcctgccggaaacagagccagcaaccagggtaattctcagccgcagcagaaatacaccgtgatgtctgggactccagaaaagatattggagcactttctggagactataaggctagaagctactcttaacgaggccactgacagcgtgcttaatgacttcattatgatgcattgtgtcttcatgcctaatactcaactttgtccagctcttgttgcacactatcatgctcagccatcccaggggaccgaacaagaaaaaatggattacgcccttaataacaagcggagagtgatcaggctcgtgcttcaatgggccgctatgtatggcgatctccttcaggaggacgatgttagcatggccttccttgaggagttttacgtatcagtttcagacgacgcccgaatgatcgcggcactgaaggagcagctgcccgagcttgagaagattgtaaagcaaatctccgaggacgccaaggcaccacagaaaaaacataaggtgctgttacaacagttcaacaccggcgacgagagagctcagaaaagacaacccattcgcggtagcgacgaggtgctgtttaaggtgtactgcatggaccacacctatacaaccattcgcgttccagtggcaacaagcgttaaagaggtcatttcggctgtggctgataagctcggtagtggggaggggctcattatcgtaaagatgtcttcgggaggggagaaggtcgtcttaaaaccaaacgacgttagtgttttcacgacgctgacaatcaacgggcgactctttgcctgtcccagagaacagttcgactctctcacaccccttccagaacaggaaggcccaaccgttgggactgtaggaaccttcgagctgatgagctccaaggatcttgcataccagatgactatctacgattgggagctttttaattgcgtacacgagctggagttgatctaccatacatttggccgtcacaatttcaaaaagaccaccgctaaccttgacctgtttctccgtcgcttcaatgagatccagttctgggtggtgacagagatctgcctatgctcacagctctccaagagggttcagcttctgaaaaaattcattaaaatcgcagcacattgtaaggaatacaagaacctgaatagcttttttgccatcgttatgggcttgtctaacgtggctgtgtcaaggctagctctgacctgggaaaaactaccctccaaattcaagaaattttacgccgagttcgaaagtttgatggatcctagcaggaatcatagggcctatcgcctcaccgtggctaagttggaacccccactcataccctttatgccactcctgataaaggacatgacatttacccacgagggcaacaaaacctttattgacaatttagtcaactttgagaagatgaggatgatcgccaacaccgctcgtacggttcggtactaccgaagtcagcctttcaacccagacgctgcacaggccaacaaaaatcatcaggacgtgcggagctacgtgcggcagcttaatgtgatcgacaatcagaggactctgtctcagatgagccaccggctcgagccacgaagaccgtag

SEQ ID NO: 169779 - DNA, 4338 bp, Artificial Sequence
  derived and/or modified sequence
ccctccctctccccaccgccccaggccgcgggagcccgcggggagggcgggcctgtcgcagccgcgctggtcgccaggcgtccgggaggagcggggtccgcgcggcggacgaggcgggggcggaggcgcaggcagagcgagcgcgggaggtcgccgcagccagggacaccgcgcgccgccgctcaacatggtcgctgcgcacgctgcccattcttcctcctctgccgagtggatcgcctgcctggataaaagaccactggagcgatccagcgaagatgtggatataatcttcactcgactgaaagaagttaaagcttttgagaaatttcacccaaatctccttcatcagatttgcttatgtggttattatgagaatctggaaaagggaataacattatttcgccagggtgatattggaacaaactggtatgctgtcctggcagggtctttggatgttaaagtatctgagaccagcagtcaccaggatgctgtgaccatctgtaccctgggaattgggacggcctttggagagtccattctggacaacacaccccgccatgcaaccatcgttaccagggagagcagtgaactgctccgcatcgagcagaaggacttcaaggcactatgggagaaatatcgacagtatatggcaggacttctggctcctccttatggtgttatggaaacgggctctaacaatgacaatatttttaaagaaatgacacctctcattgaacctcacgttcctcttcgtcctgctaacaccattaccaaggtcccttcagagaagatcctcagagctggaaaaattttacgaaatgccattctctctcgagcacctcacatgataagagatagaaaataccacctaaagacatacagacaatgctgtgtgggaactgaactggtggactggatgatgcagcagacaccatgtgttcactcccggactcaagctgttggcatgtggcaagtcctgttagaagatggtgttctcaaccacgtggaccaggagcaccatttccaagacaaatatttattctatcgatttctggatgatgagcacgaggatgcccctttgcctactgaggaggagaagaaggagtgtgatgaggagctccaggacaccatgctgctgctgtcacagatgggccccgacgcccacatgaggatgatccttcgcaaaccacctggccagaggactgtggatgacctagagattatctatgaggagcttcttcatattaaagccttatcccatctttctaccacagtgaaacgagagttagcaggtgttctcatttttgagtctcacgccaaaggagggactgtgttgtttaaccagggggaagaaggtacctcctggtacattattctaaaaggatcagtgaatgtagtcatttacggcaagggtgtggtctgcaccctgcatgaaggagatgacttcggcaagttagcactagtgaatgatgccccacgagctgcctctatcgtcttacgagaagataactgccatttcttaagagtagacaaggaggatttcaaccggatcctaagggacgtggaggcgaatacagtcagacttaaagaacatgaccaagatgtcttggtgctggagaaggtcccagcagggaacagagcttctaatcaaggaaactcacagcctcagcaaaagtatactgtgatgtcaggaacacctgaaaaaattttagagcattttctagaaacaatacgccttgaggcaactttaaatgaagcaacagattctgttttaaatgactttattatgatgcactgtgtttttatgccaaatacccagctttgcccggcactggtggcccactaccacgcacagccttcacaaggtacagaacaggagaaaatggattatgccctcaacaataagaggcgagtcatccgcctggttctacagtgggctgccatgtatggagacctcctgcaagaggatgacgtgtctatggccttcctggaggagttttatgtatctgtatcagatgatgcccggatgattgctgccctcaaggagcaactgccagagttggagaagattgtcaagcaaatctcagaagatgcaaaggcaccacaaaagaagcacaaggttcttttgcaacagttcaatacgggcgatgagagagcccagaagcgccagcctatccgcggctctgatgaagttctgtttaaggtctattgcatggaccacacctacacaaccattcgggtgccagtggccacttcggtgaaggaagtcatcagtgcagttgccgacaagctgggctccggggagggcctgatcatagtcaagatgagttccggaggagaaaaggtggtgctcaaacctaatgatgtttcagtatttacgacgctcaccattaatggacgcctgtttgcttgcccgcgagagcaattcgattcactgactcccttaccagaacaggaaggcccaactgttggaacagtgggaacttttgaactgatgagctccaaagatttagcataccagatgacaatttatgattgggaactcttcaactgcgtgcatgagctggagctaatctatcacacatttggaaggcataattttaaaaagaccacagcaaacttggatttgttcctgaggagatttaatgaaattcagttttgggtcgtcactgagatctgcctttgttctcagctcagcaagcgtgttcagctattaaaaaaatttattaagatagcagcccactgtaaggagtataaaaatctgaattccttttttgccatcgtcatgggactaagtaacgttgctgtgagccgcttggcactaacgtgggagaaactgccaagcaagttcaagaagttctatgcggagtttgaaagtttaatggacccttcaaggaaccacagggcctacaggctgacagtagctaagctggaacctcctctcatccccttcatgcctttgctcattaaagatatgacatttactcatgaggggaacaagacgttcattgacaatctagtaaactttgaaaaaatgcgcatgattgcaaatacggccagaacagtgagatactacaggagccaacccttcaatcctgatgcagctcaagctaataagaaccatcaggatgtccggagttatgtacggcaattaaatgtgattgacaaccagagaactttatcacagatgtcacacagattagagcctcgtcgaccatagacatttcaaatgcccaaagcaacagtttgtctccagtccacaatctttcaaaaatgccatttatgctactactgactgtattgccactagagaattctacaaaacaagcaaaaacacatcctgagacacctcagggctgcattcagcttaccagctacctagcaagagaaggaattatttgacatgcctaaagcttacacactctagcttaggaatccccagtttgtggctaccctgtttcatttccacttgtgccatcttctttgctgaagtgttgaataaggcccacgtgaagagtttggtagaaatagccttgtcaagagaactagcaagcccctgacatttttttctaagagtgtttatgggatgagatgtgctacaaatgggatagatttggataaaattttaactcaacatcttgatttggagcctggggtttcgggaaggtgttgaggaatctatagaagtccaaattataggttgtattcttccatcttcattgtcttacctctgaaggaatagaacctgaccacattattatgaaacattatggctgtttatgtaatttagggaggactggtctgtaatttctgaatgtatatagaataatatttatgtttacaatgtaacttttcaaaatttacaaatcaggattatatacataagaattccactaagaaatgccaagattcttaaatttgccagcgttaaagtagaaaataacatttcagaagagcacaatatgcataaaacatttttcaaaattgaaatattttcctgggcattaaaaacctttactattggctacaaatttattgtacctgatgaaaacatattttctggacttaaatgttattacaaatatcttaattttcagtaattgttttgcactttcaaagattgtaaatagttcattcaatcaatggtatggagttatttatttgctacataatagatactgtgccaaataattactttttatttattttatttagtacgtaattttgaagtacattttttcctgttttcacaattagactacatttaatgtgtaggaattgtatgtatgtatatcttctgtaaataacatctagtatcttcactaaatataattgtcg

SEQ ID NO: 169780 - DNA, 4299 bp, Artificial Sequence
  derived and/or modified sequence
gggcgggcctgtcgcagccgcgctggtcgccaggcgtccgggaggagcggggtccgcgcggcggacgaggcgggggcggaggcgcaggcagagcgagcgcgggaggtcgccgcagccagggacaccgcgcgccgccgctcaacatggtcgctgcgcacgctgcccattcttcctcctctgccgagtggatcgcctgcctggataaaagaccactggagcgatccagcgaagatgtggatataatcttcactcgactgaaagaagttaaagcttttgagaaatttcacccaaatctccttcatcagatttgcttatgtggttattatgagaatctggaaaagggaataacattatttcgccagggtgatattggaacaaactggtatgctgtcctggcagggtctttggatgttaaagtatctgagaccagcagtcaccaggatgctgtgaccatctgtaccctgggaattgggacggcctttggagagtccattctggacaacacaccccgccatgcaaccatcgttaccagggagagcagtgaactgctccgcatcgagcagaaggacttcaaggcactatgggagaaatatcgacagtatatggcaggacttctggctcctccttatggtgttatggaaacgggctctaacaatgacaggattcctgacaaggagaacacacctctcattgaacctcacgttcctcttcgtcctgctaacaccattaccaaggtcccttcagagaagatcctcagagctggaaaaattttacgaaatgccattctctctcgagcacctcacatgataagagatagaaaataccacctaaagacatacagacaatgctgtgtgggaactgaactggtggactggatgatgcagcagacaccatgtgttcactcccggactcaagctgttggcatgtggcaagtcctgttagaagatggtgttctcaaccacgtggaccaggagcaccatttccaagacaaatatttattctatcgatttctggatgatgagcacgaggatgcccctttgcctactgaggaggagaagaaggagtgtgatgaggagctccaggacaccatgctgctgctgtcacagatgggccccgacgcccacatgaggatgatccttcgcaaaccacctggccagaggactgtggatgacctagagattatctatgaggagcttcttcatattaaagccttatcccatctttctaccacagtgaaacgagagttagcaggtgttctcatttttgagtctcacgccaaaggagggactgtgttgtttaaccagggggaagaaggtacctcctggtacattattctaaaaggatcagtgaatgtagtcatttacggcaagggtgtggtctgcaccctgcatgaaggagatgacttcggcaagttagcactagtgaatgatgccccacgagctgcctctatcgtcttacgagaagataactgccatttcttaagagtagacaaggaggatttcaaccggatcctaagggacgtggaggcgaatacagtcagacttaaagaacatgaccaagatgtcttggtgctggagaaggtcccagcagggaacagagcttctaatcaaggaaactcacagcctcagcaaaagtatactgtgatgtcaggaacacctgaaaaaattttagagcattttctagaaacaatacgccttgaggcaactttaaatgaagcaacagattctgttttaaatgactttattatgatgcactgtgtttttatgccaaatacccagctttgcccggcactggtggcccactaccacgcacagccttcacaaggtacagaacaggagaaaatggattatgccctcaacaataagaggcgagtcatccgcctggttctacagtgggctgccatgtatggagacctcctgcaagaggatgacgtgtctatggccttcctggaggagttttatgtatctgtatcagatgatgcccggatgattgctgccctcaaggagcaactgccagagttggagaagattgtcaagcaaatctcagaagatgcaaaggcaccacaaaagaagcacaaggttcttttgcaacagttcaatacgggcgatgagagagcccagaagcgccagcctatccgcggctctgatgaagttctgtttaaggtctattgcatggaccacacctacacaaccattcgggtgccagtggccacttcggtgaaggaagtcatcagtgcagttgccgacaagctgggctccggggagggcctgatcatagtcaagatgagttccggaggagaaaaggtggtgctcaaacctaatgatgtttcagtatttacgacgctcaccattaatggacgcctgtttgcttgcccgcgagagcaattcgattcactgactcccttaccagaacaggaaggcccaactgttggaacagtgggaacttttgaactgatgagctccaaagatttagcataccagatgacaatttatgattgggaactcttcaactgcgtgcatgagctggagctaatctatcacacatttggaaggcataattttaaaaagaccacagcaaacttggatttgttcctgaggagatttaatgaaattcagttttgggtcgtcactgagatctgcctttgttctcagctcagcaagcgtgttcagctattaaaaaaatttattaagatagcagcccactgtaaggagtataaaaatctgaattccttttttgccatcgtcatgggactaagtaacgttgctgtgagccgcttggcactaacgtgggagaaactgccaagcaagttcaagaagttctatgcggagtttgaaagtttaatggacccttcaaggaaccacagggcctacaggctgacagtagctaagctggaacctcctctcatccccttcatgcctttgctcattaaagatatgacatttactcatgaggggaacaagacgttcattgacaatctagtaaactttgaaaaaatgcgcatgattgcaaatacggccagaacagtgagatactacaggagccaacccttcaatcctgatgcagctcaagctaataagaaccatcaggatgtccggagttatgtacggcaattaaatgtgattgacaaccagagaactttatcacagatgtcacacagattagagcctcgtcgaccatagacatttcaaatgcccaaagcaacagtttgtctccagtccacaatctttcaaaaatgccatttatgctactactgactgtattgccactagagaattctacaaaacaagcaaaaacacatcctgagacacctcagggctgcattcagcttaccagctacctagcaagagaaggaattatttgacatgcctaaagcttacacactctagcttaggaatccccagtttgtggctaccctgtttcatttccacttgtgccatcttctttgctgaagtgttgaataaggcccacgtgaagagtttggtagaaatagccttgtcaagagaactagcaagcccctgacatttttttctaagagtgtttatgggatgagatgtgctacaaatgggatagatttggataaaattttaactcaacatcttgatttggagcctggggtttcgggaaggtgttgaggaatctatagaagtccaaattataggttgtattcttccatcttcattgtcttacctctgaaggaatagaacctgaccacattattatgaaacattatggctgtttatgtaatttagggaggactggtctgtaatttctgaatgtatatagaataatatttatgtttacaatgtaacttttcaaaatttacaaatcaggattatatacataagaattccactaagaaatgccaagattcttaaatttgccagcgttaaagtagaaaataacatttcagaagagcacaatatgcataaaacatttttcaaaattgaaatattttcctgggcattaaaaacctttactattggctacaaatttattgtacctgatgaaaacatattttctggacttaaatgttattacaaatatcttaattttcagtaattgttttgcactttcaaagattgtaaatagttcattcaatcaatggtatggagttatttatttgctacataatagatactgtgccaaataattactttttatttattttatttagtacgtaattttgaagtacattttttcctgttttcacaattagactacatttaatgtgtaggaattgtatgtatgtatatcttctgtaaataacatctagtatcttcactaaatataattgtcgac

SEQ ID NO: 169781 - DNA, 3975 bp, Artificial Sequence
  derived and/or modified sequence
gcgcgccgccgctcaacatggtcgctgcgcacgctgcccattcttcctcctctgccgagtggatcgcctgcctggataaaagaccactggagcgatccagcgaagatgtggatataatcttcactcgactgaaagaagttaaagcttttgagaaatttcacccaaatctccttcatcagatttgcttatgtggttattatgagaatctggaaaagggaataacattatttcgccagggtgatattggaacaaactggtatgctgtcctggcagggtctttggatgttaaagtatctgagaccagcagtcaccaggatgctgtgaccatctgtaccctgggaattgggacggcctttggagagtccattctggacaacacaccccgccatgcaaccatcgttaccagggagagcagtgaactgctccgcatcgagcagaaggacttcaaggcactatgggagaaatatcgacagtatatggcaggacttctggctcctccttatggtgttatggaaacgggctctaacaatgacaggattcctgacaaggagaacacacctctcattgaacctcacgttcctcttcgtcctgctaacaccattaccaaggtcccttcagagaagatcctcagagctggaaaaattttacgaaatgccattctctctcgagcacctcacatgataagagatagaaaataccacctaaagacatacagacaatgctgtgtgggaactgaactggtggactggatgatgcagcagacaccatgtgttcactcccggactcaagctgttggcatgtggcaagtcctgttagaagatggtgttctcaaccacgtggaccaggagcaccatttccaagacaaatatttattctatcgatttctggatgatgagcacgaggatgcccctttgcctactgaggaggagaagaaggagtgtgatgaggagctccaggacaccatgctgctgctgtcacagatgggccccgacgcccacatgaggatgatccttcgcaaaccacctggccagaggactgtggatgacctagagattatctatgaggagcttcttcatattaaagccttatcccatctttctaccacagtgaaacgagagttagcaggtgttctcatttttgagtctcacgccaaaggagggactgtgttgtttaaccagggggaagaaggtacctcctggtacattattctaaaaggatcagtgaatgtagtcatttacggcaagggtgtggtctgcaccctgcatgaaggagatgacttcggcaagttagcactagtgaatgatgccccacgagctgcctctatcgtcttacgagaagataactgccatttcttaagagtagacaaggaggatttcaaccggatcctaagggacgtggaggcgaatacagtcagacttaaagaacatgaccaagatgtcttggtgctggagaaggtcccagcagggaacagagcttctaatcaaggaaactcacagcctcagcaaaagtatactgtgatgtcaggaacacctgaaaaaattttagagcattttctagaaacaatacgccttgaggcaactttaaatgaagcaacagattctgttttaaatgactttattatgatgcactgtgtttttatgccaaatacccagctttgcccggcactggtggcccactaccacgcacagccttcacaaggtacagaacaggagaaaatggattatgccctcaacaataagaggcgagtcatccgcctggttctacagtgggctgccatgtatggagacctcctgcaagaggatgacgtgtctatggccttcctggaggagttttatgtatctgtatcagatgatgcccggatgattgctgccctcaaggagcaactgccagagttggagaagattgtcaagcaaatctcagaagatgcaaaggcaccacaaaagaagcacaaggttcttttgcaacagttcaatacgggcgatgagagagcccagaagcgccagcctatccgcggctctgatgaagttctgtttaaggtctattgcatggaccacacctacacaaccattcgggtgccagtggccacttcggtgaaggaagtcatcagtgcagttgccgacaagctgggctccggggagggcctgatcatagtcaagatgagttccggaggagaaaaggtggtgctcaaacctaatgatgtttcagtatttacgacgctcaccattaatggacgcctgtttgcttgcccgcgagagcaattcgattcactgactcccttaccagaacaggaaggcccaactgttggaacagtgggaacttttgaactgatgagctccaaagatttagcataccagatgacaatttatgattgggaactcttcaactgcgtgcatgagctggagctaatctatcacacatttggaaggcataattttaaaaagaccacagcaaacttggatttgttcctgaggagatttaatgaaattcagttttgggtcgtcactgagatctgcctttgttctcagctcagcaagcgtgttcagctattaaaaaaatttattaagatagcagcccactgtaaggagtataaaaatctgaattccttttttgccatcgtcatgggactaagtaacgttgctgtgagccgcttggcactaacgtgggagcgcatgattgcaaatacggccagaacagtgagatactacaggagccaacccttcaatcctgatgcagctcaagctaataagaaccatcaggatgtccggagttatgtacggcaattaaatgtgattgacaaccagagaactttatcacagatgtcacacagattagagcctcgtcgaccatagacatttcaaatgcccaaagcaacagtttgtctccagtccacaatctttcaaaaatgccatttatgctactactgactgtattgccactagagaattctacaaaacaagcaaaaacacatcctgagacacctcagggctgcattcagcttaccagctacctagcaagagaaggaattatttgacatgcctaaagcttacacactctagcttaggaatccccagtttgtggctaccctgtttcatttccacttgtgccatcttctttgctgaagtgttgaataaggcccacgtgaagagtttggtagaaatagccttgtcaagagaactagcaagcccctgacatttttttctaagagtgtttatgggatgagatgtgctacaaatgggatagatttggataaaattttaactcaacatcttgatttggagcctggggtttcgggaaggtgttgaggaatctatagaagtccaaattataggttgtattcttccatcttcattgtcttacctctgaaggaatagaacctgaccacattattatgaaacattatggctgtttatgtaatttagggaggactggtctgtaatttctgaatgtatatagaataatatttatgtttacaatgtaacttttcaaaatttacaaatcaggattatatacataagaattccactaagaaatgccaagattcttaaatttgccagcgttaaagtagaaaataacatttcagaagagcacaatatgcataaaacatttttcaaaattgaaatattttcctgggcattaaaaacctttactattggctacaaatttattgtacctgatgaaaacatattttctggacttaaatgttattacaaatatcttaattttcagtaattgttttgcactttcaaagattgtaaatagttcattcaatcaatggtatggagttatttatttgctacataatagatactgtgccaaataattactttttatttattttatttagtacgtaattttgaagtacattttttcctgttttcacaattagactacatttaatgtgtaggaattgtatgtatgtatatcttctgtaaataacatctagtatcttcactaaatataattgtcgacaagaaa

SEQ ID NO: 169782 - DNA, 2961 bp, Artificial Sequence
  derived and/or modified sequence
agatagatattttgtaagattctagtcaatgtcagtatttaaactcctggaccatatgtggcttctcttagcagattttgcaaaggaaacttactccagtatgcaagactaaatatcgacagtatatggcaggacttctggctcctccttatggtgttatggaaacgggctctaacaatgacaggattcctgacaaggagaacacacctctcattgaacctcacgttcctcttcgtcctgctaacaccattaccaaggtcccttcagagaagatcctcagagctggaaaaattttacgaaatgccattctctctcgagcacctcacatgataagagatagaaaataccacctaaagacatacagacaatgctgtgtgggaactgaactggtggactggatgatgcagcagacaccatgtgttcactcccggactcaagctgttggcatgtggcaagtcctgttagaagatggtgttctcaaccacgtggaccaggagcaccatttccaagacaaatatttattctatcgatttctggatgatgagcacgaggatgcccctttgcctactgaggaggagaagaaggagtgtgatgaggagctccaggacaccatgctgctgctgtcacagatgggccccgacgcccacatgaggatgatccttcgcaaaccacctggccagaggactgtggatgacctagagattatctatgaggagcttcttcatattaaagccttatcccatctttctaccacagtgaaacgagagttagcaggtgttctcatttttgagtctcacgccaaaggagggactgtgttgtttaaccagggggaagaaggtacctcctggtacattattctaaaaggatcagtgaatgtagtcatttacggcaagggtgtggtctgcaccctgcatgaaggagatgacttcggcaagttagcactagtgaatgatgccccacgagctgcctctatcgtcttacgagaagataactgccatttcttaagagtagacaaggaggatttcaaccggatcctaagggacgtggaggcgaatacagtcagacttaaagaacatgaccaagatgtcttggtgctggagaaggtcccagcagggaacagagcttctaatcaaggaaactcacagcctcagcaaaagtatactgtgatgtcaggaacacctgaaaaaattttagagcattttctagaaacaatacgccttgaggcaactttaaatgaagcaacagattctgttttaaatgactttattatgatgcactgtgtttttatgccaaatacccagctttgcccggcactggtggcccactaccacgcacagccttcacaaggtacagaacaggagaaaatggattatgccctcaacaataagaggcgagtcatccgcctggttctacagtgggctgccatgtatggagacctcctgcaagaggatgacgtgtctatggccttcctggaggagttttatgtatctgtatcagatgatgcccggatgattgctgccctcaaggagcaactgccagagttggagaagattgtcaagcaaatctcagaagatgcaaaggcaccacaaaagaagcacaaggttcttttgcaacagttcaatacgggcgatgagagagcccagaagcgccagcctatccgcggctctgatgaagttctgtttaaggtctattgcatggaccacacctacacaaccattcgggtgccagtggccacttcggtgaaggaagtcatcagtgcagttgccgacaagctgggctccggggagggcctgatcatagtcaagatgagttccggaggagaaaaggtggtgctcaaacctaatgatgtttcagtatttacgacgctcaccattaatggacgcctgtttgcttgcccgcgagagcaattcgattcactgactcccttaccagaacaggaaggcccaactgttggaacagtgggaacttttgaactgatgagctccaaagatttagcataccagatgacaatttatgattgggaactcttcaactgcgtgcatgagctggagctaatctatcacacatttggaaggcataattttaaaaagaccacagcaaacttggatttgttcctgaggagatttaatgaaattcagttttgggtcgtcactgagatctgcctttgttctcagctcagcaagcgtgttcagctattaaaaaaatttattaagatagcagcccactgtaaggagtataaaaatctgaattccttttttgccatcgtcatgggactaagtaacgttgctgtgagccgcttggcactaacgtgggagaaactgccaagcaagttcaagaagttctatgcggagtttgaaagtttaatggacccttcaaggaaccacagggcctacaggctgacagtagctaagctggaacctcctctcatccccttcatgcctttgctcattaaagatatgacatttactcatgaggggaacaagacgttcattgacaatctagtaaactttgaaaaaatgcgcatgattgcaaatacggccagaacagtgagatactacaggagccaacccttcaatcctgatgcagctcaagctaataagaaccatcaggatgtccggagttatgtacggcaattaaatgtgattgacaaccagagaactttatcacagatgtcacacagattagagcctcgtcgaccatagacatttcaaatgcccaaagcaacagtttgtctccagtccacaatctttcaaaaatgccatttatgctactactgactgtattgccactagagaattctacaaaacaagcaaaaacacatcctgagacacctcagggctgcattcagcttaccagctacctagcaagagaaggaattatttgacatgcctaaagcttacacactctagcttaggaatccccagtttgtggctaccctgtttcatttccacttgtgccatc

SEQ ID NO: 169783 - DNA, 3229 bp, Artificial Sequence
  derived and/or modified sequence
aaagaaaggtaggatgcatacgcagaaacattagtgctaatatgctgcagaaaagccaagataaatcagtccagctctcatacatcactaagggagaagctgattgcaacttgaccatgttgcctgagtagtcccatcagtgagaagaggagaacatggatttaaaaaaaactagaatgtacccctagggctcctgccgtggtggacctgggagaagtgtctggtaaatatcgacagtatatggcaggacttctggctcctccttatggtgttatggaaacgggctctaacaatgacaggattcctgacaaggagaacacacctctcattgaacctcacgttcctcttcgtcctgctaacaccattaccaaggtcccttcagagaagatcctcagagctggaaaaattttacgaaatgccattctctctcgagcacctcacatgataagagatagaaaataccacctaaagacatacagacaatgctgtgtgggaactgaactggtggactggatgatgcagcagacaccatgtgttcactcccggactcaagctgttggcatgtggcaagtcctgttagaagatggtgttctcaaccacgtggaccaggagcaccatttccaagacaaatatttattctatcgatttctggatgatgagcacgaggatgcccctttgcctactgaggaggagaagaaggagtgtgatgaggagctccaggacaccatgctgctgctgtcacagatgggccccgacgcccacatgaggatgatccttcgcaaaccacctggccagaggactgtggatgacctagagattatctatgaggagcttcttcatattaaagccttatcccatctttctaccacagtgaaacgagagttagcaggtgttctcatttttgagtctcacgccaaaggagggactgtgttgtttaaccagggggaagaaggtacctcctggtacattattctaaaaggatcagtgaatgtagtcatttacggcaagggtgtggtctgcaccctgcatgaaggagatgacttcggcaagttagcactagtgaatgatgccccacgagctgcctctatcgtcttacgagaagataactgccatttcttaagagtagacaaggaggatttcaaccggatcctaagggacgtggaggcgaatacagtcagacttaaagaacatgaccaagatgtcttggtgctggagaaggtcccagcagggaacagagcttctaatcaaggaaactcacagcctcagcaaaagtatactgtgatgtcaggaacacctgaaaaaattttagagcattttctagaaacaatacgccttgaggcaactttaaatgaagcaacagattctgttttaaatgactttattatgatgcactgtgtttttatgccaaatacccagctttgcccggcactggtggcccactaccacgcacagccttcacaaggtacagaacaggagaaaatggattatgccctcaacaataagaggcgagtcatccgcctggttctacagtgggctgccatgtatggagacctcctgcaagaggatgacgtgtctatggccttcctggaggagttttatgtatctgtatcagatgatgcccggatgattgctgccctcaaggagcaactgccagagttggagaagattgtcaagcaaatctcagaagatgcaaaggcaccacaaaagaagcacaaggttcttttgcaacagttcaatacgggcgatgagagagcccagaagcgccagcctatccgcggctctgatgaagttctgtttaaggtctattgcatggaccacacctacacaaccattcgggtgccagtggccacttcggtgaaggaagtcatcagtgcagttgccgacaagctgggctccggggagggcctgatcatagtcaagatgagttccggaggagaaaaggtggtgctcaaacctaatgatgtttcagtatttacgacgctcaccattaatggacgcctgtttgcttgcccgcgagagcaattcgattcactgactcccttaccagaacaggaaggcccaactgttggaacagtgggaacttttgaactgatgagctccaaagatttagcataccagatgacaatttatgattgggaactcttcaactgcgtgcatgagctggagctaatctatcacacatttggaaggcataattttaaaaagaccacagcaaacttggatttgttcctgaggagatttaatgaaattcagttttgggtcgtcactgagatctgcctttgttctcagctcagcaagcgtgttcagctattaaaaaaatttattaagatagcagcccactgtaaggagtataaaaatctgaattccttttttgccatcgtcatgggactaagtaacgttgctgtgagccgcttggcactaacgtgggagaaactgccaagcaagttcaagaagttctatgcggagtttgaaagtttaatggacccttcaaggaaccacagggcctacaggctgacagtagctaagctggaacctcctctcatccccttcatgcctttgctcattaaagatatgacatttactcatgaggggaacaagacgttcattgacaatctagtaaactttgaaaaaatgcgcatgattgcaaatacggccagaacagtgagatactacaggagccaacccttcaatcctgatgcagctcaagctaataagaaccatcaggatgtccggagttatgtacggcaattaaatgtgattgacaaccagagaactttatcacagatgtcacacagattagagcctcgtcgaccatagacatttcaaatgcccaaagcaacagtttgtctccagtccacaatctttcaaaaatgccatttatgctactactgactgtattgccactagagaattctacaaaacaagcaaaaacacatcctgagacacctcagggctgcattcagcttaccagctacctagcaagagaaggaattatttgacatgcctaaagcttacacactctagcttaggaatccccagtttgtggctaccctgtttcatttccacttgtgccatcttctttgctgaagtgttgaataaggcccacgtgaagagtttggtagaaatagccttgtcaagagaactagcaagcccctgacatttttttctaagagtgtttatgggatgagatgtgctacaaatgggatagatttggataaaattttaactc

SEQ ID NO: 169784 - protein, 351 aa, Artificial Sequence
  derived and/or modified sequence
MQRALPGARQHLGAILASASVVVKALCAAVLFLYLLSFAVDTGCLAVTPGYLFPPNFWIWTLATHGLMEQHVWDVAISLTTVVVAGRLLEPLWGALELLIFFSVVNVSVGLLGAFAYLLTYMASFNLVYLFTVRIHGALGFLGGVLVALKQTMGDCVVLRVPQVRVSVMPMLLLALLLLLRLATLLQSPALASYGFGLLSSWVYLRFYQRHSRGRGDMADHFAFATFFPEILQPVVGLLANLVHSLLVKVKICQKTVKRYDVGAPSSITISLPGTDPQDAERRRQLALKALNERLKRVEDQSIWPSMDDDEEESGAKVDSPLPSDKAPTPPGKGAAPESSLITFEAAPPTL

SEQ ID NO: 169785 - DNA, 1056 bp, Artificial Sequence
  derived and/or modified sequence
atgcagagagccctgcccggcgccagacagcacctgggcgccatcctggccagcgccagcgtggtggtgaaggccctgtgcgccgccgtgctgttcctgtacctgctgagcttcgccgtggacaccggctgcctggccgtgacccccggctacctgttcccccccaacttctggatctggaccctggccacccacggcctgatggagcagcacgtgtgggacgtggccatcagcctgaccaccgtggtggtggccggcagactgctggagcccctgtggggcgccctggagctgctgatcttcttcagcgtggtgaacgtgagcgtgggcctgctgggcgccttcgcctacctgctgacctacatggccagcttcaacctggtgtacctgttcaccgtgagaatccacggcgccctgggcttcctgggcggcgtgctggtggccctgaagcagaccatgggcgactgcgtggtgctgagagtgccccaggtgagagtgagcgtgatgcccatgctgctgctggccctgctgctgctgctgagactggccaccctgctgcagagccccgccctggccagctacggcttcggcctgctgagcagctgggtgtacctgagattctaccagagacacagcagaggcagaggcgacatggccgaccacttcgccttcgccaccttcttccccgagatcctgcagcccgtggtgggcctgctggccaacctggtgcacagcctgctggtgaaggtgaagatctgccagaagaccgtgaagagatacgacgtgggcgcccccagcagcatcaccatcagcctgcccggcaccgacccccaggacgccgagagaagaagacagctggccctgaaggccctgaacgagagactgaagagagtggaggaccagagcatctggcccagcatggacgacgacgaggaggagagcggcgccaaggtggacagccccctgcccagcgacaaggcccccaccccccccggcaagggcgccgcccccgagagcagcctgatcaccttcgaggccgccccccccaccctgtag

SEQ ID NO: 169786 - DNA, 1056 bp, Artificial Sequence
  derived and/or modified sequence
atgcagagagctcttcctggagctagacagcacttgggtgcaattctggcatcagcaagtgtcgtggttaaggccctgtgcgccgctgtcctgttcttatacctgttatccttcgcagtggacacaggatgccttgcggtaacccccggttacttgttccctccgaatttctggatttggacacttgctactcatgggctcatggagcagcacgtttgggatgtcgccatctcacttactactgttgttgtagcaggcagacttctggaaccattatggggcgcattggagttgctgatcttcttctcggttgtgaatgtgagcgttggcttactaggcgcttttgcatacctgctcacttacatggcatcctttaatcttgtgtacctgttcacagttagaatccacggagccctagggttcctggggggagtcttggtagccctgaagcaaaccatgggagattgtgtggtgctgagggtaccacaggtaagggtgtccgtaatgcctatgctcctgcttgccctccttctgctgctaagactggctaccctgctgcaatctcctgcacttgcctcatatggctttggtttgctgagctcatgggtgtatctgcggttctaccaacgccattcacgcgggcgtggtgacatggccgaccattttgctttcgcgaccttcttccccgagatcctgcaaccagtggtcggcttactggccaatctggtccattcgttgttagtgaaagtgaagatatgccagaagaccgtaaaacgatacgacgtaggtgctccgtcctctattaccatatctcttcccggcaccgacccacaagacgcagagcggcggcggcagctcgctctcaaagctctgaacgaacgcctgaagagagtggaagatcagagcatttggccttcgatggacgacgacgaggaagaatctggtgcaaaagttgatagccccctaccatcagacaaggcgccaacccctccaggtaaaggcgccgcgcccgagtcgtccctgatcacctttgaagctgctccacctactctttag

SEQ ID NO: 169787 - DNA, 1056 bp, Artificial Sequence
  derived and/or modified sequence
atgcagagggccctgcccggggcccggcagcacctgggcgccatcctggccagcgcctctgtggtggtgaaggccctgtgtgccgctgtgctcttcctgtacctgctgagctttgctgtggacaccggctgcctggccgtgaccccaggctacctgttcccccccaacttctggatctggaccctggccacccacggcctgatggagcagcacgtgtgggatgtggccatcagcctgaccaccgtggtggtggccggccgcctgctggagcccctgtggggcgccctggagctgctgatcttcttctctgtggtgaatgtgtctgtgggcctgctgggcgcctttgcctacctgctgacctacatggccagcttcaacctggtgtacctgttcaccgtgcgcatccacggggccctgggcttcctgggcggcgtgctggtggccctgaagcagaccatgggagactgtgtggtgctgcgggtgccccaggtgcgggtgtctgtgatgcccatgctgctgctggccctgctgctgctgctgcggctggccaccctgctgcagagccctgccctggccagctatggcttcggcctgctgagctcctgggtgtacctgcgcttctaccagaggcacagccggggccgcggggacatggctgaccactttgcctttgccaccttcttccctgagatcctgcagcctgtggtgggcctgctggccaacctggtgcacagcctgctggtgaaggtgaagatctgccagaagacagtgaagagatatgatgtgggcgcccccagcagcatcaccatcagcctgcctggaacagacccccaggatgctgagcggcggcggcagctggccctgaaggccctgaatgaaaggctgaagagggtggaggaccagagcatctggcccagcatggatgatgatgaggaggagagcggggccaaggtggacagccccctgcccagcgacaaggcccccaccccacctggaaaaggagctgcccctgagagcagcctcatcacctttgaggccgccccacccaccctgtag

SEQ ID NO: 169788 - DNA, 1056 bp, Artificial Sequence
  derived and/or modified sequence
atgcagcgggccctgcccggcgcccggcagcacctgggcgccatcctagcttccgcctccgtcgtcgtcaaagcgctgtgtgctgctgtgctatttctttaccttctgtctttcgccgtggacaccgggtgtctcgccgttactcctggttacctgttcccccctaacttctggatctggaccctggccacccatggcctgatggaacagcacgtgtgggacgtagcaattagcttgaccaccgtggtagtggccggccgattactggaaccgctgtggggcgctctggaattgctcatcttcttctcagtagtaaacgtatcggtggggttgcttggagcctttgcctatctgttgacctacatggcctcttttaatcttgtatacctgttcactgtgcgcatacatggagcactgggctttttagggggcgtgctggttgcactgaagcagaccatgggcgactgcgtagttctgcgtgtcccccaagtgagagttagcgtaatgcccatgctgcttttggcattgttgctgctacttaggctggccactctgctccagagccctgccctggcttcttatgggtttggcttactaagttcatgggtatatttgagattctaccagagacactcccgcggacgcggggatatggctgaccattttgccttcgccactttctttccagagatactgcagcctgttgtgggattgctcgccaaccttgtgcactctctcctcgttaaggtgaaaatatgccagaaaactgttaaacgttacgacgtgggcgctccttccagcatcacaattagcctgccaggcaccgacccccaggatgccgagcgccggcgtcaacttgccttgaaggccttaaacgagcggctgaagagagttgaagaccaaagcatttggccaagcatggacgatgatgaggaagagagcggtgctaaagtcgactctcctctgccttcagacaaggctccaacccccccaggcaagggggctgccccagaaagttccttgatcacatttgaggctgctccccctactttgtag

SEQ ID NO: 169789 - DNA, 1056 bp, Artificial Sequence
  derived and/or modified sequence
atgcagcgtgccctccctggagcccgacagcacctcggcgctatcttagcctccgctagcgtggtcgtgaaagccctttgtgccgcagtgttgtttctttatcttctgtcattcgccgttgacacagggtgtttagccgtcacaccaggatatttgttcccaccaaacttctggatctggaccctggccacacatggactaatggagcagcacgtctgggatgtggcaatctccttaacaaccgttgtcgtcgctggacggctgctggaacccctttggggtgctctcgaactcctaatcttcttctccgtggtcaatgtttcagtgggccttctgggggctttcgcctatctgctgacgtacatggcctctttcaacctggtttacctgtttactgtcagaatccacggagctctgggcttcctgggtggcgtgctggtggctcttaagcagaccatgggagattgcgtggtgctcagagtaccccaagtcagagtgtccgtgatgcccatgctgctcctggcgctgctcttattgttaaggctggctaccctgttacagtctccagcgttggctagctatggctttggattgctctcatcctgggtttacctaagattctatcagaggcattctcgtggaaggggggacatggctgatcactttgcattcgcaaccttttttcctgaaattctgcagcctgtagtcgggctactggctaatctcgtgcattctcttcttgtgaaagtcaaaatatgccagaagacagttaagcgttatgatgtcggagcccctagtagcatcacgatctccctccccggaaccgatcctcaggatgcggaacggaggagacagctcgccctcaaagctcttaatgagcggcttaagagagtggaggatcagtccatctggccaagtatggacgacgacgaagaggagagtggggcaaaagtcgactctccattgccgtccgataaagctcctactccccctgggaagggagcagccccagaatcctctttaatcaccttcgaagctgccccacctaccctctag

SEQ ID NO: 169790 - DNA, 2197 bp, Artificial Sequence
  derived and/or modified sequence
ccaaggactccgtatcccagcatgcagaggagccggaagacaggcgcttagaggacagcccgctgccgccggggacgcgcaggcgcagcacccctgtttgtcggccccccgagagaagaggtacggtcgaagccaggagccaggccgagcgggagctgaccaggcttgactcgggtacagaacgaggcaccagtccccttgcgaaccgaagggcctcgcagtggatggaggaggcccagccctgaggtcaacgccaaccaggctagcctggcacggggcctacagggtgggtaggcgggcgtgccgcagccgtccagggccttccctcaggtcccgggcgaggggcctacgctgcggcccggcaacaaggcccgactcggcccctcgggaccagagccccacccgatcggaagcggatcctttaccagggccataggccagtgactaggccgggcctgggcctcccatcggggccggactaggacgaggccccggggaggcccctggcctaccagacccttttctcaggccgacagccgccaggaagatgcaacgtgccctgccaggcgcccgccagcacttgggggccattctggccagcgccagcgtggtggtgaaggctctgtgtgcggcggtactattcctctacctgctctccttcgccgtggacacaggctgcctggcggtcaccccgggctacctctttcctcccaacttctggatctggaccctggccacccatgggctgatggagcagcatgtgtgggacgtggccatcagcctgacaacggtggtggtggccgggcgtttgctggagcccctctggggggccttggagctgctcatcttcttctcagtggtgaatgtgtctgtagggctgctgggggccttcgcctacctcctcacctacatggcttccttcaacctggtctacctgttcactgtccgtatccacggcgccttgggcttcctaggtggcgtcctggtggcactcaagcaaaccatgggggactgtgtggtcctgcgagtgccccaggtgcgcgtcagtgtgatgcccatgctgctgctggcgctgctgctcctgctgcggctcgccacgctgctccagagcccggcgctggcttcctatggcttcgggctgctctccagttgggtatatcttcgcttctaccagcgccatagccggggccgaggggacatggctgaccactttgctttcgccactttcttccctgagatcctgcagcctgtggtgggtttgctggcgaacttggtgcacagcctcctggtgaaggtaaagatatgccagaagacggtgaagcgctacgatgtgggtgccccatcctccatcaccatcagcctgccaggcacagaccctcaagacgccgagcggagaaggcaactggccctgaaggcactcaatgagcggctgaagagagtggaagaccagtccatctggcccagcatggatgatgatgaagaggagtctggggccaaggtggacagccccctgccctcagacaaagctcccacacccccagggaagggggctgccccagaatccagtctaatcaccttcgaggcagctcccccgacgctgtaactccagaccaccttgagtgtggcacctcccctcccaagccccccttgacatcctctcagctactccagggcacctgactgctctgaggagagggaagaaggcctgctggggctttccatggccttctgctgtttctcgccaacactacccaggactcttgctacctggttccaactccagacaaccactatgccaggcccggagcctctgaggcatcggccagtccaggccctcatctgaggtaagaatgtacatcagctggcagccccaagcaagtggctgcagggacactgatgccacagctcctgggccggccctcacatctgaaactggttgccgagagccctgagccaaggcaaggatttgccaaaaatgttctgggggcccagcaaatgcaggagccgacctggggctgcacatccctgcccatccccagaaagactgttcctgtcaggatttgtttccctctgctgtggcggtgactgcttctggaccagaacagctccagctcccaggtattttctacaggaccacttgagtgggcagccaagcccaggctcgcagtatcaataaagcagttctctgaggaatgac

SEQ ID NO: 169791 - protein, 198 aa, Artificial Sequence
  derived and/or modified sequence
MSSRGHSTLPRTLMAPRMISEGDIGGIAQITSSLFLGRGSVASNRHLLQARGITCIVNATIEIPNFNWPQFEYVKVPLADMPHAPIGLYFDTVADKIHSVSRKHGATLVHCAAGVSRSATLCIAYLMKFHNVCLLEAYNWVKARRPVIRPNVGFWRQLIDYERQLFGKSTVKMVQTPYGIVPDVYEKESRHLMPYWGI

SEQ ID NO: 169792 - DNA, 597 bp, Artificial Sequence
  derived and/or modified sequence
atgtcctctaggggccattcgacactgccacgaactcttatggcccccaggatgattagcgagggggacattggcggcatagcccaaatcactagtagcctgttcctcgggagaggctccgttgctagcaaccgacacctcctgcaggccagaggaattacctgtatagtgaatgccacgattgaaattcccaactttaactggccgcagttcgagtacgtgaaggtgccgcttgctgatatgcctcacgcacctatcggtctgtacttcgacaccgtggccgacaagattcactccgtctcacgcaagcatggagcaacactggtgcattgcgccgccggggtgtcccgcagtgccactctctgtatcgcatacctgatgaaattccataatgtatgtctgttagaagcctataattgggttaaagcccggcggccagtcatacggcccaacgtcggattctggagacagctcatcgactatgagcggcagctgttcggaaagagcactgtcaaaatggtgcagactccatacgggattgtccctgacgtgtacgaaaaagagtcgcgccacctaatgccctattggggtatttag

SEQ ID NO: 169793 - DNA, 597 bp, Artificial Sequence
  derived and/or modified sequence
atgtcatctaggggtcactccacactgccaagaaccctaatggccccacgaatgatctcggaaggcgatatcggaggcattgcgcagatcacatcatccttgtttcttggccgcggtagcgtggcttccaaccgacatctcctgcaggcgaggggaatcacttgcatcgtgaacgcgaccatcgagatccccaattttaattggcctcagttcgaatacgtaaaggtgcctttggccgatatgccgcatgcgcccatcggtctgtactttgacaccgtggccgataaaattcacagcgtttccagaaaacatggagccactctcgtgcattgtgctgccggcgtgtctagatccgccactctgtgcattgcatatctaatgaagtttcacaatgtctgcctgctcgaggcgtacaattgggtcaaggccaggaggcctgtgattcggcccaacgtgggtttctggaggcagctaatcgactacgagcgacagctcttcggcaagagcacagtgaagatggtccagacaccctatggaattgtgccagatgtatacgaaaaggagtctagacacctgatgccttattggggtatctag

SEQ ID NO: 169794 - DNA, 597 bp, Artificial Sequence
  derived and/or modified sequence
atgagcagccggggccacagcaccctgcccaggaccctgatggcccccaggatgatcagcgagggggacatcggcggcatcgcccagatcaccagcagcctcttcctgggccggggctctgtggccagcaacagacacctgctgcaggcccggggcatcacctgcatcgtgaatgccaccatcgagatccccaacttcaactggccccagtttgaatatgtgaaggtgcccctggccgacatgcctcatgcccccatcggcctgtactttgacacagtggccgacaagatccacagcgtgtccaggaagcacggggccaccctggtgcactgtgccgccggcgtgagccgcagcgccaccctgtgcatcgcctacctgatgaagttccacaacgtgtgcctgctggaggcctacaactgggtgaaggcccggcggcctgtgatccggcccaacgtgggcttctggaggcagctgattgattatgagcggcagctgtttgggaagagcacagtgaagatggtgcagaccccctacggcatcgtgcctgatgtgtatgagaaggagagccgccacctgatgccctactggggcatctag

SEQ ID NO: 169795 - DNA, 597 bp, Artificial Sequence
  derived and/or modified sequence
atgagcagccggggccacagcaccctgccccggaccctgatggcccccagaatgattagcgaaggagatattggtggcattgcgcagatcacgtccagcctgttccttgggaggggatctgtagcatccaatcgacacctccttcaggcccgaggcatcacgtgcattgttaacgctacaattgagatccccaattttaactggccacagtttgagtacgtgaaggtgccattggccgatatgcctcatgctcccattggactgtacttcgatacagttgctgataagatccactctgtcagtcgcaagcatggagccaccttagtacattgtgcggccggagtcagccggtccgccacactctgtatagcatatctaatgaaattccataatgtttgcctgctggaagcttacaactgggttaaagctcgccgccctgtgattaggcctaacgtcgggttttggcggcagctgatcgattacgaacgccaattgttcggcaaatctactgtcaaaatggttcagaccccgtacggcattgtcccggacgtgtacgagaaggaatcaagacacctgatgccatattggggaatttag

SEQ ID NO: 169796 - DNA, 597 bp, Artificial Sequence
  derived and/or modified sequence
atgagcagccggggccacagcaccctgccccggaccctgatggccccacgaatgataagcgaaggcgatataggaggaatagctcagattactagctctctgtttctgggtcgggggtccgtcgcatctaatagacacctgctgcaagctcgcggaataacctgtattgttaacgccaccatagaaatcccgaacttcaattggccgcaatttgagtacgttaaggtgcccctggcggacatgccccacgctcctatcgggctttacttcgacacagtcgccgataagatccacagcgtcagccgcaagcatggggctactcttgtgcactgcgctgccggagtctcccggtctgctactttatgcattgcttacttaatgaaatttcataatgtatgtttactggaggcctacaactgggtgaaggctcgtcgcccagtcattaggcctaatgttggcttctggcggcagttaattgactatgagaggcaattatttggtaagtccacagtcaagatggtgcagacaccatacggtattgtgccagatgtctatgaaaaggagagcagacacctcatgccctattggggaatctag

SEQ ID NO: 169797 - DNA, 597 bp, Artificial Sequence
  derived and/or modified sequence
atgtcatctcggggtcacagcacattgcccagaacactgatggcccctcgaatgatctcagagggagacatcggagggatcgctcagatcacctcctccctgtttctgggacggggtagcgtagcatctaatcgccatctgctgcaggccaggggaatcacttgcattgtcaatgccactatcgagattcctaatttcaattggcctcagtttgaatacgtgaaagtcccactggcggacatgccacacgcgcctatcggcttgtattttgatacggtggcagataaaattcactctgtgtctaggaagcacggcgctactcttgttcactgtgccgcaggagtgtccagatccgccacactttgcattgcttacctgatgaaatttcataacgtgtgtttactcgaagcatacaactgggtcaaggccagacgtcccgtcatccgtcctaacgtgggtttctggagacagctgatcgactacgagcgccagctcttcggcaaatctacagtcaagatggtgcagacaccgtacggaatagtgcccgatgtctatgaaaaagagtcacggcacctgatgccatattggggcatctag

SEQ ID NO: 169798 - DNA, 597 bp, Artificial Sequence
  derived and/or modified sequence
atgtcttctcggggtcactccactctccctcgcacactcatggccccacggatgatctctgagggcgatataggcggaattgctcaaattacgagcagtctgtttcttggacgcggatctgtggcctcaaatagacatctcctgcaggcccgtgggatcacctgtattgtgaatgcaactatagaaatccctaatttcaactggccgcagtttgaatacgtgaaggtgccactggccgatatgccccacgcccctattgggctatacttcgatactgtggctgacaaaatccacagcgtgagcagaaagcatggcgcaaccctagtgcactgcgctgctggagtgtcgcggagcgccactctgtgtattgcgtatctcatgaaatttcacaacgtctgcctgctggaagcttacaactgggtgaaagccagacggccagttattaggccaaatgtggggttttggcggcagctaattgactacgagcggcaattatttggtaaatcaactgtaaaaatggtgcagactccgtacgggattgtgccagacgtctacgagaaggaaagcaggcacttaatgccctattggggtatctag

SEQ ID NO: 169799 - DNA, 597 bp, Artificial Sequence
  derived and/or modified sequence
atgagcagcagaggccacagcaccctgcccagaaccctgatggcccccagaatgatcagcgagggcgacatcggcggcatcgcccagatcaccagcagcctgttcctgggcagaggcagcgtggccagcaacagacacctgctgcaggccagaggcatcacctgcatcgtgaacgccaccatcgagatccccaacttcaactggccccagttcgagtacgtgaaggtgcccctggccgacatgccccacgcccccatcggcctgtacttcgacaccgtggccgacaagatccacagcgtgagcagaaagcacggcgccaccctggtgcactgcgccgccggcgtgagcagaagcgccaccctgtgcatcgcctacctgatgaagttccacaacgtgtgcctgctggaggcctacaactgggtgaaggccagaagacccgtgatcagacccaacgtgggcttctggagacagctgatcgactacgagagacagctgttcggcaagagcaccgtgaagatggtgcagaccccctacggcatcgtgcccgacgtgtacgagaaggagagcagacacctgatgccctactggggcatctag

SEQ ID NO: 169800 - DNA, 1559 bp, Artificial Sequence
  derived and/or modified sequence
ctcatcttctgacgcttgggggaggagaggtagttgcttggtatttttggctttccaccataaaactggagacagtttccttcattccaagtcgttttaatgtcactgttgaacgtgtgtgtcctgagttctcatctgaaagctttcatatcggttgactgcagatttgatttgtatccactgtcaccagcactgctcacttaggactttctggatccggacccaggcagcgcacactggactcttgaggaagaaggagactctaattttggattccttggtggaggaaaataaaacactctggtcttgccgccaacgatgcaagtgtgactgctggcgtcttcatgagctccagaggtcacagcacgctaccaaggactctcatggcccctcggatgatttccgagggagacataggaggcattgctcaaatcacctcctctctattcctgggcagaggcagtgtggcctccaatcggcacctcctccaggctcgtggcatcacctgcattgttaatgctaccattgagatccctaatttcaactggccccaatttgagtatgttaaagtgcctctggctgacatgccgcatgcccccattggactgtactttgacaccgtggctgacaagatccacagtgtgagcaggaagcacggggccaccttggtgcactgtgctgcaggggtgagccgctcagccacgctgtgtatcgcgtacctgatgaaattccacaacgtgtgcctgctggaggcgtacaactgggtgaaagcccggcgacctgtcatcaggcccaacgtaggcttctggaggcaactgatagactacgagcgccagctctttgggaagtcgacagttaaaatggtacagacaccttatggcatagttcccgacgtctatgagaaggagtcccgacacctgatgccttactgggggatttagtgccactgaagcctgcgtcagcagcccgagcggggccggcatctgctccccgccgtctgctccctctccactctcttctcaaatggctgacttctggttctccctcaagtgttttttacactgggtgttcaaatttattttaagagatagggagggaggggacataaagggaatgcatacattgctagtcacatttttaaaattaacattttggaatagtgtttatggaaatctttagcttttaatcatttttaccaatttgaacagtttaataaactggttctgctctcttctgaatctcatgcctttggcaccttggtaggtgcaggaggagctcagtgcaaaaatcactttggggcctcattaaccctttagagacaagctttgccccaggctgcggaccagacagatgcttagggaaggttgataaccagcttcagtctctactggattagccctactctttcctttcccctccattatttagtgactctgtaagtaagttaaatacacccttattatttagctgttaagtaactataatgaaatctgctgcaaaatctctcttggaatccatgtgcccaggattatattagcattatttttaataaatctata

SEQ ID NO: 169801 - DNA, 1537 bp, Artificial Sequence
  derived and/or modified sequence
cgcggcccgccccgggcgcgggcggagggaggaggaggcggcgcgcgcggcgcccagcccgcagaagccggtggccgcgcaggaggacggagccctaaccgcaacccgcgccgcgccgcgccgcgccgatttgatttgtatccactgtcaccagcactgctcacttaggactttctggatccggacccaggcagcgcacactggactcttgaggaagaaggagactctaattttggattccttggtggaggaaaataaaacactctggtcttgccgccaacgatgcaagtgtgactgctggcgtcttcatgagctccagaggtcacagcacgctaccaaggactctcatggcccctcggatgatttccgagggagacataggaggcattgctcaaatcacctcctctctattcctgggcagaggcagtgtggcctccaatcggcacctcctccaggctcgtggcatcacctgcattgttaatgctaccattgagatccctaatttcaactggccccaatttgagtatgttaaagtgcctctggctgacatgccgcatgcccccattggactgtactttgacaccgtggctgacaagatccacagtgtgagcaggaagcacggggccaccttggtgcactgtgctgcaggggtgagccgctcagccacgctgtgtatcgcgtacctgatgaaattccacaacgtgtgcctgctggaggcgtacaactgggtgaaagcccggcgacctgtcatcaggcccaacgtaggcttctggaggcaactgatagactacgagcgccagctctttgggaagtcgacagttaaaatggtacagacaccttatggcatagttcccgacgtctatgagaaggagtcccgacacctgatgccttactgggggatttagtgccactgaagcctgcgtcagcagcccgagcggggccggcatctgctccccgccgtctgctccctctccactctcttctcaaatggctgacttctggttctccctcaagtgttttttacactgggtgttcaaatttattttaagagatagggagggaggggacataaagggaatgcatacattgctagtcacatttttaaaattaacattttggaatagtgtttatggaaatctttagcttttaatcatttttaccaatttgaacagtttaataaactggttctgctctcttctgaatctcatgcctttggcaccttggtaggtgcaggaggagctcagtgcaaaaatcactttggggcctcattaaccctttagagacaagctttgccccaggctgcggaccagacagatgcttagggaaggttgataaccagcttcagtctctactggattagccctactctttcctttcccctccattatttagtgactctgtaagtaagttaaatacacccttattatttagctgttaagtaactataatgaaatctgctgcaaaatctctcttggaatccatgtgcccaggattatattagcattatttttaataaatctatatgcttaacatatta

SEQ ID NO: 169802 - protein, 1522 aa, Artificial Sequence
  derived and/or modified sequence
MSRNDKEPFFVKFLKSSDNSKCFFKALESIKEFQSEEYLQIITEEEALKIKENDRSLYICDPFSGVVFDHLKKLGCRIVGPQVVIFCMHHQRCVPRAEHPVYNMVMSDVTISCTSLEKEKREEVHKYVQMMGGRVYRDLNVSVTHLIAGEVGSKKYLVAANLKKPILLPSWIKTLWEKSQEKKITRYTDINMEDFKCPIFLGCIICVTGLCGLDRKEVQQLTVKHGGQYMGQLKMNECTHLIVQEPKGQKYECAKRWNVHCVTTQWFFDSIEKGFCQDESIYKTEPRPEAKTMPNSSTPTSQINTIDSRTLSDVSNISNINASCVSESICNSLNSKLEPTLENLENLDVSAFQAPEDLLDGCRIYLCGFSGRKLDKLRRLINSGGGVRFNQLNEDVTHVIVGDYDDELKQFWNKSAHRPHVVGAKWLLECFSKGYMLSEEPYIHANYQPVEIPVSHKPESKAALLKKKNSSFSKKDFAPSEKHEQADEDLLSQYENGSSTVVEAKTSEARPFNDSTHAEPLNDSTHISLQEENQSSVSHCVPDVSTITEEGLFSQKSFLVLGFSNENESNIANIIKENAGKIMSLLSRTVADYAVVPLLGCEVEATVGEVVTNTWLVTCIDYQTLFDPKSNPLFTPVPVMTGMTPLEDCVISFSQCAGAEKESLTFLANLLGASVQEYFVRKSNAKKGMFASTHLILKERGGSKYEAAKKWNLPAVTIAWLLETARTGKRADESHFLIENSTKEERSLETEITNGINLNSDTAEHPGTRLQTHRKTVVTPLDMNRFQSKAFRAVVSQHARQVAASPAVGQPLQKEPSLHLDTPSKFLSKDKLFKPSFDVKDALAALETPGRPSQQKRKPSTPLSEVIVKNLQLALANSSRNAVALSASPQLKEAQSEKEEAPKPLHKVVVCVSKKLSKKQSELNGIAASLGADYRWSFDETVTHFIYQGRPNDTNREYKSVKERGVHIVSEHWLLDCAQECKHLPESLYPHTYNPKMSLDISAVQDGRLCNSRLLSAVSSTKDDEPDPLILEENDVDNMATNNKESAPSNGSGKNDSKGVLTQTLEMRENFQKQLQEIMSATSIVKPQGQRTSLSRSGCNSASSTPDSTRSARSGRSRVLEALRQSRQTVPDVNTEPSQNEQIIWDDPTAREERARLASNLQWPSCPTQYSELQVDIQNLEDSPFQKPLHDSEIAKQAVCDPGNIRVTEAPKHPISEELETPIKDSHLIPTPQAPSIAFPLANPPVAPHPREKIITIEETHEELKKQYIFQLSSLNPQERIDYCHLIEKLGGLVIEKQCFDPTCTHIVVGHPLRNEKYLASVAAGKWVLHRSYLEACRTAGHFVQEEDYEWGSSSILDVLTGINVQQRRLALAAMRWRKKIQQRQESGIVEGAFSGWKVILHVDQSREAGFKRLLQSGGAKVLPGHSVPLFKEATHLFSDLNKLKPDDSGVNIAEAAAQNVYCLRTEYIADYLMQESPPHVENYCLPEAISFIQNNKELGTGLSQKRKAPTEKNKIKRPRVH

SEQ ID NO: 169803 - DNA, 4569 bp, Artificial Sequence
  derived and/or modified sequence
atgagcagaaacgacaaggagcccttcttcgtgaagttcctgaagagcagcgacaacagcaagtgcttcttcaaggccctggagagcatcaaggagttccagagcgaggagtacctgcagatcatcaccgaggaggaggccctgaagatcaaggagaacgacagaagcctgtacatctgcgaccccttcagcggcgtggtgttcgaccacctgaagaagctgggctgcagaatcgtgggcccccaggtggtgatcttctgcatgcaccaccagagatgcgtgcccagagccgagcaccccgtgtacaacatggtgatgagcgacgtgaccatcagctgcaccagcctggagaaggagaagagagaggaggtgcacaagtacgtgcagatgatgggcggcagagtgtacagagacctgaacgtgagcgtgacccacctgatcgccggcgaggtgggcagcaagaagtacctggtggccgccaacctgaagaagcccatcctgctgcccagctggatcaagaccctgtgggagaagagccaggagaagaagatcaccagatacaccgacatcaacatggaggacttcaagtgccccatcttcctgggctgcatcatctgcgtgaccggcctgtgcggcctggacagaaaggaggtgcagcagctgaccgtgaagcacggcggccagtacatgggccagctgaagatgaacgagtgcacccacctgatcgtgcaggagcccaagggccagaagtacgagtgcgccaagagatggaacgtgcactgcgtgaccacccagtggttcttcgacagcatcgagaagggcttctgccaggacgagagcatctacaagaccgagcccagacccgaggccaagaccatgcccaacagcagcacccccaccagccagatcaacaccatcgacagcagaaccctgagcgacgtgagcaacatcagcaacatcaacgccagctgcgtgagcgagagcatctgcaacagcctgaacagcaagctggagcccaccctggagaacctggagaacctggacgtgagcgccttccaggcccccgaggacctgctggacggctgcagaatctacctgtgcggcttcagcggcagaaagctggacaagctgagaagactgatcaacagcggcggcggcgtgagattcaaccagctgaacgaggacgtgacccacgtgatcgtgggcgactacgacgacgagctgaagcagttctggaacaagagcgcccacagaccccacgtggtgggcgccaagtggctgctggagtgcttcagcaagggctacatgctgagcgaggagccctacatccacgccaactaccagcccgtggagatccccgtgagccacaagcccgagagcaaggccgccctgctgaagaagaagaacagcagcttcagcaagaaggacttcgcccccagcgagaagcacgagcaggccgacgaggacctgctgagccagtacgagaacggcagcagcaccgtggtggaggccaagaccagcgaggccagacccttcaacgacagcacccacgccgagcccctgaacgacagcacccacatcagcctgcaggaggagaaccagagcagcgtgagccactgcgtgcccgacgtgagcaccatcaccgaggagggcctgttcagccagaagagcttcctggtgctgggcttcagcaacgagaacgagagcaacatcgccaacatcatcaaggagaacgccggcaagatcatgagcctgctgagcagaaccgtggccgactacgccgtggtgcccctgctgggctgcgaggtggaggccaccgtgggcgaggtggtgaccaacacctggctggtgacctgcatcgactaccagaccctgttcgaccccaagagcaaccccctgttcacccccgtgcccgtgatgaccggcatgacccccctggaggactgcgtgatcagcttcagccagtgcgccggcgccgagaaggagagcctgaccttcctggccaacctgctgggcgccagcgtgcaggagtacttcgtgagaaagagcaacgccaagaagggcatgttcgccagcacccacctgatcctgaaggagagaggcggcagcaagtacgaggccgccaagaagtggaacctgcccgccgtgaccatcgcctggctgctggagaccgccagaaccggcaagagagccgacgagagccacttcctgatcgagaacagcaccaaggaggagagaagcctggagaccgagatcaccaacggcatcaacctgaacagcgacaccgccgagcaccccggcaccagactgcagacccacagaaagaccgtggtgacccccctggacatgaacagattccagagcaaggccttcagagccgtggtgagccagcacgccagacaggtggccgccagccccgccgtgggccagcccctgcagaaggagcccagcctgcacctggacacccccagcaagttcctgagcaaggacaagctgttcaagcccagcttcgacgtgaaggacgccctggccgccctggagacccccggcagacccagccagcagaagagaaagcccagcacccccctgagcgaggtgatcgtgaagaacctgcagctggccctggccaacagcagcagaaacgccgtggccctgagcgccagcccccagctgaaggaggcccagagcgagaaggaggaggcccccaagcccctgcacaaggtggtggtgtgcgtgagcaagaagctgagcaagaagcagagcgagctgaacggcatcgccgccagcctgggcgccgactacagatggagcttcgacgagaccgtgacccacttcatctaccagggcagacccaacgacaccaacagagagtacaagagcgtgaaggagagaggcgtgcacatcgtgagcgagcactggctgctggactgcgcccaggagtgcaagcacctgcccgagagcctgtacccccacacctacaaccccaagatgagcctggacatcagcgccgtgcaggacggcagactgtgcaacagcagactgctgagcgccgtgagcagcaccaaggacgacgagcccgaccccctgatcctggaggagaacgacgtggacaacatggccaccaacaacaaggagagcgcccccagcaacggcagcggcaagaacgacagcaagggcgtgctgacccagaccctggagatgagagagaacttccagaagcagctgcaggagatcatgagcgccaccagcatcgtgaagccccagggccagagaaccagcctgagcagaagcggctgcaacagcgccagcagcacccccgacagcaccagaagcgccagaagcggcagaagcagagtgctggaggccctgagacagagcagacagaccgtgcccgacgtgaacaccgagcccagccagaacgagcagatcatctgggacgaccccaccgccagagaggagagagccagactggccagcaacctgcagtggcccagctgccccacccagtacagcgagctgcaggtggacatccagaacctggaggacagccccttccagaagcccctgcacgacagcgagatcgccaagcaggccgtgtgcgaccccggcaacatcagagtgaccgaggcccccaagcaccccatcagcgaggagctggagacccccatcaaggacagccacctgatccccaccccccaggcccccagcatcgccttccccctggccaacccccccgtggccccccaccccagagagaagatcatcaccatcgaggagacccacgaggagctgaagaagcagtacatcttccagctgagcagcctgaacccccaggagagaatcgactactgccacctgatcgagaagctgggcggcctggtgatcgagaagcagtgcttcgaccccacctgcacccacatcgtggtgggccaccccctgagaaacgagaagtacctggccagcgtggccgccggcaagtgggtgctgcacagaagctacctggaggcctgcagaaccgccggccacttcgtgcaggaggaggactacgagtggggcagcagcagcatcctggacgtgctgaccggcatcaacgtgcagcagagaagactggccctggccgccatgagatggagaaagaagatccagcagagacaggagagcggcatcgtggagggcgccttcagcggctggaaggtgatcctgcacgtggaccagagcagagaggccggcttcaagagactgctgcagagcggcggcgccaaggtgctgcccggccacagcgtgcccctgttcaaggaggccacccacctgttcagcgacctgaacaagctgaagcccgacgacagcggcgtgaacatcgccgaggccgccgcccagaacgtgtactgcctgagaaccgagtacatcgccgactacctgatgcaggagagccccccccacgtggagaactactgcctgcccgaggccatcagcttcatccagaacaacaaggagctgggcaccggcctgagccagaagagaaaggcccccaccgagaagaacaagatcaagagacccagagtgcactag

SEQ ID NO: 169804 - DNA, 4569 bp, Artificial Sequence
  derived and/or modified sequence
atgtctcgtaacgataaggaaccattcttcgtgaagttcctcaagagctcggataactccaagtgttttttcaaggcgctggagagcataaaagaatttcagagcgaggaatatcttcagattataaccgaggaagaagcgctcaaaattaaagaaaacgacaggagtctgtacatttgcgacccattcagcggggtcgtttttgaccacctgaaaaaactgggttgtcgaatcgtcggccctcaggtagtcatcttttgtatgcaccaccagaggtgcgtgccaagagctgagcacccggtctataatatggttatgtctgacgtgacgatcagttgcacatcccttgagaaagaaaaacgggaggaagttcataaatatgtccagatgatgggtggccgggtgtacagggatctaaacgtttcagtcacacacctgatcgccggtgaggtcggaagtaaaaaatatctggtcgcggcaaacctgaaaaaaccgattctcctacccagttggatcaaaactctttgggagaagtcacaggagaagaagatcacgagatacactgacataaatatggaagattttaagtgccctatcttcctcggctgtatcatctgtgtgactggcctatgtggcttagataggaaagaggtccagcagttaaccgtcaaacacggcgggcagtacatgggtcaactcaagatgaacgagtgcacccatttgattgtccaagaaccaaagggccagaaatatgaatgtgccaaaaggtggaatgttcactgcgtcaccacccagtggttctttgactctatcgaaaaaggattttgccaggatgagagtatctacaagacggagccccgaccagaagctaagacaatgcccaactcgagtacccccacttcccaaattaataccatcgacagcaggactctgtccgacgtgagcaacatttccaatatcaatgcttcctgtgtttccgagtcgatctgcaactctttgaattcaaagctagaaccgacactggaaaatctggaaaacctggacgtgagcgcctttcaagcccctgaagaccttcttgacgggtgccggatctacttgtgtggattcagcggacgcaagttagacaagttgcggcgcctgatcaattctggtggcggcgtgagatttaaccagctgaacgaagatgttacccatgtaattgtaggggactacgatgatgaactcaaacagttttggaacaagtctgcacaccgaccacatgtggtcggcgctaagtggctcctcgagtgctttagcaaaggctacatgcttagtgaagagccatatattcacgccaattatcagcctgtagaaataccagtgtcacataagcctgaaagcaaagcagcccttcttaagaagaagaatagtagctttagcaaaaaggatttcgccccctccgaaaaacacgaacaggctgatgaggacctcttaagtcagtacgaaaatgggtcttcaacagtcgttgaggcgaagacttctgaagctcggcccttcaatgactctactcacgcagagccattaaatgacagtactcatatctctttacaagaggagaaccaaagttcggtgagccactgcgtgccagacgtctctactattaccgaagagggccttttcagtcaaaagagcttccttgttctgggtttttcgaacgaaaatgagagtaatatcgccaacattatcaaggagaatgccggtaaaattatgagtctgctctccagaacagtcgcggattacgcagtggttccactacttgggtgcgaggtggaggccacggtgggtgaggtagtaacaaatacctggctcgtaacctgtatcgactatcagactctctttgacccaaagtcgaatccgctgtttactcctgtacccgtgatgacggggatgactcctctagaggactgtgtgatctctttttcccagtgcgccggtgctgagaaagagtcgctcacctttctggcaaatttactgggcgcatccgtgcaggagtatttcgttaggaaatccaacgctaagaaaggaatgttcgcatcgacccacctgatcctgaaggaacgcggcggctccaaatacgaggccgccaaaaaatggaacctgccagcagtgaccatagcctggctcctggagaccgcccggactggtaaaagggctgacgagagccatttcctgatagagaactccactaaagaggagagatccctggaaaccgagattacaaatgggatcaatctgaactctgatactgcagagcatcctggcaccagactccagacacaccggaagacagttgtgactcctctggacatgaataggtttcaatctaaggcgtttcgggcggtcgtgtcccaacacgcacggcaagtggccgctagcccggccgtaggacagccactacaaaaggaaccctcactgcacttagatactccaagtaaatttctgagcaaggataagttattcaagcccagctttgacgtgaaggatgctcttgctgccctggaaacccccgggaggccatcacagcagaagagaaaaccatccacacccctgtcagaagtgattgtgaagaatttgcagttggccctggcaaatagtagtcggaatgccgtagctctgtcagcatcaccccagctgaaagaggcccagtccgaaaaggaagaggcaccaaaaccactgcacaaagtggtggtgtgcgtatcaaagaagctgtcaaagaaacagtccgagctaaatggcatcgccgccagtctgggcgctgattatcgctggtcgtttgacgagactgtcactcacttcatttatcagggacgtcctaacgacaccaaccgggagtataagtctgtgaaagagcgcggcgtgcatatcgtgtcagagcattggcttttggattgcgcccaggagtgtaagcatctgcccgagtcactgtacccccatacctacaatcccaagatgagcttggacatcagtgccgtgcaagacggtagattgtgtaatagccgtctgctgagtgcagtttcatcgactaaagacgacgaaccggatcctctgattcttgaggagaatgacgtggacaatatggctaccaacaataaagaatcggccccttctaacggctctggtaaaaacgactctaagggcgtccttactcagaccttggagatgagagagaactttcaaaagcagctgcaggaaatcatgtccgcaacttccattgtgaaaccccaggggcaaagaactagcctgtccagatccggatgtaatagtgccagttccacacccgatagcactaggtctgcacggtcgggacgcagtcgggttttagaggctctgcgccagtcacgacagacggttcccgacgtgaatactgaaccgtcccagaacgaacagatcatatgggacgatccaaccgcaagggaggagagggctagactcgccagcaatctgcagtggccctcttgtcctactcaatactcagagctccaggtggatatccaaaatttggaggatagtccatttcagaagcctctccacgacagcgaaattgctaagcaagcagtttgcgatcccggtaacatcagggtgactgaggctcctaaacatccaatttctgaggagttagaaacaccaatcaaggattcccacctgatccccacgccgcaggcgcccagcatcgcattccctcttgctaacccccccgtggcaccccacccgcgggaaaagattattactattgaagaaacacacgaagagttgaagaagcaatacatattccaattgtctagcctgaaccctcaggagagaatcgattactgccacttaatcgagaagttaggaggcctagtgatcgagaaacagtgttttgatccgacctgtacacatattgtggttggtcatccattgcgcaatgaaaagtatctggctagcgtggctgccggtaaatgggtgctacaccgttcgtatctggaggcctgccgaaccgcaggtcatttcgtgcaagaagaagattatgagtgggggtcttcctcaatactagatgtcttaaccggaattaatgttcaacagcggaggctggctcttgctgcaatgcgctggcgcaaaaaaattcagcaaaggcaagagtccggcatcgtggagggcgcattttccggttggaaagttatacttcatgtcgatcagtcacgcgaagccggatttaagagattgcttcagtccggaggcgctaaggttttgcccggacactccgtgccgctgtttaaagaggcaacacatcttttctcggatcttaacaaactgaagcccgatgatagtggcgtgaatattgcggaagccgccgcccagaatgtatattgtctgaggactgaatacattgccgattacctcatgcaggaatcccctccacacgtggaaaattactgcctacccgaggccatatccttcatccagaataataaggaactcggcaccggactaagccagaagcggaaagcgcctaccgaaaagaacaaaatcaaacggccacgggtgcactag

SEQ ID NO: 169805 - DNA, 4569 bp, Artificial Sequence
  derived and/or modified sequence
atgagcagaaatgacaaggagcccttctttgtgaagttcctgaagagcagtgacaacagcaagtgcttcttcaaggccctggagagcatcaaggagttccagagcgaggagtacctgcagatcatcacagaggaggaggccctgaagatcaaggaaaatgacaggagcctgtacatctgtgaccccttcagcggcgtggtgtttgaccacctgaagaagctgggctgccgcatcgtgggcccccaggtggtgatcttctgcatgcaccaccagagatgtgtgcccagggctgagcaccctgtgtacaacatggtgatgtctgatgtgaccatcagctgcaccagcctggagaaggagaagcgggaggaggtgcacaagtatgtgcagatgatgggcggccgggtgtacagagacctgaatgtgtctgtgacccacctgattgctggggaggtgggcagcaagaagtacctggtggccgccaacctgaagaagcccatcctgctgcccagctggatcaagaccctgtgggagaagagccaggagaagaagatcacccgctacacagacatcaacatggaggacttcaagtgccccatcttcctgggctgcatcatctgtgtgacaggcctgtgtggcctggacaggaaggaggtgcagcagctgactgtgaagcatggaggccagtacatgggccagctgaagatgaatgaatgtacccacctgattgtgcaggagcccaagggccagaagtatgaatgtgccaagcgctggaatgtgcactgtgtgaccacccagtggttctttgacagcattgagaagggcttctgccaggatgagagcatctacaagacagagcccaggcctgaggccaagaccatgcccaacagcagcacccccaccagccagatcaacaccatcgacagcaggaccctgagtgatgtgagcaacatcagcaacatcaatgccagctgtgtgtctgagagcatctgcaacagcctgaacagcaagctggagcccaccctggagaacctggagaacctggatgtgtctgccttccaggcccctgaggacctgctggatggctgccgcatctacctgtgtggcttcagcggcaggaagctggacaagctgcggcggctcatcaacagcggcggcggcgtgcgcttcaaccagctgaatgaagatgtgacccacgtgattgtgggggactatgatgatgagctgaagcagttctggaacaagagcgcccaccggccccacgtggtgggcgccaagtggctgctggagtgcttcagcaagggctacatgctgtctgaggagccctacatccacgccaactaccagcctgtggagatccctgtgagccacaagccagagagcaaggccgccctgctgaagaagaagaacagcagcttcagcaagaaggactttgcccccagcgagaagcatgagcaggctgatgaggacctgctgagccagtatgaaaatggcagcagcacagtggtggaggccaagaccagcgaggcccggcccttcaatgacagcacccacgccgagcccctgaatgacagcacccacatcagcctgcaggaggagaaccagagctctgtgagccactgtgtgcctgatgtgtccaccatcacagaggagggcctcttcagccagaagagcttcctggtgctgggcttcagcaatgaaaatgaaagcaacatcgccaacatcatcaaggaaaatgccggcaagatcatgagcctgctgagcaggacagtggccgactatgctgtggtgcccctgctgggctgtgaggtggaggccaccgtgggggaggtggtgaccaacacctggctggtgacctgcatcgactaccagaccctgtttgaccccaagagcaaccccctcttcacccctgtgcctgtgatgacaggcatgacccccctggaggactgtgtgatctccttcagccagtgtgccggggctgagaaggagagcctgaccttcctggccaacctgctgggcgcctctgtgcaggagtactttgtgaggaagagcaatgccaagaagggcatgtttgccagcacccacctgatcctgaaggagcggggcggcagcaaatatgaagctgccaagaagtggaacctgcctgctgtgaccatcgcctggctgctggagacagccaggacaggcaagagagcagatgagagccacttcctgattgagaacagcaccaaggaggagaggagcctggagacagagatcaccaacggcatcaacctgaacagcgacacagctgagcaccctggcacccggctgcagacccacaggaagacagtggtgacccccctggacatgaaccgcttccagagcaaggccttccgggctgtggtgtcccagcacgcccggcaggtggccgccagccctgctgtgggccagcccctgcagaaggagcccagcctgcacctggacacccccagcaagttcctgagcaaggacaagctgttcaagcccagctttgatgtgaaggatgccctggccgccctggagaccccaggccggcccagccagcagaagaggaagcccagcacccccctgtctgaggtgattgtgaagaacctgcagctggccctggccaacagcagcagaaatgctgtggccctgagcgccagcccccagctgaaggaggcccagagcgagaaggaggaggcccccaagcccctgcacaaggtggtggtgtgtgtgtccaagaagctgagcaagaagcagagcgagctgaatggaattgctgccagcctgggcgctgactaccgctggagctttgatgaaacagtgacccacttcatctaccagggccggcccaatgacaccaaccgggagtacaagtctgtgaaggagcggggcgtgcacatcgtgtctgagcactggctgctggactgtgcccaggagtgcaagcacctgcctgagagcctgtacccccacacctacaaccccaagatgagcctggacatctctgctgtgcaggacggccgcctgtgcaacagccggctgctgtctgctgtgagcagcaccaaggatgatgagccagaccccctcatcctggaggagaatgatgtggacaacatggccaccaacaacaaggagagcgcccccagcaatggcagcggcaagaatgacagcaagggcgtgctgacccagaccctggagatgagggagaacttccagaagcagctgcaggagatcatgtctgccaccagcatcgtgaagccccagggccagaggaccagcctgagccgcagcggctgcaacagcgccagcagcaccccagacagcaccaggtctgcccggagcggccgcagccgggtgctggaggccctgcggcagagccggcagacagtgcctgatgtgaacacagagcccagccagaatgagcagatcatctgggatgaccccacagcccgggaggagcgggcccggctggccagcaacctgcagtggcccagctgccccacccagtacagcgagctgcaggtggacatccagaacctggaggacagccccttccagaagcccctgcatgacagcgagatcgccaagcaggccgtgtgtgaccccggcaacatccgggtgacagaggcccccaagcaccccatcagcgaggagctggagacccccatcaaggacagccacctgatccccaccccccaggcccccagcatcgccttccccctggccaacccccctgtggccccccacccccgggagaagatcatcaccatcgaggagacccatgaggagctgaagaagcagtacatcttccagctgagcagcctgaacccccaggagagaattgactactgccacctgattgagaagctgggcggcctggtgattgagaagcagtgctttgaccccacctgcacccacatcgtggtgggccaccccctgagaaatgagaagtacctggcctctgtggccgccggcaagtgggtgctgcacaggagctacctggaggcctgcaggacagctggccactttgtgcaggaggaggactatgagtggggcagcagcagcatcctggatgtgctgaccggcatcaacgtgcagcagaggcggctggccctggccgccatgcgctggaggaagaagatccagcagaggcaggagagcggcatcgtggagggcgccttcagcggctggaaggtgatcctgcacgtggaccagagccgggaggccggcttcaagaggctgctgcagagcggcggggccaaggtgctgcccggccacagcgtgcccctcttcaaggaggccacccacctgttcagtgacctgaacaagctgaagccagatgattctggagtgaacattgctgaggccgccgcccagaatgtgtactgcctgaggacagagtacatcgctgactacctgatgcaggagagccccccccacgtggagaactactgcctgcctgaggccatctccttcatccagaacaacaaggagctgggcaccggcctgagccagaagaggaaggcccccacagagaagaacaagatcaagaggccccgggtgcactag

SEQ ID NO: 169806 - DNA, 4569 bp, Artificial Sequence
  derived and/or modified sequence
atgagccggaacgacaaggagcccttcttcgtgaagttcctgaagtcctctgacaactccaaatgttttttcaaagccctcgagagtatcaaagaatttcagtcagaagagtacttgcagatcatcacagaagaggaagcccttaagatcaaggagaatgacagatccctctatatatgtgaccccttctccggagtcgtgttcgaccacctcaaaaaactgggttgtaggattgttggtccacaggtcgtgatcttttgcatgcaccaccagcgctgcgtccctcgggcggaacaccctgtgtacaacatggtgatgagcgacgtgaccatctcctgcacttccctggagaaagagaaacgcgaggaggtgcataagtatgtccagatgatggggggtagagtgtatagggacctcaacgtgtccgtgacacaccttattgccggagaggtcggctcaaaaaagtacttggtcgccgctaacctgaaaaagccaattttgcttccctcttggattaaaaccctgtgggagaagtcacaggagaaaaagataacccggtatacagatataaacatggaagactttaaatgtcccatttttctgggctgtatcatctgtgtgactgggttgtgtggcctcgatcggaaagaggtgcagcagctgaccgtaaagcacggtggtcaatatatgggacagctgaaaatgaacgaatgcactcatctgatcgtccaagagcctaagggacagaagtacgaatgtgccaaaaggtggaatgtgcattgcgtcacgactcaatggttcttcgactccatcgagaagggattttgtcaggatgaatcaatttataaaaccgagcccagacctgaagccaagaccatgccaaacagcagcacacccaccagtcagatcaacaccatagatagtcgcaccttatccgacgtgagtaacattagcaacattaacgcttcgtgtgtcagtgaatctatctgtaacagtttgaactcaaagctcgagccgacactggagaacctggagaatctcgacgtgtctgcattccaagctcccgaagacttgcttgatggctgtaggatctacctgtgtggctttagcgggcgcaagctggacaagttgaggaggcttataaacagtggaggaggagtgcggttcaatcaactaaatgaagatgtgacccatgtcatcgtaggtgactacgacgacgaactgaaacaattttggaataaatcagcacatagaccccatgtggtgggtgccaaatggcttctggagtgcttttccaagggttatatgttgtccgaggaaccttacattcacgcaaactaccagcccgtcgaaatccccgtgtctcacaagcctgagtctaaagccgctttgctcaagaagaagaacagtagctttagcaagaaagactttgcccccagtgaaaagcacgaacaagcagatgaagatctattatcacaatacgagaacgggtctagcactgtcgtggaggccaagacgtccgaggctcgcccattcaacgatagcacacacgccgagcctttgaacgactctacgcatatcagcctgcaagaagaaaatcagtcgtcagttagtcactgtgtcccggacgtttcgacaattaccgaggagggccttttttcacagaagtcgtttctcgtcctgggatttagcaatgagaatgaaagcaacatcgcaaatatcatcaaggagaacgccggaaagattatgtccctcttatcgagaactgtggccgattacgcggtggtacctcttctcgggtgtgaagtagaagcaacggtgggcgaagtggtgaccaatacctggctcgtgacttgtatagattaccagactcttttcgaccccaagtctaatccactgttcactcccgtccctgtgatgacaggtatgacaccgctggaagactgtgtgatcagtttctcccaatgcgcaggcgctgaaaaggaatctttaaccttccttgcaaatctactaggagcctcggtccaggaatatttcgtgagaaaatctaacgctaagaaaggcatgtttgcctcaactcatttgattctgaaagaaagaggcggaagcaaatatgaagctgccaaaaaatggaaccttcctgctgtgacaattgcctggcttctggaaacggctagaaccggtaagagggcagatgaatcgcactttctaattgagaattcaaccaaagaggaaaggtcactcgaaaccgaaattacaaacggtatcaacttaaactcagatactgctgagcacccgggaacaagacttcagactcacaggaaaaccgtcgtcacaccactggatatgaataggtttcagtccaaggcgttcagggcagtagtaagccagcacgcaaggcaggtcgcagcttccccggctgtgggtcaacccctgcagaaggagccgtcattacacttggatacgccctccaagttcctgagcaaggacaagttgtttaaaccctcttttgacgttaaagacgctctggccgccctagagacccctgggcggccctctcagcagaaaagaaagccatccaccccactctccgaagttatcgtgaagaatcttcaacttgcgctggccaacagctcccgaaatgcggtcgccctgagtgcctccccacagctgaaggaggcccagagcgagaaagaggaagctccgaaacctctccataaggtggttgtttgtgtctctaagaagctcagcaagaagcagtcagagcttaacggcatcgcagcctcactgggcgcagattaccggtggagctttgatgaaactgttacccactttatttatcagggcaggccaaatgacaccaaccgagagtataagtcagttaaagaacggggtgtacacattgtcagtgagcactggctcctagactgtgctcaagagtgtaaacaccttcccgagtccctgtaccctcatacctacaatcctaagatgtctctggacatcagcgccgtgcaggacggaaggctttgtaacagcagactgttatctgccgtgtcttctaccaaggacgatgagccagacccactcattcttgaagaaaacgatgtcgacaacatggctacaaacaacaaagagtcagccccaagcaacgggtctggtaagaacgactccaagggcgtcttaacccagaccctcgaaatgcgcgagaacttccagaagcaattacaggagattatgtccgctacatcaattgtgaaacctcagggccaacggacatctcttagtaggtctgggtgtaacagtgcttccagtacaccggacagcacacggagcgcaagatccggaaggagtagagttttagaagccttgaggcagagtaggcaaacagttcctgacgtgaacaccgaaccgtcgcagaacgaacagatcatctgggacgaccccacagcccgcgaggagcgggctagactggcctccaacttgcagtggcccagttgtccaactcagtattccgagcttcaagttgacatccagaacctggaagactcacctttccagaagcctctgcacgattctgaaattgcaaaacaagccgtttgcgaccctggcaatatccgggtgaccgaagcgcccaagcatcccatctctgaagagctggagaccccaattaaggattcccatttgataccaactccgcaagctcctagcatagcttttccattggccaatccacccgtagctcctcatccacgtgagaagatcatcacaattgaggagacacatgaagagttgaagaagcaatacatattccagcttagctcactgaacccacaagagaggattgactattgtcatttaatcgagaaattgggtggcttggtcattgaaaagcagtgcttcgatccaacttgcacacatatcgtcgtcgggcatccactccggaacgagaagtatctggctagcgtcgctgcaggcaagtgggtgctccaccgttcctacctcgaagcttgtcggaccgccggtcactttgtgcaggaggaagattatgagtggggctctagctccatcctggacgtgcttactgggatcaatgtgcaacagaggaggttggcacttgccgccatgaggtggcgtaaaaagattcagcagcgacaagagtctggcatcgtcgaaggtgcattcagcggatggaaggtcattctccacgtcgaccagagtcgagaagccggttttaaacggttgctgcaatctggcggggcaaaggttctgccgggccacagcgtgcccctattcaaggaagcgacccatttattctcagacttgaacaagctcaagcctgatgactcgggtgtcaatatcgccgaggcagccgcacaaaacgtttactgcttgagaacggagtatattgcagactatttgatgcaggaaagcccaccccacgtcgagaattattgccttcctgaagcaatctcatttattcaaaacaataaagaattggggactggactgagccagaaacgaaaggcccccacagagaaaaataaaattaaacggccgcgcgtgcattag

SEQ ID NO: 169807 - DNA, 4569 bp, Artificial Sequence
  derived and/or modified sequence
atgagtcgcaacgacaaagaacctttttttgtgaagtttctaaagtcctccgacaacagcaagtgtttctttaaggcattggagtctattaaagaattccaaagcgaagagtacttgcagataataacggaagaggaggctctcaaaataaaggaaaacgacagaagtctttacatttgtgatccattctcaggggtggtttttgatcatctgaagaaactaggctgccgtatcgttggaccccaggttgttatcttctgtatgcaccatcaacgctgtgttccccgtgctgagcatcccgtctataatatggttatgtcagatgtcaccatctcctgcacatccttagagaaggaaaaacgcgaagaagtgcacaaatacgttcaaatgatgggcggacgggtgtatcgcgacctaaatgtgagcgtgacacacctcattgccggtgaagtgggtagtaagaaatacctggtggccgcaaatctgaagaaacctatactactgccatcatggatcaaaactctgtgggagaagagccaggagaagaaaattacccgttacacagatattaatatggaagacttcaagtgcccaattttccttggatgcattatttgcgttacggggctttgcggcctcgatagaaaggaagtacagcagctcaccgtgaagcatggaggccaatatatgggccagttgaaaatgaatgagtgcacccacctaatcgtgcaggagcctaagggccagaaatacgaatgcgccaaacgctggaatgtgcattgcgtaacgacacagtggttttttgactccatagaaaaggggttttgccaggacgaatccatttacaaaacagaaccaagacctgaggcgaagactatgcctaacagttccacccctactagccagattaataccatcgattctaggaccctgtccgacgtgtcaaacatctctaatatcaatgcgtcatgcgtatctgagtctatttgtaattctctgaactctaagctggagccaaccctagaaaacctggagaatctggatgtcagcgcgtttcaggccccagaggacctgcttgacggatgtcgcatctatctctgtggtttctcgggacgcaagctggacaaacttcggagactcatcaatagtggtgggggagtgagattcaatcagctgaacgaggatgtgacacatgtgatcgtgggtgactatgatgacgaactgaagcagttttggaacaagtccgcccatcgaccacacgtggtgggtgctaaatggctgctcgaatgttttagcaagggttacatgctgtccgaggaaccatacatccacgcgaactaccaaccagtggaaataccagtaagccataagcctgaatctaaagctgcattgctcaaaaagaagaactccagcttttctaaaaaagattttgcgccttcggagaagcacgaacaggccgatgaggatcttctgtctcagtacgagaatggctcttcaacagtggtcgaggccaagaccagcgaggccagaccatttaacgattccacccatgcggaacctttgaatgattccacacacatttccctccaggaggagaaccaatcaagcgtgtcccattgcgtgcccgacgtctcgaccatcaccgaggaaggcctgttttcccagaaatcttttctcgtactgggattttctaacgagaatgagtctaatatcgctaacataatcaaggaaaacgctggaaagatcatgagcctcctgtctagaactgtagcagactatgcagtcgtaccactgctcgggtgtgaagtggaggccaccgtaggagaagtcgttaccaacacgtggttagtcacatgtattgactatcagacactgtttgatcctaagtccaaccctctgttcacccccgtgcctgttatgacaggcatgacccccctcgaggactgcgtgatatcattcagccagtgtgcgggtgccgaaaaagaatcactcacattcctggctaatctcctgggcgcaagcgtgcaggaatatttcgtgagaaaatcgaacgcaaagaagggaatgttcgcaagcacgcatctaatacttaaggagaggggcggttctaagtatgaggccgcaaaaaaatggaaccttccagctgtgaccatcgcctggctgctcgagaccgctcgcacaggaaagcgggcagacgagagtcacttcctgattgaaaatagcacaaaagaagaaagatctttggagacagaaatcacaaacggtatcaacctcaattccgatactgccgagcaccctggcacacgtctgcagacccataggaagacagtggtgacccctctggacatgaacaggtttcaatcaaaggctttcagagctgtggtgtctcagcacgccagacaggtcgcagcaagccccgctgtgggacagccactccagaaggaaccttccttacacctcgataccccaagcaagtttctctctaaggataaacttttcaagccaagtttcgatgtcaaggacgccctggctgccctggagactcccggaagacctagccaacaaaaacggaaaccttccaccccgctgtccgaggttatagttaaaaatctccaactagccctcgccaattcttccaggaatgctgtggctctctccgccagcccccaactcaaagaggcgcagtcagagaaagaagaagcgcctaagccactgcataaggtagtggtttgcgtctcaaagaaactctcaaagaaacagagcgaattgaacgggatcgctgcctccctgggtgctgactaccggtggtccttcgatgaaaccgtcacccatttcatctaccagggacgacccaatgacaccaatcgcgagtataaaagcgtgaaagagagaggggtccacatcgtgagtgagcactggctgctcgattgtgcgcaagagtgcaagcacttgccggagagtctgtaccctcatacatataacccaaaaatgtcattagatatcagcgccgtgcaggacggcagactgtgtaattccagactgctgagtgccgttagttctacgaaggacgacgaaccagatcccttaattctcgaggagaacgatgtcgataacatggccacaaacaacaaagaaagcgccccatctaatgggtctggcaaaaacgattccaaaggtgtgctgacacaaactctcgaaatgcgcgaaaactttcagaaacaactgcaagaaatcatgagtgcaacgagcattgtgaagccccaaggccagcggaccagcctgtccaggagcggctgtaatagcgcgtccagtaccccggattctacaagatccgcgaggtccggcaggtcacgtgtgctggaggctcttagacaatctaggcaaacagtccctgatgttaacacggagccttctcagaatgagcagattatatgggacgatcctacagcacgtgaggaacgggctcggctagcctctaatctccaatggccctcttgtcctactcagtactccgagctacaggtggatatccagaatctcgaagactcccccttccaaaagccattgcatgacagtgagattgcaaaacaggctgtgtgcgaccccggaaacatccgggtcaccgaggctcccaagcaccccattagtgaggaacttgagacacccatcaaggatagtcaccttattccgaccccacaggctccatccatcgcgtttcctctggccaacccaccagtggcgccacatccacgggaaaaaataattacaatagaagaaactcacgaagaactcaaaaaacagtacatatttcagttaagcagcctgaaccctcaagaacggattgactactgccatttgatcgaaaagcttggcggtctagttattgaaaagcaatgctttgaccctacctgtacacacattgtcgttggtcaccctctgcgcaacgaaaaatacctggcttccgtggcagcaggcaaatgggtcttgcatcgtagctacttagaggcgtgccgaacagccggtcatttcgtgcaggaggaggactatgagtgggggagtagttctatcctcgacgtcctcaccggtataaacgtccagcagcgcagactagcactggccgcaatgcgctggaggaaaaagattcagcagaggcaagagagcgggatcgtggaaggtgccttctccgggtggaaagtgattctgcacgtcgatcaatctagagaggctggttttaagcgcttgcttcaatccggcggtgccaaggtcctgcccggacattcagttccactgtttaaagaggcaacgcaccttttctccgatctcaataagttgaagcccgatgactctggcgtgaacatcgcagaagccgcagcccagaatgtgtattgcttaagaacagaatacatagcagactacctcatgcaggagagtccaccacacgtggagaattactgtttaccagaagctatctcatttatacaaaacaataaggaactggggaccggactctcccaaaagcgtaaggcacccactgagaaaaacaagattaagcgaccacgagttcattag

SEQ ID NO: 169808 - DNA, 5378 bp, Artificial Sequence
  derived and/or modified sequence
ggggtaggggcggcgccgagtcgggggagggggctgtgcgccgggctggcgcccgaccccagccaccgccctgcggccagcgcgtcccccgactcgccgcccggagaccccgaggctccaacgagttcagaaatgtccagaaatgacaaagaaccgttttttgtgaagtttttaaagtcttcagacaattccaaatgtttttttaaagctctcgagtccataaaagaattccaatcagaagaatatcttcagattattacagaagaagaggcattgaagataaaggagaatgatagatcactttatatctgtgacccttttagtggcgttgtctttgatcacctcaaaaagcttggctgcagaattgttggtcctcaagtagtcatattttgtatgcaccaccagcgatgtgtcccaagagccgaacatccagtttataatatggttatgtctgatgtaaccatatcttgtacaagtctggaaaaagaaaaaagggaagaagttcataaatatgtacaaatgatgggcggacgagtatacagagaccttaatgtatcagtaactcaccttattgcaggagaagttggtagcaaaaaatatttagttgctgcaaacctgaagaaacctattttgcttccctcttggataaaaacactttgggagaagtcacaagagaaaaaaataactagatatactgatataaacatggaagatttcaagtgtcctatttttcttggttgcataatctgtgtgactggcttatgtggcttagacaggaaagaagttcagcaactcacagttaagcatggaggtcaatacatgggacaattgaaaatgaatgaatgtacacacctcattgtgcaagaaccaaaaggtcagaagtatgagtgtgccaagagatggaatgtacactgtgtgaccacacagtggttttttgacagtattgagaaaggtttttgtcaggatgaatccatatacaagacagaacctagaccagaagcaaagactatgcccaattcttcaactcctaccagccagatcaacacaattgatagtcgtactctttcagatgtcagcaatatttccaacataaatgcaagttgcgtaagtgaatcaatatgtaattcacttaacagcaaactggagcctacacttgaaaatctagaaaatctggatgtcagtgcatttcaagcacctgaagatttattagatggttgtcggatatatctttgcggttttagtggcagaaagctagataaactgagaagacttattaacagtggaggtggagttcgttttaaccagctaaatgaagatgtaactcatgttattgtgggagattatgatgatgaattgaagcagttttggaataaatcagcccacaggcctcatgtagtgggagcaaagtggttgctagagtgtttcagtaaaggttatatgctttctgaagaaccatatatccatgctaattaccagccagtggaaattccagtttcacataagcctgaaagtaaagcagctcttttaaaaaagaagaacagcagcttctctaagaaagactttgctcctagtgaaaagcatgagcaagctgatgaagatctgctctctcaatatgaaaatggtagctccacagtagttgaggctaagacgtctgaagccaggccctttaatgattctactcatgctgagcccttgaatgattctactcacatttctttgcaagaagaaaaccagtcttctgtcagtcattgtgtccctgatgtttctacaattactgaagaaggcttatttagccaaaagagtttccttgttttgggttttagtaatgaaaatgaatctaacatcgcaaacatcataaaagaaaatgctgggaaaatcatgtcccttctgagcagaactgttgcggattatgctgtggttcctctgctggggtgtgaagtggaagccactgtgggagaagttgttacaaatacatggctggttacttgcatagactatcagactttgtttgatccaaagtcgaatcctctcttcacaccagttccagtaatgacaggaatgactcctttagaggattgtgttatttcatttagccagtgtgctggagcagaaaaagagtctttaacattcctagcaaacctccttggagcaagtgttcaagaatactttgttcgcaaatccaatgcaaagaaaggcatgtttgccagtactcatcttatactgaaagaacgtggtggctctaaatatgaagctgcaaagaagtggaatttacctgccgttactatagcttggctgttggagactgctagaacgggaaagagagcagacgaaagccattttctgattgaaaattcaactaaagaagaacgaagtttggaaacagaaataacaaatggaatcaatctaaattcagatactgcagagcatcctggcacacgcctgcaaactcacagaaaaaccgtcgttacacctttagatatgaaccgctttcagagtaaagctttccgtgctgtggtctcacaacatgccagacaggtcgcagcctccccagcagtaggacaaccacttcagaaggagccctcgttacacctggatacaccatcaaaattcctgtccaaggacaaactcttcaagccttcctttgatgtgaaggatgcacttgcagccttggaaactccaggacgtcccagccaacagaaaaggaaaccgagtacgccactctcagaagttattgtcaaaaacttgcaacttgctttggcaaatagctctcgaaatgctgtcgctctttctgccagccctcaactgaaagaggcccagtcagagaaggaagaagccccaaagccacttcacaaagtagtggtatgtgttagtaaaaaactcagtaagaagcagagtgaactaaatgggatcgcagcctctctaggagcagattacaggtggagttttgatgaaacagtgactcatttcatctatcaagggcggccaaatgacactaatcgggagtataaatctgtaaaagaaagaggagtacacattgtttccgagcactggcttttagattgtgcccaagagtgtaaacatcttcctgaatctctttatccacatacttataatcccaaaatgagcttggatatcagcgcagtgcaagatggccggctctgtaatagtcgactactctcagctgtgtcttcaacaaaggatgatgagccagatcctttgattttagaagaaaatgatgtagacaatatggccaccaataataaagagtcagcaccatcaaatggaagtggaaagaatgactctaaaggagttctgacacagaccttagagatgagagagaactttcagaagcagttacaggagataatgtctgcaacatcaatagtgaaaccccaagggcagaggacttccctttcaagaagtggttgtaacagcgcatcttcaacccctgacagcactcgctctgctcgcagtggacgaagtagagtcctagaggcactgaggcagtctcgtcagacagtacctgatgtcaacacagagccttcccaaaatgaacagatcatttgggatgaccctacagcaagggaggagagagcaaggcttgccagcaatttgcagtggcctagttgtcccacacaatactctgagcttcaggttgacattcaaaacttggaggattctccttttcaaaagcctttacatgattcagaaattgctaaacaggctgtctgtgatcctggaaacatacgtgtgactgaagctcccaaacacccaatctctgaagaactggaaactcccataaaagacagccacctgatccctacgcctcaagcccccagtattgcctttccactcgccaacccccctgtggctccgcaccctagagaaaagattataacgatagaggagactcatgaagaattaaaaaaacagtacatatttcagttatcatctctgaatcctcaagaacgtattgactattgtcatctgattgagaaactaggtggattggtgatagaaaagcagtgctttgatcccacctgtacacacattgttgtgggacatccacttcgaaacgagaagtatttagcctcagtggcagctgggaagtgggtgcttcatcgctcctaccttgaagcctgcaggactgctggacacttcgtgcaggaagaagactatgaatggggaagtagttccatacttgatgttctgactggaatcaatgtacagcaacgaagactagcacttgcagcaatgagatggagaaaaaaaatccagcaaagacaagaatctggcattgttgagggagcatttagtgggtggaaggttattttacatgtggatcagtctcgagaagcaggcttcaaacgccttcttcagtcaggaggagcaaaggtgctacctggtcattctgtacctttatttaaagaggccacacatcttttttctgacttgaataaactgaaaccagatgactcaggagttaatatagcagaagctgctgcccagaacgtgtactgcttgagaacagaatacattgctgattatctcatgcaggaatcacctcctcatgtagaaaattactgtctaccagaagctatttcatttattcagaataataaggaacttgggactggattatcacaaaagaggaaagctcctacagaaaaaaataaaatcaaacgacctagagtacactaatcgcatctaccctttagttaccaaacattaaatgtttttaaaaattgaaagcctgaatgtgactgtgatagatttgggtagtaatttaaagatgagtacctgaagaattctgcttcagagtataatgatgacccttcttgagttttgaacacctgaaattgtaatcactgaaatattaactgtttcttaataaaaagttacctgaaataacaacaaaatacaactcctcagctagcttgctgttaaaccacattgaagtctgttaaaagatatttatttttcttgtaaatatctgaagctgtagcttagtggaaattttagcaaggtaatggattttgctttaaaatgtctgccttacaaattcataacaacaagatttgtcagtcagcatttattcatgttttccctgatttttatcttctcaccattttacctcttttaacaggagcctgagcacaaggtttaatgaggaagctggggctataaatatgtgtgtatatatgtatatgtatgtttgtacaaatctccatgatgtttgccaagtttgaatgcgcaaaacttggaaaatgtgacaataaagaataaaagtagtaactcaaattagtattaagatgtgtttacatagataaattttttaaaagagcaccctggcatctgttcttctgttgaagcaacaa

SEQ ID NO: 169809 - protein, 425 aa, Artificial Sequence [sequence omitted]

SEQ ID NO: 169810 - protein, 425 aa, Artificial Sequence
  derived and/or modified sequence
MASGQFVNKLQEEVICPICLDILQKPVTIDCGHNFCLKCITQIGETSCGFFKCPLCKTSVRKNAIRFNSLLRNLVEKIQALQASEVQSKRKEATCPRHQEMFHYFCEDDGKFLCFVCRESKDHKSHNVSLIEEAAQNYQGQIQEQIQVLQQKEKETVQVKAQGVHRVDVFTDQVEHEKQRILTEFELLHQVLEEEKNFLLSRIYWLGHEGTEAGKHYVASTEPQLNDLKKLVDSLKTKQNMPPRQLLEPAQPHLPRSEEFQFLNPTPVPLELEKKLSEAKSRHDSITGSLKKFKDQLQADRKKDENRFFKSMNKNDMKSWGLLQKNNHKMNKTSEPGSSSAGGRTTSGPPNHHSSAPSHSLFRASSAGKVTFPVCLLASYDEISGQGASSQDTKTFDVALSEELHAALSEWLTAIRAWFCEVPSS

SEQ ID NO: 169811 - protein, 425 aa, Artificial Sequence
  derived and/or modified sequence
MASGQFVNKLQEEVICPICLDILQKPVTIDCGHNFCLKCITQIGETSCGFFKCPLCKTSVRKNAIRFNSLLRNLVEKIQALQASEVQSKRKEATCPRHQEMFHYFCEDDGKFLCFVCRESKDHKSHNVSLIEEAAQNYQGQIQEQIQVLQQKEKETVQVKAQGVHRVDVFTDQVEHEKQRILTEFELLHQVLEEEKNFLLSRIYWLGHEGTEAGKHYVASTEPQLNDLKKLVDSLKTKQNMPPRQLLEDIKVVLCRSEEFQFLNPTPVPLELEKKLSEAKSRHDSITGSLKKFKDQLQADRKKDENRFFKSMNKNDMKSWGLLQKNNHKMNKTSEPGSSSAGGRTTSGPPNHHSSAPSHSLFRASSAGKVTFPVCLLASYDEISGQGASSQDTKTFDVALSEELHAALSEWLTAIRAWFCEVPSS

SEQ ID NO: 169812 - protein, 425 aa, Artificial Sequence [sequence omitted]

SEQ ID NO: 169813 - protein, 425 aa, Artificial Sequence
  derived and/or modified sequence
MASGQFVNKLQEEVICPICLDILQKPVTIDCGHNFCLKCITQIGETSCGFFKCPLCKTSVRKNAIRFNSLLRNLVEKIQALQASEVQSKRKEATCPRHQEMFHYFCEDDGKFLCFVCRESKDHKSHNVSLIEEAAQNYQGQIQEQIQVLQQKEKETVQVKAQGVHRVDVFTDQVEHEKQRILTEFELLHQVLEEEKNFLLSRIYWLGHEGTEAGKHYVASTEPQLNDLKKLIDSLKTKQNMPPRQLLEDIKVVLCRSEEFQFLNPTPVPLELEKKLSEAKSRHDSITGSLKKFKDQLQADRKKDENRFFKSMNKNDMKSWGLLQKNNHKMNKTSEPGSSSAGGRTTSGPPNHHSSAPSHSLFRASSAGKVTFPVCLLASYDEISGQGASSQDTKTFDVALSEELHAALSEWLTAIRAWFCKVPSS

SEQ ID NO: 169814 - protein, 425 aa, Artificial Sequence
  derived and/or modified sequence
MASGQFVNKLQEEVICPICLDILQKPVTIDCGHNFCLKCITQIGETSCGFFKCPLCKTSVRKNAIRFNSLLRNLVEKIQALQASEVQSKRKEATCPRHQEMFHYFCEDDGKFLCFVCRESKDHKSHNVSLIEEAAQNYQGQIQEQIQVLQQKEKETVQVKAQGVHRVDVFTDQVEHEKQRILTEFELLHQVLEEEKNFLLSRIYWLGHEGTEAGKHYVASTEPQLNDLKKLIDSLKTKQNMPPRQLLEPAQPHLPRSEEFQFLNPTPVPLELEKKLSEAKSRHDSITGSLKKFKDQLQADRKKDENRFFKSMNKNDMKSWGLLQKNNHKMNKTSEPGSSSAGGRTTSGPPNHHSSAPSHSLFRASSAGKVTFPVCLLASYDEISGQGASSQDTKTFDVALSEELHAALSEWLTAIRAWFCKVPSS

SEQ ID NO: 169815 - protein, 425 aa, Artificial Sequence
  derived and/or modified sequence
MASGQFVNKLQEEVICPICLDILQKPVTIDCGHNFCLKCITQIGETSCGFFKCPLCKTSVRKNAIRFNSLLRNLVEKIQALQASEVQSKRKEATCPRHQEMFHYFCEDDGKFLCFVCCESKDHKSHNVSLIEEAAQNYQGQIQEQIQVLQQKEKETVQVKAQGVHRVDVFTDQVEHEKQRILTEFELLHQVLEEEKNFLLSRIYWLGHEGTEAGKHYVASTEPQLNDLKKLVDSLKTKQNMPPRQLLEPAQPHLPRSEEFQFLNPTPVPLELEKKLSEAKSRHDSITGSLKKFKDQLQADRKKDENRFFKSMNKNDMKSWGLLQKNNHKMNKTSEPGSSSAGGRTTSGPPNHHSSAPSHSLFRASSAGKVTFPVCLLASYDEISGQGASSQDTKTFDVALSEELHAALSEWLTAIRAWFCEVPSS

SEQ ID NO: 169816 - protein, 425 aa, Artificial Sequence
  derived and/or modified sequence
MASGQFVNKLQEEVICPICLDILQKPVTIDCGHNFCLKCITQIGETSCGFFKCPLCKTSVRKNAIRFNSLLRNLVEKIQALQASEVQSKRKEATCPRHQEMFHYFCEDDGKFLCFVCRESKDHKSHNVSLIEEAAQNYQGQIQEQIQVLQQKEKETVQVKAQGVHRVDVFTDQVEHEKQRILTEFELLHQVLEEEKNFLLSRIYWLGHEGTEAGKHYVASTEPQLNDLKKLVDSLKTKQNMPPRQLLEPAQPHLPRSEEFQFLNPTPVPLELEKKLSEAKSRHDSITGSLKKFKDQLQADRKKDENRFFKSMNKNDMKSWGLLQKNNHKMNKTSEPGSSSAGGRTTSGPPNHHSSAPSHSLFRASSAGKVTFPVCLLASYDEISGQGASSQDTKTFDVALSEELHAALSEWLTAIRAWFCKVPSS

SEQ ID NO: 169817 - DNA, 2049 bp, Artificial Sequence
  derived and/or modified sequence
atccatttgttctcaagaggtagcaagaaacagtatccacagtggactccggggctcctacagacttggcacagcttcctacagtcttgaaacagccctgttgttctgtcatggccagtgggcagtttgtgaacaaactgcaagaggaagtgatctgccccatctgcctggacattctgcagaaacctgtcaccatcgactgtgggcacaatttctgcctcaaatgcatcactcagattggggaaacatcatgtggatttttcaaatgtcccctctgcaaaacttccgtaaggaagaacgcaatcaggttcaactcgctgttgcggaatctggtggagaaaatccaagctctacaagcctctgaggtgcagtccaaaaggaaagaggctacatgcccgaggcaccaggagatgttccactatttctgcgaggatgatgggaagttcctctgttttgtgtgtcgtgaatccaaggaccacaaatcccataatgtcagcttgatcgaagaagctgcccagaattatcaggggcagattcaagagcagatccaagtcttgcagcaaaaggagaaggagacagtacaagtgaaggcacaaggtgtacacagggtcgatgtcttcacggaccaggtagaacatgagaagcaaaggatcctcacagaatttgaactcctgcatcaagtcctagaggaggagaagaatttcctgctatcacggatttactggctgggtcatgagggaacggaagcggggaaacactatgttgcctccactgagccacagttgaacgatctcaagaagctcgttgattccctgaagaccaagcagaacatgccacccaggcagctgctggaggatatcaaagtcgtcttgtgcagaagtgaagagtttcagtttctcaacccaacccctgttcctctggaactggagaaaaaactcagtgaagcaaaatcaagacatgactccatcacagggagcctaaaaaaattcaaagaccaactccaggctgataggaaaaaagatgaaaacagattcttcaaaagcatgaataaaaatgacatgaagagctggggcttgttacagaaaaataatcataaaatgaacaaaacctcagagcccgggtcatcttctgcaggcggcagaactacatcggggccaccaaatcaccactcttcagccccatcccactccctgtttcgggcctcgtctgctgggaaagtcacttttccagtatgtctcctggcctcttatgatgagatttctggtcaaggagcgagctctcaggatacgaagacatttgacgttgcgctgtccgaggagctccatgcggcactgagtgagtggctgacagcgatccgggcttggttttgtgaggttccttcaagctaagccagctcagagaacacggggagcggtggtgctacacggacttcggagcatagagtggcgctgagtgagtggctgagaccgaccacggttcttgacttagtggaattgggtcgaaggagtggagaatgggagggctcgggctactgagagtggagatgggggcgggggtggtggtgaagagagttggagaaggaatggacgaattcttgagcaaaaggaggggaagagacaatctccagccacccgccccacgcttgacttcttatcactttggctgtggtgccgcctagtggaaaaaggaagtccctgcagcagtccccgcactctttaagcagctgtttaccgaaggcaccagttcagccaggagtgaaatccggagaggagcaacgccagcctgggtcacagtccatcaaaccccatgagcccgaccactctcgctcttccttacattcccacgtcccccttctctcccaacccctcatatcagcaagggaaattaattaatgagatttgataaatcagtagatagaatgaggtccccattctgaaatatttagcagactggaaccaccacgcaagcctctgtagggggtggatggagacacttctaactttaataaactgcgactgaacgtggaaaaaaaaaaaaaaaaaaaaaaaa

SEQ ID NO: 169818 - DNA, 1278 bp, Artificial Sequence
  derived and/or modified sequence
atggccagcggccagttcgtgaacaagctgcaggaggaggtgatctgccccatctgcctggacatcctgcagaagcccgtgaccatcgactgcggccacaacttctgcctgaagtgcatcacccagatcggcgagaccagctgcggcttcttcaagtgccccctgtgcaagaccagcgtgagaaagaacgccatcagattcaacagcctgctgagaaacctggtggagaagatccaggccctgcaggccagcgaggtgcagagcaagagaaaggaggccacctgccccagacaccaggagatgttccactacttctgcgaggacgacggcaagttcctgtgcttcgtgtgctgcgagagcaaggaccacaagagccacaacgtgagcctgatcgaggaggccgcccagaactaccagggccagatccaggagcagatccaggtgctgcagcagaaggagaaggagaccgtgcaggtgaaggcccagggcgtgcacagagtggacgtgttcaccgaccaggtggagcacgagaagcagagaatcctgaccgagttcgagctgctgcaccaggtgctggaggaggagaagaacttcctgctgagcagaatctactggctgggccacgagggcaccgaggccggcaagcactacgtggccagcaccgagccccagctgaacgacctgaagaagctggtggacagcctgaagaccaagcagaacatgccccccagacagctgctggaggacatcaaggtggtgctgtgcagaagcgaggagttccagttcctgaaccccacccccgtgcccctggagctggagaagaagctgagcgaggccaagagcagacacgacagcatcaccggcagcctgaagaagttcaaggaccagctgcaggccgacagaaagaaggacgagaacagattcttcaagagcatgaacaagaacgacatgaagagctggggcctgctgcagaagaacaaccacaagatgaacaagaccagcgagcccggcagcagcagcgccggcggcagaaccaccagcggcccccccaaccaccacagcagcgcccccagccacagcctgttcagagccagcagcgccggcaaggtgaccttccccgtgtgcctgctggccagctacgacgagatcagcggccagggcgccagcagccaggacaccaagaccttcgacgtggccctgagcgaggagctgcacgccgccctgagcgagtggctgaccgccatcagagcctggttctgcgaggtgcccagcagctag

SEQ ID NO: 169819 - DNA, 1278 bp, Artificial Sequence
  derived and/or modified sequence
atggccagcggccagttcgtgaacaagctgcaggaggaggtgatctgccccatctgcctggacatcctgcagaagcccgtgaccatcgactgcggccacaacttctgcctgaagtgcatcacccagatcggcgagaccagctgcggcttcttcaagtgccccctgtgcaagaccagcgtgagaaagaacgccatcagattcaacagcctgctgagaaacctggtggagaagatccaggccctgcaggccagcgaggtgcagagcaagagaaaggaggccacctgccccagacaccaggagatgttccactacttctgcgaggacgacggcaagttcctgtgcttcgtgtgcagagagagcaaggaccacaagagccacaacgtgagcctgatcgaggaggccgcccagaactaccagggccagatccaggagcagatccaggtgctgcagcagaaggagaaggagaccgtgcaggtgaaggcccagggcgtgcacagagtggacgtgttcaccgaccaggtggagcacgagaagcagagaatcctgaccgagttcgagctgctgcaccaggtgctggaggaggagaagaacttcctgctgagcagaatctactggctgggccacgagggcaccgaggccggcaagcactacgtggccagcaccgagccccagctgaacgacctgaagaagctggtggacagcctgaagaccaagcagaacatgccccccagacagctgctggagcccgcccagccccacctgcccagaagcgaggagttccagttcctgaaccccacccccgtgcccctggagctggagaagaagctgagcgaggccaagagcagacacgacagcatcaccggcagcctgaagaagttcaaggaccagctgcaggccgacagaaagaaggacgagaacagattcttcaagagcatgaacaagaacgacatgaagagctggggcctgctgcagaagaacaaccacaagatgaacaagaccagcgagcccggcagcagcagcgccggcggcagaaccaccagcggcccccccaaccaccacagcagcgcccccagccacagcctgttcagagccagcagcgccggcaaggtgaccttccccgtgtgcctgctggccagctacgacgagatcagcggccagggcgccagcagccaggacaccaagaccttcgacgtggccctgagcgaggagctgcacgccgccctgagcgagtggctgaccgccatcagagcctggttctgcgaggtgcccagcagctag

SEQ ID NO: 169820 - DNA, 1278 bp, Artificial Sequence
  derived and/or modified sequence
atggccagcggccagttcgtgaacaagctgcaggaggaggtgatctgccccatctgcctggacatcctgcagaagcccgtgaccatcgactgcggccacaacttctgcctgaagtgcatcacccagatcggcgagaccagctgcggcttcttcaagtgccccctgtgcaagaccagcgtgagaaagaacgccatcagattcaacagcctgctgagaaacctggtggagaagatccaggccctgcaggccagcgaggtgcagagcaagagaaaggaggccacctgccccagacaccaggagatgttccactacttctgcgaggacgacggcaagttcctgtgcttcgtgtgcagagagagcaaggaccacaagagccacaacgtgagcctgatcgaggaggccgcccagaactaccagggccagatccaggagcagatccaggtgctgcagcagaaggagaaggagaccgtgcaggtgaaggcccagggcgtgcacagagtggacgtgttcaccgaccaggtggagcacgagaagcagagaatcctgaccgagttcgagctgctgcaccaggtgctggaggaggagaagaacttcctgctgagcagaatctactggctgggccacgagggcaccgaggccggcaagcactacgtggccagcaccgagccccagctgaacgacctgaagaagctggtggacagcctgaagaccaagcagaacatgccccccagacagctgctggaggacatcaaggtggtgctgtgcagaagcgaggagttccagttcctgaaccccacccccgtgcccctggagctggagaagaagctgagcgaggccaagagcagacacgacagcatcaccggcagcctgaagaagttcaaggaccagctgcaggccgacagaaagaaggacgagaacagattcttcaagagcatgaacaagaacgacatgaagagctggggcctgctgcagaagaacaaccacaagatgaacaagaccagcgagcccggcagcagcagcgccggcggcagaaccaccagcggcccccccaaccaccacagcagcgcccccagccacagcctgttcagagccagcagcgccggcaaggtgaccttccccgtgtgcctgctggccagctacgacgagatcagcggccagggcgccagcagccaggacaccaagaccttcgacgtggccctgagcgaggagctgcacgccgccctgagcgagtggctgaccgccatcagagcctggttctgcgaggtgcccagcagctag

SEQ ID NO: 169821 - DNA, 1278 bp, Artificial Sequence
  derived and/or modified sequence
atggccagcggccagttcgtgaacaagctgcaggaggaggtgatctgccccatctgcctggacatcctgcagaagcccgtgaccatcgactgcggccacaacttctgcctgaagtgcatcacccagatcggcgagaccagctgcggcttcttcaagtgccccctgtgcaagaccagcgtgagaaagaacgccatcagattcaacagcctgctgagaaacctggtggagaagatccaggccctgcaggccagcgaggtgcagagcaagagaaaggaggccacctgccccagacaccaggagatgttccactacttctgcgaggacgacggcaagttcctgtgcttcgtgtgcagagagagcaaggaccacaagagccacaacgtgagcctgatcgaggaggccgcccagaactaccagggccagatccaggagcagatccaggtgctgcagcagaaggagaaggagaccgtgcaggtgaaggcccagggcgtgcacagagtggacgtgttcaccgaccaggtggagcacgagaagcagagaatcctgaccgagttcgagctgctgcaccaggtgctggaggaggagaagaacttcctgctgagcagaatctactggctgggccacgagggcaccgaggccggcaagcactacgtggccagcaccgagccccagctgaacgacctgaagaagctggtggacagcctgaagaccaagcagaacatgccccccagacagctgctggaggacatcaaggtggtgctgtgcagaagcgaggagttccagttcctgaaccccacccccgtgcccctggagctggagaagaagctgagcgaggccaagagcagacacgacagcatcaccggcagcctgaagaagttcaaggaccagctgcaggccgacagaaagaaggacgagaacagattcttcaagagcatgaacaagaacgacatgaagagctggggcctgctgcagaagaacaaccacaagatgaacaagaccagcgagcccggcagcagcagcgccggcggcagaaccaccagcggcccccccaaccaccacagcagcgcccccagccacagcctgttcagagccagcagcgccggcaaggtgaccttccccgtgtgcctgctggccagctacgacgagatcagcggccagggcgccagcagccaggacaccaagaccttcgacgtggccctgagcgaggagctgcacgccgccctgagcgagtggctgaccgccatcagagcctggttctgcaaggtgcccagcagctag

SEQ ID NO: 169822 - DNA, 1278 bp, Artificial Sequence
  derived and/or modified sequence
atggccagcggccagttcgtgaacaagctgcaggaggaggtgatctgccccatctgcctggacatcctgcagaagcccgtgaccatcgactgcggccacaacttctgcctgaagtgcatcacccagatcggcgagaccagctgcggcttcttcaagtgccccctgtgcaagaccagcgtgagaaagaacgccatcagattcaacagcctgctgagaaacctggtggagaagatccaggccctgcaggccagcgaggtgcagagcaagagaaaggaggccacctgccccagacaccaggagatgttccactacttctgcgaggacgacggcaagttcctgtgcttcgtgtgcagagagagcaaggaccacaagagccacaacgtgagcctgatcgaggaggccgcccagaactaccagggccagatccaggagcagatccaggtgctgcagcagaaggagaaggagaccgtgcaggtgaaggcccagggcgtgcacagagtggacgtgttcaccgaccaggtggagcacgagaagcagagaatcctgaccgagttcgagctgctgcaccaggtgctggaggaggagaagaacttcctgctgagcagaatctactggctgggccacgagggcaccgaggccggcaagcactacgtggccagcaccgagccccagctgaacgacctgaagaagctgatcgacagcctgaagaccaagcagaacatgccccccagacagctgctggaggacatcaaggtggtgctgtgcagaagcgaggagttccagttcctgaaccccacccccgtgcccctggagctggagaagaagctgagcgaggccaagagcagacacgacagcatcaccggcagcctgaagaagttcaaggaccagctgcaggccgacagaaagaaggacgagaacagattcttcaagagcatgaacaagaacgacatgaagagctggggcctgctgcagaagaacaaccacaagatgaacaagaccagcgagcccggcagcagcagcgccggcggcagaaccaccagcggcccccccaaccaccacagcagcgcccccagccacagcctgttcagagccagcagcgccggcaaggtgaccttccccgtgtgcctgctggccagctacgacgagatcagcggccagggcgccagcagccaggacaccaagaccttcgacgtggccctgagcgaggagctgcacgccgccctgagcgagtggctgaccgccatcagagcctggttctgcaaggtgcccagcagctag

SEQ ID NO: 169823 - DNA, 1278 bp, Artificial Sequence
  derived and/or modified sequence
atggccagcggccagttcgtgaacaagctgcaggaggaggtgatctgccccatctgcctggacatcctgcagaagcccgtgaccatcgactgcggccacaacttctgcctgaagtgcatcacccagatcggcgagaccagctgcggcttcttcaagtgccccctgtgcaagaccagcgtgagaaagaacgccatcagattcaacagcctgctgagaaacctggtggagaagatccaggccctgcaggccagcgaggtgcagagcaagagaaaggaggccacctgccccagacaccaggagatgttccactacttctgcgaggacgacggcaagttcctgtgcttcgtgtgcagagagagcaaggaccacaagagccacaacgtgagcctgatcgaggaggccgcccagaactaccagggccagatccaggagcagatccaggtgctgcagcagaaggagaaggagaccgtgcaggtgaaggcccagggcgtgcacagagtggacgtgttcaccgaccaggtggagcacgagaagcagagaatcctgaccgagttcgagctgctgcaccaggtgctggaggaggagaagaacttcctgctgagcagaatctactggctgggccacgagggcaccgaggccggcaagcactacgtggccagcaccgagccccagctgaacgacctgaagaagctgatcgacagcctgaagaccaagcagaacatgccccccagacagctgctggagcccgcccagccccacctgcccagaagcgaggagttccagttcctgaaccccacccccgtgcccctggagctggagaagaagctgagcgaggccaagagcagacacgacagcatcaccggcagcctgaagaagttcaaggaccagctgcaggccgacagaaagaaggacgagaacagattcttcaagagcatgaacaagaacgacatgaagagctggggcctgctgcagaagaacaaccacaagatgaacaagaccagcgagcccggcagcagcagcgccggcggcagaaccaccagcggcccccccaaccaccacagcagcgcccccagccacagcctgttcagagccagcagcgccggcaaggtgaccttccccgtgtgcctgctggccagctacgacgagatcagcggccagggcgccagcagccaggacaccaagaccttcgacgtggccctgagcgaggagctgcacgccgccctgagcgagtggctgaccgccatcagagcctggttctgcaaggtgcccagcagctag

SEQ ID NO: 169824 - DNA, 1278 bp, Artificial Sequence
  derived and/or modified sequence
atggccagcggccagttcgtgaacaagctgcaggaggaggtgatctgccccatctgcctggacatcctgcagaagcccgtgaccatcgactgcggccacaacttctgcctgaagtgcatcacccagatcggcgagaccagctgcggcttcttcaagtgccccctgtgcaagaccagcgtgagaaagaacgccatcagattcaacagcctgctgagaaacctggtggagaagatccaggccctgcaggccagcgaggtgcagagcaagagaaaggaggccacctgccccagacaccaggagatgttccactacttctgcgaggacgacggcaagttcctgtgcttcgtgtgctgcgagagcaaggaccacaagagccacaacgtgagcctgatcgaggaggccgcccagaactaccagggccagatccaggagcagatccaggtgctgcagcagaaggagaaggagaccgtgcaggtgaaggcccagggcgtgcacagagtggacgtgttcaccgaccaggtggagcacgagaagcagagaatcctgaccgagttcgagctgctgcaccaggtgctggaggaggagaagaacttcctgctgagcagaatctactggctgggccacgagggcaccgaggccggcaagcactacgtggccagcaccgagccccagctgaacgacctgaagaagctggtggacagcctgaagaccaagcagaacatgccccccagacagctgctggagcccgcccagccccacctgcccagaagcgaggagttccagttcctgaaccccacccccgtgcccctggagctggagaagaagctgagcgaggccaagagcagacacgacagcatcaccggcagcctgaagaagttcaaggaccagctgcaggccgacagaaagaaggacgagaacagattcttcaagagcatgaacaagaacgacatgaagagctggggcctgctgcagaagaacaaccacaagatgaacaagaccagcgagcccggcagcagcagcgccggcggcagaaccaccagcggcccccccaaccaccacagcagcgcccccagccacagcctgttcagagccagcagcgccggcaaggtgaccttccccgtgtgcctgctggccagctacgacgagatcagcggccagggcgccagcagccaggacaccaagaccttcgacgtggccctgagcgaggagctgcacgccgccctgagcgagtggctgaccgccatcagagcctggttctgcgaggtgcccagcagctag

SEQ ID NO: 169825 - DNA, 1278 bp, Artificial Sequence
  derived and/or modified sequence
atggccagcggccagttcgtgaacaagctgcaggaggaggtgatctgccccatctgcctggacatcctgcagaagcccgtgaccatcgactgcggccacaacttctgcctgaagtgcatcacccagatcggcgagaccagctgcggcttcttcaagtgccccctgtgcaagaccagcgtgagaaagaacgccatcagattcaacagcctgctgagaaacctggtggagaagatccaggccctgcaggccagcgaggtgcagagcaagagaaaggaggccacctgccccagacaccaggagatgttccactacttctgcgaggacgacggcaagttcctgtgcttcgtgtgcagagagagcaaggaccacaagagccacaacgtgagcctgatcgaggaggccgcccagaactaccagggccagatccaggagcagatccaggtgctgcagcagaaggagaaggagaccgtgcaggtgaaggcccagggcgtgcacagagtggacgtgttcaccgaccaggtggagcacgagaagcagagaatcctgaccgagttcgagctgctgcaccaggtgctggaggaggagaagaacttcctgctgagcagaatctactggctgggccacgagggcaccgaggccggcaagcactacgtggccagcaccgagccccagctgaacgacctgaagaagctggtggacagcctgaagaccaagcagaacatgccccccagacagctgctggagcccgcccagccccacctgcccagaagcgaggagttccagttcctgaaccccacccccgtgcccctggagctggagaagaagctgagcgaggccaagagcagacacgacagcatcaccggcagcctgaagaagttcaaggaccagctgcaggccgacagaaagaaggacgagaacagattcttcaagagcatgaacaagaacgacatgaagagctggggcctgctgcagaagaacaaccacaagatgaacaagaccagcgagcccggcagcagcagcgccggcggcagaaccaccagcggcccccccaaccaccacagcagcgcccccagccacagcctgttcagagccagcagcgccggcaaggtgaccttccccgtgtgcctgctggccagctacgacgagatcagcggccagggcgccagcagccaggacaccaagaccttcgacgtggccctgagcgaggagctgcacgccgccctgagcgagtggctgaccgccatcagagcctggttctgcaaggtgcccagcagctag

SEQ ID NO: 169826 - DNA, 1278 bp, Artificial Sequence
  derived and/or modified sequence
atggcctctggccagttcgtcaacaagcttcaggaagaagtgatatgccccatatgtctagatattctgcagaaacctgtcacaatcgattgtggacacaacttctgcttgaagtgcatcacccaaataggagaaacttcatgcggattcttcaagtgccccttatgcaaaaccagtgtgaggaaaaacgctatccggtttaattccctgttgcggaatcttgtggaaaagatccaagccttgcaggcatctgaagtgcagtccaaacggaaggaggccacgtgtcctagacaccaagagatgtttcattacttttgcgaagatgatggaaaattcctctgttttgtgtgctgcgaatccaaggatcataagtcccacaacgttagcctcattgaagaggctgcccagaattaccaggggcagatccaggagcagattcaggtactgcagcaaaaggaaaaagaaacggtacaggtgaaagcccaaggcgtccacagggtggatgtgtttacagaccaggtcgagcatgagaaacagcggattctgaccgagttcgagttactgcatcaagtgctcgaagaggaaaaaaattttctgctgagcaggatctactggctaggtcatgaaggcactgaggccgggaaacactacgtggcctctactgagccccagctgaatgaccttaagaagctagtggattccttaaaaaccaagcagaacatgccacccagacagcttcttgaggatatcaaagtggtcctgtgcagaagcgaggaattccagttcctgaatcccacccccgtcccgcttgaactcgaaaagaaactgtcggaggctaagtctcgccatgattctattacaggctcactaaaaaagtttaaagatcagttacaagcggaccgtaagaaggacgagaatcgcttttttaagagcatgaataaaaacgacatgaagtcctggggcctgctccagaaaaataatcacaaaatgaacaaaacctcagagcctgggtcctcttccgctggcggccggaccacatcaggtccccctaaccaccacagtagcgcaccttctcactctctgttccgggccagcagcgctggaaaagtcacattccctgtttgtctgctcgccagctatgacgaaatctcaggccagggggccagtagtcaggatacgaagacattcgacgtagctctgagtgaggaacttcatgctgcgttgagtgagtggctcacggcaatacgcgcctggttttgtgaggtgcccagttcatag

SEQ ID NO: 169827 - DNA, 1278 bp, Artificial Sequence
  derived and/or modified sequence
atggcctcgggacaatttgttaataagttgcaggaagaggtgatctgccccatttgcttggatattctgcagaaaccagtcacaattgattgtggccacaacttttgcctgaagtgcatcacccagatcggcgagacctcttgcggatttttcaaatgcccactctgcaagaccagcgtgagaaagaatgcaatccggtttaacagtctgctgaggaatttggtggagaaaatccaggccttacaggctagcgaggtgcagtctaaacgcaaggaagccacgtgtccaagacaccaggaaatgtttcattacttctgtgaggacgacggaaaattcctgtgcttcgtgtgtcgggaatcgaaggatcataagtcccacaacgtaagcctcatagaggaagcggctcagaactaccagggacagattcaggagcaaatccaggttttacagcaaaaagagaaggagacagtccaggttaaggcccagggggttcacagagtcgacgtcttcactgaccaggttgagcacgaaaaacagagaatattgacagagtttgagctgctacatcaggtacttgaggaagaaaagaactttcttctaagtaggatttattggctgggccacgaaggaactgaagctggcaagcactatgttgcgagcaccgagccacagttgaacgatctcaagaagctcgtggactcactgaaaaccaaacagaatatgcctccacgtcagctgctggaaccagcccagcctcacctcccccgctcagaggagttccagtttctcaacccaacgccggttcccctagagttggagaagaagttatcagaggcaaagagccggcatgactccattacaggaagcttaaagaaattcaaggatcagcttcaggccgatcgcaagaaggatgagaaccgatttttcaagtccatgaataaaaacgacatgaaaagctggggcttgttgcaaaagaataaccacaaaatgaacaagacgtctgagccaggatcgtcgagtgcaggcggaagaacaacatccgggcctccgaatcaccactcaagtgccccaagccattccctgttcagagcttcctctgccggaaaggttacgtttcctgtttgtctcctagctagttacgacgaaatcagcggacaaggggcctcttctcaggacaccaaaacgtttgatgtggccctttcagaagagctccacgcggccctgtcagagtggctgactgcaattagggcctggttctgcgaggtccccagttcttag

SEQ ID NO: 169828 - DNA, 1278 bp, Artificial Sequence
  derived and/or modified sequence
atggcatctggccagtttgtaaataaactccaggaggaagtgatatgcccgatatgcctcgatatacttcagaagcccgttacgattgactgcgggcacaatttttgcctcaaatgcattacacaaatcggggagacatcctgtggattcttcaagtgccccttatgtaagacaagcgtaagaaagaacgctatccgtttcaatagtctattacggaacctggtggagaagatccaggctctccaagcttccgaagtgcagagcaagagaaaggaggccacatgccccagacaccaggaaatgttccactacttttgtgaggacgacggcaagttcctgtgcttcgtctgcagggaaagcaaggaccacaaatcccacaatgtcagcctgattgaagaagctgctcagaactatcaagggcagatccaggaacagattcaggtactgcagcaaaaggagaaggaaactgtacaagtcaaagcacagggggtgcacagagtggacgtgtttacagaccaggttgagcacgaaaaacagcgcatactgactgagtttgagttgcttcatcaagtcctcgaggaagagaaaaactttctgctgtctcgcatttattggctgggacatgagggcacagaagctggaaaacactacgtcgccagcactgagcctcagctgaacgacctgaaaaagctggttgactccctgaagactaagcagaacatgccccctagacagctgctcgaggacattaaggtggtcctttgcagatctgaggagtttcagttcctgaaccctacccccgtgcccctcgaactagaaaagaaactatccgaggccaagagcagacatgactcaatcacaggctccctcaagaaatttaaggaccaactgcaggccgaccggaaaaaagacgaaaaccgtttctttaaaagcatgaataaaaacgatatgaagtcttgggggctgttacaaaagaataatcacaagatgaacaaaacctcagaacccggcagctcgtccgcaggcggccgaactacctcagggccaccgaatcaccattcctctgctccatcgcattccctctttcgggcatctagcgccggaaaagtgacttttccagtgtgtctccttgcctcttatgacgagatatcggggcagggggcctctagccaggatactaaaaccttcgacgtggctttgagcgaagagctgcacgcagcactgtccgaatggctgacagccatcagggcctggttctgcgaggtgccctcctcttag

SEQ ID NO: 169829 - DNA, 1278 bp, Artificial Sequence
  derived and/or modified sequence
atggcctccgggcaatttgtcaacaagcttcaggaggaggtcatttgcccaatttgtctcgacattctgcagaaacccgtgacaattgactgtggacataacttttgccttaagtgtataacccagattggcgagacctcctgcggcttctttaagtgcccattgtgcaagacttcagtgcggaaaaatgctatacggttcaattctctgttgcgcaacctggtggaaaagatccaggctctccaagccagtgaagttcaatccaagcggaaggaggcaacctgcccccggcatcaggagatgtttcattacttttgtgaggacgacgggaaattcttatgtttcgtgtgtcgcgaatcaaaagaccacaagtctcacaacgtctcgctgattgaagaagcagcccaaaattatcagggccagatccaggagcagatccaggtactgcaacagaaggaaaaagagactgtacaggtgaaagcacagggggtgcatcgagttgacgtcttcacagatcaagtcgagcatgagaagcagaggatcctgaccgaattcgagctgttgcatcaagtcctggaagaggagaagaatttcttactaagccgcatctactggcttggacatgaggggactgaggcgggaaaacattacgtggcaagcaccgaacctcagttaaacgatttaaaaaaactggtggattctctcaaaaccaaacaaaatatgcccccaagacagctgctggaggacataaaagtggtgctttgtcgatctgaggagttccagtttctaaacccaacccctgtaccccttgagcttgagaagaaactgtctgaggctaaatcccggcatgatagcatcacggggagccttaagaagtttaaggaccaactgcaggccgacaggaagaaggatgaaaacaggtttttcaagtctatgaataaaaatgatatgaagagctggggcttactccagaagaacaaccacaagatgaataagaccagcgagcccggatcgagttccgcgggcggacgaaccacaagtggacctccaaaccaccacagttctgcacccagtcattctctcttccgggcaagcagcgcaggaaaagtgacatttccagtttgcctccttgcctcgtatgatgagatatcaggtcagggggcgtcctctcaggacacaaagaccttcgacgtggcactgagtgaagagctccacgccgctttgagcgagtggctaactgccatccgggcctggttctgcaaggttccctcgtcctag

SEQ ID NO: 169830 - DNA, 1278 bp, Artificial Sequence
  derived and/or modified sequence
atggcatcaggccaatttgtgaataaactgcaggaggaggtaatatgccctatttgtctagatatactgcagaaacccgtcacaatcgattgtggccacaatttctgcctgaaatgtattacacagattggggaaacatcctgcggcttctttaaatgtccactctgtaaaactagtgtgaggaaaaacgcgattcgatttaactcgctcctgaggaatttagtggaaaagatccaggcactgcaggcaagcgaggtccaatctaagaggaaggaggccacctgtccgaggcaccaagaaatgtttcattacttttgcgaagacgacggtaaatttctttgctttgtgtgtcgggagtctaaagatcacaagagccataacgtgtctctgatcgaagaagctgcccagaactatcagggtcagatccaggaacagatacaagtcctacagcagaaagagaaggagaccgtgcaggtgaaggcccagggcgtgcaccgcgtagatgtctttactgaccaggtggaacatgagaaacagcggattcttactgaattcgaattgctgcaccaggtccttgaggaggagaaaaatttcctgctatcccgaatctactggctgggccacgagggcaccgaagcgggcaagcactatgtggctagcacggagccacagctaaacgatcttaaaaagctggtggattccctgaagacaaagcaaaacatgcctccacggcaattgcttgaggatatcaaggtagtgctgtgcaggtcagaagaattccaatttctaaacccaacgcctgtcccactggagctggaaaagaagctgagtgaagcaaaatctcggcacgattctataaccggttctttgaagaagtttaaagatcagctgcaagcagaccgcaagaaagacgagaatcgttttttcaagagcatgaacaagaatgacatgaagagctgggggctgcttcagaagaacaatcacaaaatgaataaaacctccgagccaggcagttcatccgccggaggcaggaccacgtcaggaccgccaaatcaccattcttctgcgccatcccactcgctgttccgggcctcttcagctggcaaagtgaccttccccgtgtgtctactggccagttatgacgaaatctcaggacaaggagcgtcgtcccaagacaccaaaacctttgatgtcgccctatccgaagagctgcacgctgcactcagtgaatggctgacggcaatacgagcttggttttgtgaagtcccctcttcttag

SEQ ID NO: 169831 - DNA, 1278 bp, Artificial Sequence
  derived and/or modified sequence
atggctagtggccaatttgttaataagctccaggaagaagtgatctgtcctatttgtcttgatatccttcaaaaacctgtcacaatcgactgtggtcacaacttttgccttaagtgtataactcagatcggcgaaacctcatgcgggttcttcaagtgccctctgtgcaaaacgtctgtacgcaaaaacgctatccggttcaacagcttactgagaaatcttgtggagaagattcaggcgctacaggcatccgaagttcagtctaaacgtaaggaggcaacatgccctcggcaccaggagatgttccactacttctgtgaagacgacggaaagttcctgtgtttcgtatgcagagagagtaaggaccacaaaagccacaacgtcagcctcatcgaggaggctgcccagaactatcagggccagatccaggagcaaatccaagttttacaacaaaaggagaaggagacagtccaggtgaaagctcagggggtccacagagttgacgttttcaccgaccaggttgagcatgaaaaacagagaatccttactgaattcgagttactccaccaagtgctggaagaggaaaaaaactttctgctctctagaatatactggttaggacacgaggggaccgaagctgggaagcactacgtggcgtccaccgaaccccagctaaacgacttaaaaaagctggtagacagcctcaaaacaaagcagaatatgccaccccggcaactcctcgaggacataaaagtcgtgctgtgtaggagcgaggaattccagtttcttaaccccactccagttcctttggaactggagaagaagctttccgaagctaaatcgcggcatgattctatcactggctctctaaaaaagtttaaggatcagctgcaggccgatcgaaaaaaagatgagaatcgctttttcaagtcaatgaacaaaaatgacatgaaaagttggggactcttgcaaaagaataatcacaagatgaacaagacaagcgagccaggatctagtagcgctggggggcgaaccacgtccggaccaccaaatcaccacagctccgctccatcccattccctcttcagggcctcttccgctggcaaagttaccttccccgtttgtttgcttgcctcttacgatgagatatctgggcaaggagcatctagccaagataccaaaaccttcgatgtggctttgtcagaggagctgcatgctgccctgtcggaatggttaacagccatacgcgcctggttctgcgaagtgccatcctcctag

SEQ ID NO: 169832 - DNA, 1278 bp, Artificial Sequence
  derived and/or modified sequence
atggcctctggacagtttgtgaacaagctgcaggaagaagtgatctgcccaatctgcctggatattctgcagaaacccgtgacaattgactgtggacacaatttctgccttaagtgcatcactcagatcggggaaacaagttgcggattttttaaatgcccattatgcaagacatctgtgcggaaaaacgctatccgattcaacagcctgttgagaaatcttgtcgagaaaatacaggctttgcaggcctcagaggtgcagtctaagcggaaagaggccacttgccccaggcaccaggagatgttccattacttttgtgaggacgacggaaaattcctttgcttcgtgtgccgcgagtcaaaggaccacaagagtcacaacgtgtctctgatcgaagaagctgcacagaattaccagggccagatccaggaacagatccaggttctccagcaaaaggaaaaggaaacggtccaggtgaaggcacagggggtgcaccgagtggatgtttttaccgaccaagttgagcacgaaaagcagaggatcctgacagaatttgagctgctacatcaggtgttagaggaagagaagaacttcctgctctctagaatctactggttagggcatgagggtactgaggcggggaagcattatgtggccagtactgaaccgcagctgaacgatctgaaaaagttagtggactccctcaaaaccaaacagaacatgccccctcgtcaactgctcgaagatatcaaggtggtactgtgcaggtccgaggaattccagtttctgaaccctactcccgtgcccctggagctggagaagaagctgtccgaggccaaaagccgccatgacagtattacaggatccctcaaaaagtttaaggatcaactgcaggcggatcgaaaaaaggatgagaaccgcttcttcaaaagtatgaataaaaatgatatgaagagttggggtctgctccagaaaaacaatcacaagatgaacaagacctcagagccaggcagcagctccgctggtggcagaactacatccggcccaccaaatcaccattcatccgcccccagtcactcattgtttagagcctcttccgccgggaaggtaacattcccggtgtgtctgttggcttcgtacgatgagatctctggacaaggtgcctccagtcaggataccaagacattcgatgtcgccctttcagaagagctccacgccgctctcagcgagtggctgaccgccatacgggcctggttttgcgaggtccccagctcttag

SEQ ID NO: 169833 - DNA, 1278 bp, Artificial Sequence
  derived and/or modified sequence
atggccagtggccaatttgttaataaactgcaagaagaagtgatttgccctatctgcctggatatcctccagaaacctgtgacaatcgattgtggccacaacttttgcctcaagtgtattacgcagatcggggaaacctcctgtggtttttttaagtgcccattgtgtaaaacgtctgtgcgcaagaacgcgatccgctttaactctctcctccgcaacttagtcgagaagattcaggcactgcaggcctccgaggtgcagagcaagcgcaaggaggccacctgcccaagacatcaggagatgttccactacttctgtgaggacgatggcaaattcctttgtttcgtgtgtcgtgagtcaaaggaccataaatcgcataacgtgtccctgatcgaggaagcggctcagaactaccaaggacagatacaagaacagattcaagtgctccagcagaaagagaaagagaccgtccaggtgaaagctcagggagtacacagggtcgacgtgtttacagaccaggtggaacatgagaaacaacgaattttgacagaatttgagcttctacatcaggtgttggaagaggaaaagaacttccttctctctcgcatctactggctcgggcacgagggaacagaggctggtaagcattacgtggcatcgaccgaaccccagctcaacgacttgaagaaactgatcgattcactgaaaacaaaacagaacatgccccctcggcagcttctggaagatatcaaggtggtgctttgccgaagcgaagaatttcagtttctgaatcctactccggtgccactcgagctggaaaagaagctgtctgaagcgaagtcccgccacgactcaataaccggctccctgaaaaagttcaaggaccagctccaggctgatcgcaaaaaagatgaaaaccgctttttcaaatcgatgaacaagaatgatatgaaaagctggggcctccttcagaaaaataaccataagatgaacaagacctccgagcccggcagttctagcgccggcggtcgaaccactagtggcccacctaaccaccactcttccgccccttctcacagcctgtttcgcgcctccagcgccgggaaagtgactttccccgtctgcttgctggcaagctacgacgagatcagcggccaaggcgccagctctcaggacaccaagacctttgatgtcgccctatccgaagagctgcacgccgctcttagcgagtggctcacagcaatccgagcttggttttgtaaggttcctagttcctag

SEQ ID NO: 169834 - DNA, 1278 bp, Artificial Sequence
  derived and/or modified sequence
atggcgtctggtcagttcgtgaataaacttcaggaagaagtgatctgtccaatctgccttgacatccttcagaaacctgtgaccattgattgcgggcacaacttctgcctgaaatgtatcacgcaaatcggggaaactagttgtgggttctttaaatgccccctgtgcaaaacaagcgtacgcaaaaacgcgatccgcttcaatagcctgctgcggaatctggtggaaaagattcaagccctgcaagcctcagaggtccagtctaagcgcaaagaggccacctgtccacggcaccaggaaatgtttcattacttctgcgaagatgatggaaaattcctgtgcttcgtgtgcagggagagtaaggaccataagtcacataacgtatcactgattgaggaagccgctcagaactatcagggccagatccaggagcagatacaggtattacagcagaaggagaaggaaacggttcaggttaaggcccagggggtgcaccgggtggacgtttttacagaccaggtcgaacacgaaaaacagcgaatcctgacagagttcgagcttctccaccaagtcctcgaggaagagaaaaattttttactctcgcgtatttattggttaggccacgaagggactgaagctggcaaacactacgtcgcctccaccgaaccccaactgaatgatcttaagaagctcgtggatagcctcaaaacaaaacaaaatatgcctccaagacagctcctggaagatatcaaagtagtgctttgcagaagcgaagaattccagttcctcaaccccacgcccgttccactggaactggagaagaagctgtccgaagcgaaatctcgccacgattcaataactggcagcctgaaaaagttcaaggatcagctgcaggccgatagaaaaaaagatgagaatcgcttcttcaaaagcatgaataaaaatgatatgaaatcatgggggctccttcagaagaataaccataagatgaataaaacctccgagccaggctcttcctccgccggggggagaaccaccagtgggccccctaaccaccacagcagcgcgccgagccatagtcttttccgggcctctagtgctggcaaggtaactttccctgtctgtctgctggcatcctacgacgaaatatctggtcagggcgcatcaagtcaggatacgaagacctttgacgtggccctgagcgaagagttgcacgcagcactgagcgagtggctgaccgccatccgggcttggttttgtgaagtgccatcttcttag

SEQ ID NO: 169835 - DNA, 1278 bp, Artificial Sequence
  derived and/or modified sequence
atggcctctggtcaattcgtgaataaactgcaggaagaagtgatctgtccgatatgcctggacatcctgcaaaagcccgtgactatcgactgtggacataatttctgtttaaagtgtatcacccagattggcgagacatcatgcggcttctttaagtgccctctatgtaaaaccagcgtgagaaagaacgctatccgttttaacagcttattacgtaacttggttgagaaaatacaggcacttcaagccagcgaagtgcagagtaagcgaaaggaggcaacttgtcctagacatcaagagatgttccactacttctgcgaggacgacggcaagttcctgtgcttcgtctgccgcgagagcaaggatcataagtcccacaacgtctcactgattgaggaggccgcacagaactatcaaggacaaatccaggagcagatccaagtgcttcagcagaaggaaaaagaaactgtgcaggttaaagcccagggggttcaccgtgtggatgtcttcaccgatcaagtggagcatgaaaaacaaagaattctgaccgagtttgaactccttcatcaggtgttggaagaggaaaaaaactttttgctgtcgaggatttactggttgggacacgaaggtaccgaggccggcaaacactatgtagcgagcacggagccacagttaaacgatctcaagaagctggtcgatagcctcaaaacaaaacagaatatgcctcccaggcaactcctggagcccgctcagccccacctgccacgcagcgaggagtttcagtttctcaatcctacacccgtgccactggagctcgaaaaaaagctcagcgaagcaaagtcaagacacgactctattactgggtctctgaaaaaatttaaggaccaactgcaggccgaccgtaaaaaggacgaaaaccgattctttaagtccatgaataagaacgacatgaagtcctggggcttactacaaaaaaataatcacaagatgaataagacatccgaacccgggtctagttcagccggcggcaggactaccagcgggccgcccaatcaccacagcagcgccccctcccactccctctttcgggctagctcagccggtaaggtgacgttccctgtttgcctgctggcatcttatgatgagatctccgggcagggggcctctagtcaggataccaagacatttgatgtggccctgagtgaggaactgcacgctgccctctctgaatggctgactgccatacgtgcttggttttgtgaggtccccagcagctag

SEQ ID NO: 169836 - DNA, 1278 bp, Artificial Sequence
  derived and/or modified sequence
atggcctctgggcaatttgtaaataagcttcaggaggaagtcatctgccctatttgcctagatattttacagaaacccgtgacaattgattgcggtcacaatttctgcttgaagtgtattacacagataggcgagacttcttgtgggttcttcaagtgccctctctgcaagactagcgtcaggaaaaacgccattagatttaatagtttgctgagaaacttagtggaaaaaatccaagccctgcaagcaagcgaggtgcaaagtaaacgcaaagaagctacttgtccccgtcaccaggaaatgtttcactacttctgtgaagacgatggtaagtttctttgttttgtttgtagggagagcaaggaccataaaagccataatgtgagtttaatcgaggaagccgcgcaaaattatcagggacagattcaggaacagatccaggtgcttcagcagaaggaaaaggaaaccgtgcaggtcaaagcacagggagtacacagggtcgatgtcttcaccgatcaagttgagcacgagaagcagaggattctgaccgagttcgaacttctacatcaggtgcttgaggaggaaaaaaacttcctgctctccaggatttactggctgggccatgaaggtacagaggcgggcaagcattacgtggcttcaaccgagccccagctcaacgatcttaaaaagcttgtggatagcttgaagacgaagcagaacatgcctcctaggcaactcctcgaagacattaaggtggtcttgtgccggagcgaggagtttcagttcctgaatccgacccctgtgccactagagttggaaaaaaagcttagtgaagcaaaatctagacatgacagcatcaccggctccctaaagaaattcaaggatcagctccaggcagatcggaagaaagacgagaacagattctttaagagtatgaacaaaaacgatatgaagtcctggggcctcttacaaaagaataatcacaaaatgaacaagacatccgagccgggctccagttccgcgggcggccggaccacgtcggggccaccaaaccaccatagtagcgcacccagccattcactgtttagggcttcttccgcaggaaaggtgaccttccctgtctgcctactggcctcatacgatgaaattagtggccagggcgcaagttcccaggacacgaagaccttcgacgtagccttgtccgaagagctccatgcagcactatcagaatggctgactgctataagagcatggttttgtaaagttccatcctcctag

SEQ ID NO: 169837 - DNA, 1278 bp, Artificial Sequence
  derived and/or modified sequence
atggcctctgggcagtttgtgaataagctacaggaagaagtgatctgtcctatttgtctggacatcctccagaaacctgtcaccatcgattgtggccataatttttgccttaaatgtataacgcagatcggagaaacttcatgcggcttcttcaaatgtccactttgcaaaacctcagtgcggaagaatgctattcggttcaactcactgctgagaaatctcgtggaaaaaattcaagccctgcaagcctccgaggtgcaatcaaagaggaaagaagccacctgcccacgccatcaggagatgtttcactacttctgtgaggacgacgggaagtttctgtgtttcgtctgtcgcgagagtaaagaccataaatctcataatgtttctcttattgaggaggcagcccagaattaccagggccagattcaggagcagatacaagtcttgcagcagaaggaaaaggaaaccgtgcaggttaaggcgcagggagtccaccgcgtggacgtgtttacggaccaggtggaacatgaaaaacagcgcattttaaccgaattcgagctgcttcaccaggttttggaggaagagaagaatttcttattgagtcgaatctactggcttggacatgagggaacagaggctggcaagcactatgtggcctcaactgaaccgcaactgaatgatcttaaaaagctggtagacagcctgaagacgaagcagaacatgccgccacgtcagctcctggaaccggcacagccccatcttcccagatcagaggagttccagttccttaacccgacaccggtccccctcgagctggaaaagaagctgtccgaagccaagagcaggcacgatagcataactggcagtctgaaaaaattcaaagatcagctccaggcggatcgcaagaaggatgagaacagattcttcaaatcaatgaataaaaacgacatgaaatcctgggggcttctccagaagaacaaccacaagatgaataagacgagcgaacccggaagtagcagcgctgggggcagaacaactagcggcccccctaaccaccacagtagcgccccttcccactctctttttcgcgcttcttctgcggggaaagttaccttccccgtgtgcctgttagcctcttatgacgagattagtggccagggagctagcagtcaagatactaagactttcgacgtggccctgtccgaggaattgcacgccgctttatctgagtggctgaccgccatccgcgcatggttctgcgaagttcccagttcatag

SEQ ID NO: 169838 - DNA, 1278 bp, Artificial Sequence
  derived and/or modified sequence
atggcgagcggccaatttgtgaacaaactgcaggaagaagttatctgtccaatttgcctggatatcctgcagaaacctgtcacaattgattgtggacacaacttttgtcttaagtgtattacacagattggggagacttcctgtggcttttttaagtgcccactttgcaagacctcggtcagaaaaaacgctataagattcaactcgttgctccggaatctcgttgagaaaattcaggccctgcaggcaagcgaggttcaaagcaagcggaaggaggcaacgtgcccgcggcaccaggaaatgttccattatttctgcgaagatgatggaaagtttctttgctttgtgtgcagagagtcgaaagaccacaaatcccacaatgtgtccttgatagaagaggctgcgcaaaactaccaggggcaaatacaagaacagatccaggtgttgcaacagaaggagaaagaaactgtgcaggtgaaagctcaaggagtccaccgcgtggatgtgttcactgatcaggtcgagcatgaaaaacaacggatcttgaccgagttcgagctgttacaccaggtccttgaagaagaaaaaaacttcttactatctcgaatttattggctgggacacgagggtaccgaagctggcaagcattacgtcgcaagcaccgagccacagctcaatgatctaaaaaaattgatcgattccctgaagaccaagcaaaatatgccaccacgacaactcttggaacccgcccagcctcacctgcctagatctgaggagttccaatttttgaacccaacacccgttcccctggagctggaaaaaaagctatcagaggccaaatctcgccacgactccatcaccggctcgctgaaaaagttcaaagatcagttgcaggcagaccgcaaaaaggacgagaaccgcttcttcaagtctatgaacaagaacgatatgaagtcctggggattgttgcaaaaaaataaccataagatgaataagacctcggagccaggctcgtcaagcgccggaggtcggacaacgagcgggcctccgaatcatcactcgagtgccccatctcactccctatttagggcctcctccgccgggaaagttaccttccccgtttgtctgctggcttcgtacgacgaaattagcggccagggggccagcagccaagataccaagaccttcgatgtggctctatcagaggaattgcatgccgccctgagcgaatggctgacagcaatccgggcttggttttgcaaggtcccaagcagctag

SEQ ID NO: 169839 - DNA, 1278 bp, Artificial Sequence
  derived and/or modified sequence
atggcatccggccagttcgtcaacaagctgcaagaagaggtgatttgtcccatctgcctcgatattctgcaaaagcctgttacaatcgactgcggacacaatttttgtctaaagtgtatcactcaaatcggcgagacaagttgcgggttctttaagtgccccctctgtaagacctccgtgagaaagaacgctatccgctttaacagcctccttcgtaacctggtggagaaaatccaggcactccaggcgagcgaggttcagagcaagaggaaagaggccacctgcccccgtcaccaggagatgttccattatttttgtgaggatgacggcaaatttctatgcttcgtatgctgtgagtccaaagaccataaaagtcataacgtgtccttaatcgaagaggccgcccagaactatcaaggccagattcaggagcagattcaggtactgcagcaaaaggaaaaagaaaccgtccaagtcaaggcacagggggtgcatcgggttgatgtgttcaccgaccaggtcgaacacgagaagcaacgcattctgaccgaattcgagctcctgcaccaggtgctggaggaagagaaaaatttcttgttgtcccgtatttactggctcggccacgaaggaacagaagcaggtaagcactacgtggcgtccacggagccacaactcaacgacctcaagaagcttgtggacagcctgaaaacgaagcagaacatgccccctcgacagctgctagaacccgcacagcctcatctcccgagatccgaggagtttcagtttctcaacccaactccagtgcctttggagctggagaaaaagctgtcagaggctaagtccagacacgacagcatcacggggtccctgaaaaagtttaaagatcagcttcaggctgacagaaaaaaggacgagaatagatttttcaagagcatgaataagaacgatatgaagtcatggggcttgctgcagaaaaacaatcacaagatgaacaaaaccagcgaaccaggcagctcctccgctggagggagaactactagtggacctccgaatcatcactccagtgcgccgtcccacagcctgttcagggcttctagtgcgggcaaggtgacattcccggtgtgtctgcttgcctcatacgacgaaatttctgggcagggcgcatctagccaggatactaaaaccttcgatgtggctctctccgaggaactccacgccgctcttagtgagtggctaaccgcgatcagggcctggttttgtgaagtgcccagttcctag

SEQ ID NO: 169840 - DNA, 1278 bp, Artificial Sequence
  derived and/or modified sequence
atggcgagtggccagtttgtcaataagctgcaggaagaggtgatctgcccaatctgcttagatattctgcagaaacccgtgacaatcgactgcggacacaatttctgccttaagtgcattacacagattggtgagacctcttgcggcttctttaaatgccctctctgcaaaacttccgtgagaaaaaatgccataagattcaactccctgttgaggaacttagtggaaaaaatacaggctttgcaagcctcagaggtgcagtcaaagagaaaagaagcgacatgtccaagacaccaggaaatgttccattatttttgtgaggacgatggcaagtttctgtgttttgtgtgtagagaatccaaagaccacaaatctcacaacgtgtcgctcattgaggaagctgcccagaattatcagggacagattcaggagcaaatacaggtgttacagcagaaggagaaagagactgtacaggtgaaagctcagggggtgcacagggtcgacgttttcaccgatcaggtcgaacatgagaagcagagaatccttacagagttcgagctgctgcatcaggtcttagaagaagagaagaacttcctgctatcacgtatttattggctgggtcacgaggggaccgaggctggaaagcattacgttgctagtactgagccacagttaaacgacctgaagaagttagttgactctctcaaaaccaaacagaacatgcctcctagacagttgctagaggatatcaaggtagttctgtgcagaagcgaggagtttcagttcttgaaccctactcctgtgccgctcgaattagagaagaagctctctgaagctaagtcgaggcacgactcgatcactggcagcttaaagaaattcaaagaccaactacaagccgataggaaaaaggatgagaatagatttttcaaaagtatgaacaaaaatgatatgaagagttggggcctgctacagaaaaataatcataagatgaacaagacttccgaacccggttctagtagcgctggaggcagaaccacctccggtccccccaatcaccacagcagtgcaccgtctcattcattgtttagggcctctagcgccgggaaagtgactttcccagtctgcttgttagcttcttatgacgaaatatcaggtcagggagccagctcccaagatacgaaaaccttcgacgtggccctgagcgaggagttacatgctgccctgtccgagtggctcacagccatccgcgcctggttctgcgaagtgccctcctcatag

SEQ ID NO: 169841 - DNA, 1278 bp, Artificial Sequence
  derived and/or modified sequence
atggcgtctggacaattcgtgaacaagctccaggaagaggttatttgtcctatttgcttagatatcctgcaaaagccggtgactattgactgcggtcataatttttgtcttaaatgcataacccagataggggaaacttcctgcggattcttcaagtgcccactgtgcaagacctctgtgcgcaagaatgccattcggtttaacagcctgttacgaaatctagtggaaaagattcaggcgctgcaggccagcgaggtgcagtcaaaacgaaaggaggccacctgccccagacaccaggaaatgttccattatttttgtgaagatgatggaaagttcctttgctttgtgtgccgggaaagcaaagatcacaagtctcataatgtctctctgattgaggaggccgcccagaactaccaaggccagattcaggaacagatacaggttttacaacagaaagagaaggagactgtgcaggtgaaagcccagggagtgcatcgagtggatgtgttcaccgaccaagttgagcacgagaagcagcggatcctgacagagttcgagctgctgcatcaggtgttggaggaggagaagaattttctgctcagcaggatctactggcttggacacgagggtactgaggccggtaagcactatgtcgccagcacagaacctcagctgaacgatctcaagaaactggtggactcgctgaagacgaaacaaaacatgcctccaagacagctgctggagcccgctcagccccaccttccacggtctgaggaatttcagttcctgaaccctacgccagttccacttgagctggagaaaaaattgtcagaagcaaaaagccgtcacgattctattaccggaagcctaaaaaaattcaaagaccagcttcaggctgatagaaaaaaagatgagaaccgatttttcaaatcaatgaacaagaacgacatgaaatcatggggactgcttcaaaaaaataaccacaaaatgaacaagacatccgagccagggtctagctccgctggaggcaggaccacctctgggcctcctaatcaccatagctcggccccttctcacagccttttccgggcaagcagcgcaggaaaggtgaccttccccgtttgcttgctagcgtcttatgacgagatcagcggccagggcgccagttctcaagacaccaagacctttgacgtcgccctgagtgaagaattacatgctgccctatccgagtggctgaccgctattcgggcgtggttctgtgaagtgccatctagctag

SEQ ID NO: 169842 - DNA, 1278 bp, Artificial Sequence
  derived and/or modified sequence
atggccagtggtcaattcgtgaacaagctccaagaggaagtgatttgcccaatatgtctggacatcttgcaaaagccagtgaccattgactgtgggcacaacttttgcttgaagtgtatcacacaaatcggcgagacttcctgcggcttctttaaatgccctctttgtaaaacctctgtacgaaagaatgcaatccgttttaactccttactgcggaatctcgtcgagaagattcaggcactgcaggcctctgaagtgcaatctaaacggaaggaggctacctgtcctaggcatcaggagatgttccactacttttgtgaagatgacggcaaattcctgtgtttcgtgtgctgcgaatcaaaggatcataaatcacacaacgtatcccttatcgaggaggcggcccagaactatcaaggccaaattcaggaacagattcaggtactgcagcagaaggagaaggagactgtgcaggtgaaagcccagggggttcacagagtggacgtgttcacagatcaagtggagcacgaaaaacagcggatactgaccgagttcgagttgctgcatcaagtgctagaagaagagaagaattttctgctctcgcgcatctactggctaggccatgaaggtacagaggcaggcaaacattatgttgcttcgactgagccacagcttaatgatctgaagaaactggtggatagtttgaagacgaagcagaatatgccgcccagacagctacttgaggatatcaaggtcgtgttgtgccggtctgaagaattccagttcctcaatcctactcctgtgcctctggaactggaaaagaaactcagcgaggccaaaagccgccacgatagcatcaccggtagcctgaaaaagttcaaggaccaattgcaggcagaccggaagaaggacgagaataggttcttcaagagtatgaataagaacgatatgaagagctgggggctcctgcagaagaacaatcataagatgaacaagacatctgaaccggggtcaagtagcgcaggtggccgaacgacatcaggcccgcccaaccatcacagcagtgcccccagccacagcttgtttcgcgcttcaagcgctggcaaggtcactttccctgtatgtctgcttgccagttatgacgagattagcggccagggagcaagttcccaggatacaaagacatttgatgttgctctgtctgaggagctgcacgccgccctctcagaatggctcaccgcaatcagggcatggttttgtgaggtgccatcatcctag

SEQ ID NO: 169843 - DNA, 1278 bp, Artificial Sequence
  derived and/or modified sequence
atggccagcggccagttcgtaaataagctgcaagaagaggttatttgcccaatatgtcttgatattctccagaaaccagtaaccatcgattgcggacacaatttctgcctaaagtgcattacgcagataggcgagacctcttgtgggttcttcaagtgcccactatgtaaaacctctgtgagaaagaatgctattcggttcaactcactgctaagaaacctggtagaaaaaatacaggctttgcaggcaagtgaggtgcaatcaaagcgcaaggaggcgacatgtccccgacatcaggaaatgttccactacttttgtgaggacgacggcaagttcctgtgttttgtgtgtagggaatccaaggaccataagagtcacaacgtgagtctaatagaggaagctgctcagaactaccagggccagattcaggagcagattcaagtgctgcaacagaaggaaaaagagaccgtgcaagttaaggcgcagggcgtgcacagagttgatgtctttactgaccaggtggagcatgaaaagcagcgcatcttaaccgagttcgaactcttgcatcaagtgcttgaagaggaaaagaatttcctccttagtcgcatctattggctgggccatgagggaacagaagctggtaaacattacgtggccagcacagaacctcaactgaatgacttgaagaagctgattgattcgcttaagaccaaacagaacatgccgccccgccagctgctcgaagatataaaggtcgtgctgtgcagatctgaggagttccagttcttgaatccaactcctgtccctctggaactggagaagaaattgtcagaggctaagtcaaggcatgactcaatcacggggtctctgaaaaaatttaaagaccagctgcaggccgatcgaaaaaaggacgagaatcggtttttcaagtctatgaataagaatgatatgaaatcatggggactcctgcagaagaacaaccacaaaatgaataaaacctccgagcccgggagctcttcagccggcggtcgcactacaagcggacctcccaaccaccatagctccgcacctagccatagtcttttcagagctagttctgcagggaaggtaacctttcctgtgtgtctactcgcgtcttacgatgagatttccggccagggagcctcttcgcaggacacgaagacattcgacgtcgctttatcagaggagctccacgcggcactcagcgaatggctcaccgcaattcgggcttggttttgcaaggtaccatcctcgtag

SEQ ID NO: 169844 - DNA, 1278 bp, Artificial Sequence
  derived and/or modified sequence
atggcgtccggacagtttgtgaacaaactgcaggaagaggtgatttgccccatctgcctggatatactccagaaacctgtgacaatcgattgtggccacaatttttgcctcaagtgtatcacccagatcggcgagaccagttgcggtttcttcaagtgccccctgtgtaagaccagtgtccggaagaatgcaatcaggttcaacagtttgctgcgtaacttagtggagaagatccaggcactccaggcttcagaggttcaatcaaagcgtaaagaggcaacttgtccccggcaccaggagatgtttcattatttctgtgaggatgacggaaaatttctgtgcttcgtgtgcagagagtccaaagatcataagagtcacaacgtgtccctgatcgaggaggcagcccagaattatcaggggcagatccaagagcagatacaggtgttgcagcagaaagagaaggagaccgtccaggtgaaggcacagggcgtgcatagggtggacgtattcaccgatcaagttgagcacgagaagcaacgtattctgaccgagttcgagctgctgcaccaggtgctggaagaggagaaaaattttctcttatcacggatttattggcttggacacgaagggaccgaagccggcaagcactatgtggctagtacagagccccagctgaacgacctgaaaaagctcgtcgatagtctgaaaactaagcaaaacatgccaccacggcaactgttggagcctgctcagcctcatttacccaggtccgaggagttccaattccttaaccctacgcccgtgccactcgagctggagaagaaactatccgaggccaagagcagacacgactcaattacgggaagcctgaagaagttcaaggaccagttacaggcagacaggaaaaaagatgagaaccggttcttcaagagcatgaacaaaaatgacatgaaatcttgggggctactccaaaaaaacaaccataagatgaataaaacaagcgagcccgggtcctccagcgcaggtggcaggaccacttctggcccaccaaaccaccattccagcgcaccatctcacagcttattcagggcaagcagcgccggaaaagtgacctttcccgtctgtctgctcgcaagctatgacgagatatcaggccagggcgcaagttcccaggacacaaaaacatttgatgttgcccttagcgaggagctccatgcagctctgtccgaatggctgacggccatccgggcatggttctgtaaggttccctcctcttag

SEQ ID NO: 169845 - DNA, 1278 bp, Artificial Sequence
  derived and/or modified sequence
atggccagcgggcagtttgtcaacaagcttcaggaagaagtcatctgccctatttgtcttgatatcctgcagaaacccgtcaccattgattgtgggcataatttttgtttgaaatgcataactcagataggagagacctcctgcggtttttttaaatgtccattgtgcaaaacatcagtgcgcaagaatgccatcagatttaattcactcctccggaatctcgttgaaaagatacaggctctgcaggctagcgaggtgcaaagcaagcgtaaggaggccacttgcccacgccaccaggagatgtttcactatttctgcgaagacgatggaaaatttctgtgtttcgtatgcagggaaagcaaggatcacaaatcacataacgtcagtctcattgaagaagccgcccagaattaccagggccaaatccaggagcaaattcaggtgctgcaacagaaagagaaggaaactgtccaagtgaaagcccaaggcgtccaccgggtcgacgttttcaccgaccaggtggagcacgagaaacaacgcatactgactgaattcgagctcctgcaccaggttctggaggaagaaaagaacttccttctatctcgtatttactggctcggacatgagggcacagaagctgggaagcactacgtagccagcactgagcctcagctcaatgacctaaagaaactcgttgacagcctgaaaactaaacagaacatgcccccgaggcagctgctcgaagacatcaaggtcgtcctgtgtcgatctgaggagtttcagtttttgaacccaacacccgtcccactcgaactggagaagaagctgtcagaagcaaaaagtaggcacgatagtatcacagggtctctcaagaagttcaaggaccaattacaggccgatcgcaagaaagacgagaacaggttcttcaaatccatgaacaaaaacgacatgaaatcttggggactcctgcagaagaacaatcacaagatgaacaagacctccgaacctggttctagcagcgcaggtggcaggaccaccagcggcccccccaatcaccatagcagtgcaccctcccattccttgttccgggcttcaagcgccggaaaagtgaccttcccagtgtgtctactggctagctatgacgagatctccgggcagggagccagctctcaggacactaagacatttgatgttgcactctcagaggagttacacgctgcactatccgagtggttaaccgctatccgggcgtggttctgtgaggtcccctccagctag

SEQ ID NO: 169846 - DNA, 1278 bp, Artificial Sequence
  derived and/or modified sequence
atggcctctggtcagttcgtgaacaaactacaggaggaagtgatttgcccaatttgtttagacatcctccagaagcctgtgacaatcgactgcggacataatttttgtctaaagtgtataactcaaatcggcgagacatcgtgcgggttcttcaagtgtcctttgtgtaagacttccgttcggaagaacgccatcagatttaattccctgctgaggaatctggtggagaagatacaggctctgcaagcctctgaagtgcagtcaaagaggaaagaagccacctgcccaaggcaccaggagatgttccactatttctgtgaggatgacgggaaattcctgtgtttcgtgtgtcgggagtccaaagatcataagagccataacgtcagccttatcgaagaagctgcacagaactatcagggccagatccaggagcaaatccaggtgctacagcagaaagaaaaggagacagtacaggtgaaagcccagggcgtgcatagggtggatgtcttcacagaccaggtggaacatgagaaacaaaggatcctaactgagttcgaactactacatcaggtcctcgaggaggaaaaaaattttcttttgagtcgcatttattggctgggtcacgagggaactgaggcagggaagcattatgtcgctagcactgaaccacagctcaatgacctgaagaagctggtggattcgcttaagactaagcagaacatgcctcccaggcagctgctggaggatattaaggttgtgctttgtagaagtgaagaattccagttcctgaacccaacccctgttcccctggaactggagaagaaactttccgaagccaaatctcgtcatgactctattacaggcagccttaagaaatttaaagaccaactccaggcagaccgcaagaaggacgagaacagattctttaagagcatgaataagaatgatatgaagtcatggggcttgctgcagaagaataatcataaaatgaataagactagtgagccagggtcttcctctgctggagggaggacaacctctggccctccaaatcatcactcatctgcaccttcacacagtctttttagagcatccagcgccggcaaagttactttccccgtgtgcctgcttgcttcttatgacgagatatccggccaaggagccagcagccaggacacaaaaacgtttgatgtggctctttctgaagagctgcatgcagccctcagcgagtggctaactgctatccgggcctggttttgtgaagtacctagcagctag

SEQ ID NO: 169847 - DNA, 1278 bp, Artificial Sequence
  derived and/or modified sequence
atggccagcggccagtttgtgaacaagctgcaggaggaggtgatctgccccatctgcctggacatcctgcagaagcctgtgaccatcgactgtggccacaacttctgcctgaagtgcatcacccagattggagagaccagctgtggcttcttcaagtgccccctgtgcaagacctctgtgaggaagaatgccatccgcttcaacagcctgctgaggaacctggtggagaagatccaggccctgcaggccagcgaggtgcagagcaagaggaaggaggccacctgccccaggcaccaggagatgttccactacttctgtgaagatgatggcaagttcctgtgctttgtgtgctgtgagagcaaggaccacaagagccacaacgtgtccctgattgaggaggccgcccagaactaccagggccagatccaggagcagatccaggtgctgcagcagaaggagaaggagaccgtgcaggtgaaggcccagggcgtgcaccgggtggatgtgttcacagaccaggtggagcacgagaagcagaggatcctgacagaatttgagctgctgcaccaggtgctggaggaggagaagaacttcctgctgagccgcatctactggctgggccacgagggcacagaagctgggaagcactacgtggccagcacagagccccagctgaatgacctgaagaagctggtggacagcctgaagaccaagcagaacatgccaccccggcagctgctggaggacatcaaggtggtgctgtgccgctctgaggagttccagttcctgaaccccacccctgtgcccctggagctggagaagaagctgtctgaggccaagagcagacatgacagcatcaccggcagcctgaagaagttcaaggaccagctgcaggccgacaggaagaaggatgaaaatcgcttcttcaagtccatgaacaagaatgacatgaagtcctggggcctgctgcagaagaacaaccacaagatgaacaagaccagcgagcccggcagcagcagcgctgggggccgcaccaccagcggcccccccaaccaccacagcagcgcccccagccacagcctcttccgggccagcagcgctgggaaggtgaccttccctgtgtgcctgctggccagctatgatgagatcagcggccagggcgccagcagccaggacaccaagacctttgatgtggccctgtctgaggagctgcacgccgccctgtctgagtggctgacagccatccgggcctggttctgtgaggtgcccagcagctag

SEQ ID NO: 169848 - DNA, 1278 bp, Artificial Sequence
  derived and/or modified sequence
atggccagcggccagtttgtgaacaagctgcaggaggaggtgatctgccccatctgcctggacatcctgcagaagcctgtgaccatcgactgtggccacaacttctgcctgaagtgcatcacccagattggagagaccagctgtggcttcttcaagtgccccctgtgcaagacctctgtgaggaagaatgccatccgcttcaacagcctgctgaggaacctggtggagaagatccaggccctgcaggccagcgaggtgcagagcaagaggaaggaggccacctgccccaggcaccaggagatgttccactacttctgtgaagatgatggcaagttcctgtgctttgtgtgccgggagagcaaggaccacaagagccacaacgtgtccctgattgaggaggccgcccagaactaccagggccagatccaggagcagatccaggtgctgcagcagaaggagaaggagaccgtgcaggtgaaggcccagggcgtgcaccgggtggatgtgttcacagaccaggtggagcacgagaagcagaggatcctgacagaatttgagctgctgcaccaggtgctggaggaggagaagaacttcctgctgagccgcatctactggctgggccacgagggcacagaagctgggaagcactacgtggccagcacagagccccagctgaatgacctgaagaagctggtggacagcctgaagaccaagcagaacatgccaccccggcagctgctggagcccgcccagccccacctgcccaggtctgaggagttccagttcctgaaccccacccctgtgcccctggagctggagaagaagctgtctgaggccaagagcagacatgacagcatcaccggcagcctgaagaagttcaaggaccagctgcaggccgacaggaagaaggatgaaaatcgcttcttcaagtccatgaacaagaatgacatgaagtcctggggcctgctgcagaagaacaaccacaagatgaacaagaccagcgagcccggcagcagcagcgctgggggccgcaccaccagcggcccccccaaccaccacagcagcgcccccagccacagcctcttccgggccagcagcgctgggaaggtgaccttccctgtgtgcctgctggccagctatgatgagatcagcggccagggcgccagcagccaggacaccaagacctttgatgtggccctgtctgaggagctgcacgccgccctgtctgagtggctgacagccatccgggcctggttctgtgaggtgcccagcagctag

SEQ ID NO: 169849 - DNA, 1278 bp, Artificial Sequence
  derived and/or modified sequence
atggccagcggccagtttgtgaacaagctgcaggaggaggtgatctgccccatctgcctggacatcctgcagaagcctgtgaccatcgactgtggccacaacttctgcctgaagtgcatcacccagattggagagaccagctgtggcttcttcaagtgccccctgtgcaagacctctgtgaggaagaatgccatccgcttcaacagcctgctgaggaacctggtggagaagatccaggccctgcaggccagcgaggtgcagagcaagaggaaggaggccacctgccccaggcaccaggagatgttccactacttctgtgaagatgatggcaagttcctgtgctttgtgtgccgggagagcaaggaccacaagagccacaacgtgtccctgattgaggaggccgcccagaactaccagggccagatccaggagcagatccaggtgctgcagcagaaggagaaggagaccgtgcaggtgaaggcccagggcgtgcaccgggtggatgtgttcacagaccaggtggagcacgagaagcagaggatcctgacagaatttgagctgctgcaccaggtgctggaggaggagaagaacttcctgctgagccgcatctactggctgggccacgagggcacagaagctgggaagcactacgtggccagcacagagccccagctgaatgacctgaagaagctggtggacagcctgaagaccaagcagaacatgccaccccggcagctgctggaggacatcaaggtggtgctgtgccgctctgaggagttccagttcctgaaccccacccctgtgcccctggagctggagaagaagctgtctgaggccaagagcagacatgacagcatcaccggcagcctgaagaagttcaaggaccagctgcaggccgacaggaagaaggatgaaaatcgcttcttcaagtccatgaacaagaatgacatgaagtcctggggcctgctgcagaagaacaaccacaagatgaacaagaccagcgagcccggcagcagcagcgctgggggccgcaccaccagcggcccccccaaccaccacagcagcgcccccagccacagcctcttccgggccagcagcgctgggaaggtgaccttccctgtgtgcctgctggccagctatgatgagatcagcggccagggcgccagcagccaggacaccaagacctttgatgtggccctgtctgaggagctgcacgccgccctgtctgagtggctgacagccatccgggcctggttctgtgaggtgcccagcagctag

SEQ ID NO: 169850 - DNA, 1278 bp, Artificial Sequence
  derived and/or modified sequence
atggccagcggccagtttgtgaacaagctgcaggaggaggtgatctgccccatctgcctggacatcctgcagaagcctgtgaccatcgactgtggccacaacttctgcctgaagtgcatcacccagattggagagaccagctgtggcttcttcaagtgccccctgtgcaagacctctgtgaggaagaatgccatccgcttcaacagcctgctgaggaacctggtggagaagatccaggccctgcaggccagcgaggtgcagagcaagaggaaggaggccacctgccccaggcaccaggagatgttccactacttctgtgaagatgatggcaagttcctgtgctttgtgtgccgggagagcaaggaccacaagagccacaacgtgtccctgattgaggaggccgcccagaactaccagggccagatccaggagcagatccaggtgctgcagcagaaggagaaggagaccgtgcaggtgaaggcccagggcgtgcaccgggtggatgtgttcacagaccaggtggagcacgagaagcagaggatcctgacagaatttgagctgctgcaccaggtgctggaggaggagaagaacttcctgctgagccgcatctactggctgggccacgagggcacagaagctgggaagcactacgtggccagcacagagccccagctgaatgacctgaagaagctggtggacagcctgaagaccaagcagaacatgccaccccggcagctgctggaggacatcaaggtggtgctgtgccgctctgaggagttccagttcctgaaccccacccctgtgcccctggagctggagaagaagctgtctgaggccaagagcagacatgacagcatcaccggcagcctgaagaagttcaaggaccagctgcaggccgacaggaagaaggatgaaaatcgcttcttcaagtccatgaacaagaatgacatgaagtcctggggcctgctgcagaagaacaaccacaagatgaacaagaccagcgagcccggcagcagcagcgctgggggccgcaccaccagcggcccccccaaccaccacagcagcgcccccagccacagcctcttccgggccagcagcgctgggaaggtgaccttccctgtgtgcctgctggccagctatgatgagatcagcggccagggcgccagcagccaggacaccaagacctttgatgtggccctgtctgaggagctgcacgccgccctgtctgagtggctgacagccatccgggcctggttctgcaaggtgcccagcagctag

SEQ ID NO: 169851 - DNA, 1278 bp, Artificial Sequence
  derived and/or modified sequence
atggccagcggccagtttgtgaacaagctgcaggaggaggtgatctgccccatctgcctggacatcctgcagaagcctgtgaccatcgactgtggccacaacttctgcctgaagtgcatcacccagattggagagaccagctgtggcttcttcaagtgccccctgtgcaagacctctgtgaggaagaatgccatccgcttcaacagcctgctgaggaacctggtggagaagatccaggccctgcaggccagcgaggtgcagagcaagaggaaggaggccacctgccccaggcaccaggagatgttccactacttctgtgaagatgatggcaagttcctgtgctttgtgtgccgggagagcaaggaccacaagagccacaacgtgtccctgattgaggaggccgcccagaactaccagggccagatccaggagcagatccaggtgctgcagcagaaggagaaggagaccgtgcaggtgaaggcccagggcgtgcaccgggtggatgtgttcacagaccaggtggagcacgagaagcagaggatcctgacagaatttgagctgctgcaccaggtgctggaggaggagaagaacttcctgctgagccgcatctactggctgggccacgagggcacagaagctgggaagcactacgtggccagcacagagccccagctgaatgacctgaagaagctgattgacagcctgaagaccaagcagaacatgccaccccggcagctgctggaggacatcaaggtggtgctgtgccgctctgaggagttccagttcctgaaccccacccctgtgcccctggagctggagaagaagctgtctgaggccaagagcagacatgacagcatcaccggcagcctgaagaagttcaaggaccagctgcaggccgacaggaagaaggatgaaaatcgcttcttcaagtccatgaacaagaatgacatgaagtcctggggcctgctgcagaagaacaaccacaagatgaacaagaccagcgagcccggcagcagcagcgctgggggccgcaccaccagcggcccccccaaccaccacagcagcgcccccagccacagcctcttccgggccagcagcgctgggaaggtgaccttccctgtgtgcctgctggccagctatgatgagatcagcggccagggcgccagcagccaggacaccaagacctttgatgtggccctgtctgaggagctgcacgccgccctgtctgagtggctgacagccatccgggcctggttctgcaaggtgcccagcagctag

SEQ ID NO: 169852 - DNA, 1278 bp, Artificial Sequence
  derived and/or modified sequence
atggccagcggccagtttgtgaacaagctgcaggaggaggtgatctgccccatctgcctggacatcctgcagaagcctgtgaccatcgactgtggccacaacttctgcctgaagtgcatcacccagattggagagaccagctgtggcttcttcaagtgccccctgtgcaagacctctgtgaggaagaatgccatccgcttcaacagcctgctgaggaacctggtggagaagatccaggccctgcaggccagcgaggtgcagagcaagaggaaggaggccacctgccccaggcaccaggagatgttccactacttctgtgaagatgatggcaagttcctgtgctttgtgtgccgggagagcaaggaccacaagagccacaacgtgtccctgattgaggaggccgcccagaactaccagggccagatccaggagcagatccaggtgctgcagcagaaggagaaggagaccgtgcaggtgaaggcccagggcgtgcaccgggtggatgtgttcacagaccaggtggagcacgagaagcagaggatcctgacagaatttgagctgctgcaccaggtgctggaggaggagaagaacttcctgctgagccgcatctactggctgggccacgagggcacagaagctgggaagcactacgtggccagcacagagccccagctgaatgacctgaagaagctgattgacagcctgaagaccaagcagaacatgccaccccggcagctgctggagcccgcccagccccacctgcccaggtctgaggagttccagttcctgaaccccacccctgtgcccctggagctggagaagaagctgtctgaggccaagagcagacatgacagcatcaccggcagcctgaagaagttcaaggaccagctgcaggccgacaggaagaaggatgaaaatcgcttcttcaagtccatgaacaagaatgacatgaagtcctggggcctgctgcagaagaacaaccacaagatgaacaagaccagcgagcccggcagcagcagcgctgggggccgcaccaccagcggcccccccaaccaccacagcagcgcccccagccacagcctcttccgggccagcagcgctgggaaggtgaccttccctgtgtgcctgctggccagctatgatgagatcagcggccagggcgccagcagccaggacaccaagacctttgatgtggccctgtctgaggagctgcacgccgccctgtctgagtggctgacagccatccgggcctggttctgcaaggtgcccagcagctag

SEQ ID NO: 169853 - DNA, 1278 bp, Artificial Sequence
  derived and/or modified sequence
atggccagcggccagtttgtgaacaagctgcaggaggaggtgatctgccccatctgcctggacatcctgcagaagcctgtgaccatcgactgtggccacaacttctgcctgaagtgcatcacccagattggagagaccagctgtggcttcttcaagtgccccctgtgcaagacctctgtgaggaagaatgccatccgcttcaacagcctgctgaggaacctggtggagaagatccaggccctgcaggccagcgaggtgcagagcaagaggaaggaggccacctgccccaggcaccaggagatgttccactacttctgtgaagatgatggcaagttcctgtgctttgtgtgctgtgagagcaaggaccacaagagccacaacgtgtccctgattgaggaggccgcccagaactaccagggccagatccaggagcagatccaggtgctgcagcagaaggagaaggagaccgtgcaggtgaaggcccagggcgtgcaccgggtggatgtgttcacagaccaggtggagcacgagaagcagaggatcctgacagaatttgagctgctgcaccaggtgctggaggaggagaagaacttcctgctgagccgcatctactggctgggccacgagggcacagaagctgggaagcactacgtggccagcacagagccccagctgaatgacctgaagaagctggtggacagcctgaagaccaagcagaacatgccaccccggcagctgctggagcccgcccagccccacctgcccaggtctgaggagttccagttcctgaaccccacccctgtgcccctggagctggagaagaagctgtctgaggccaagagcagacatgacagcatcaccggcagcctgaagaagttcaaggaccagctgcaggccgacaggaagaaggatgaaaatcgcttcttcaagtccatgaacaagaatgacatgaagtcctggggcctgctgcagaagaacaaccacaagatgaacaagaccagcgagcccggcagcagcagcgctgggggccgcaccaccagcggcccccccaaccaccacagcagcgcccccagccacagcctcttccgggccagcagcgctgggaaggtgaccttccctgtgtgcctgctggccagctatgatgagatcagcggccagggcgccagcagccaggacaccaagacctttgatgtggccctgtctgaggagctgcacgccgccctgtctgagtggctgacagccatccgggcctggttctgtgaggtgcccagcagctag

SEQ ID NO: 169854 - DNA, 1278 bp, Artificial Sequence
  derived and/or modified sequence
atggccagcggccagtttgtgaacaagctgcaggaggaggtgatctgccccatctgcctggacatcctgcagaagcctgtgaccatcgactgtggccacaacttctgcctgaagtgcatcacccagattggagagaccagctgtggcttcttcaagtgccccctgtgcaagacctctgtgaggaagaatgccatccgcttcaacagcctgctgaggaacctggtggagaagatccaggccctgcaggccagcgaggtgcagagcaagaggaaggaggccacctgccccaggcaccaggagatgttccactacttctgtgaagatgatggcaagttcctgtgctttgtgtgccgggagagcaaggaccacaagagccacaacgtgtccctgattgaggaggccgcccagaactaccagggccagatccaggagcagatccaggtgctgcagcagaaggagaaggagaccgtgcaggtgaaggcccagggcgtgcaccgggtggatgtgttcacagaccaggtggagcacgagaagcagaggatcctgacagaatttgagctgctgcaccaggtgctggaggaggagaagaacttcctgctgagccgcatctactggctgggccacgagggcacagaagctgggaagcactacgtggccagcacagagccccagctgaatgacctgaagaagctggtggacagcctgaagaccaagcagaacatgccaccccggcagctgctggagcccgcccagccccacctgcccaggtctgaggagttccagttcctgaaccccacccctgtgcccctggagctggagaagaagctgtctgaggccaagagcagacatgacagcatcaccggcagcctgaagaagttcaaggaccagctgcaggccgacaggaagaaggatgaaaatcgcttcttcaagtccatgaacaagaatgacatgaagtcctggggcctgctgcagaagaacaaccacaagatgaacaagaccagcgagcccggcagcagcagcgctgggggccgcaccaccagcggcccccccaaccaccacagcagcgcccccagccacagcctcttccgggccagcagcgctgggaaggtgaccttccctgtgtgcctgctggccagctatgatgagatcagcggccagggcgccagcagccaggacaccaagacctttgatgtggccctgtctgaggagctgcacgccgccctgtctgagtggctgacagccatccgggcctggttctgcaaggtgcccagcagctag

SEQ ID NO: 169855 - DNA, 1278 bp, Artificial Sequence
  derived and/or modified sequence
atggccagcggccagttcgtgaacaagctgcaggaggaggtgatctgccccatctgcctagacatcctgcagaaaccagtgacgatcgattgtggacacaatttttgtctgaagtgcattacacagattggcgagacgagctgtggcttcttcaaatgtccactgtgcaagacctctgtacgcaaaaacgcaatacggttcaatagtctcctcaggaacctggtggaaaagatccaagctctccaggccagtgaagtgcagtctaaaaggaaggaggccacatgccccaggcatcaggagatgttccactatttctgcgaggacgacggaaaatttctgtgttttgtgtgctgcgagagcaaggatcacaaatctcacaatgtgagtctgatcgaagaggctgcccagaactaccagggtcagattcaagagcagatccaggttctccagcagaaagaaaaagaaacggtgcaggtaaaggctcagggagtacacagggtggatgtattcaccgatcaggtggagcacgagaagcaaaggattttaactgaattcgagctcttgcaccaggtgctcgaggaggaaaagaacttcctgctcagcaggatttactggttgggtcatgaaggtacggaagcggggaagcactacgtggcgtccaccgagccccagctgaatgacttgaaaaaactcgtggatagtctcaagacaaagcagaatatgcctccaagacagctccttgaagacatcaaagtcgtcctgtgccgcagcgaggaatttcagttcttaaaccccaccccagtgcccctcgagcttgagaagaaactctctgaggccaaatcgaggcacgactcgattacaggctccctgaaaaagttcaaggaccaattgcaggcggacagaaaaaaggatgaaaaccggtttttcaagtcaatgaacaagaatgacatgaagtcctggggactactccaaaagaataaccacaaaatgaacaagacaagcgaacctgggagctctagtgccggagggcgaacgacgtcggggcctcccaaccatcacagtagtgctccaagccatagcttatttagggcctcatctgctggcaaggtcacttttccagtctgtctgcttgccagttatgacgaaatttcaggacagggtgcttcttcacaggataccaagaccttcgatgtggcgcttagcgaggagttgcatgcagcgctcagcgagtggctgactgcgatccgagcttggttttgcgaggttcccagctcctag

SEQ ID NO: 169856 - DNA, 1278 bp, Artificial Sequence
  derived and/or modified sequence
atggccagcggccagttcgtgaacaagctgcaggaggaggtgatctgtcctatatgcctggatatccttcagaagccagtcacaatcgactgcggacataacttttgcctcaagtgcattacccagattggcgaaactagttgcgggttcttcaaatgtcctctctgcaagacaagcgtgaggaaaaatgccatccgttttaattccttgctgaggaacctggtggagaaaatccaggctctccaggccagtgaagtgcaatcaaaaaggaaggaggccacgtgcccacgacatcaagaaatgtttcattacttctgtgaagacgatggtaagttcctttgctttgtctgcagggaatctaaggaccataaatcccataacgtgtccttaatcgaagaggccgcacagaactaccagggccagatccaggagcagatacaagttttgcagcaaaaggaaaaggaaacggtacaggtgaaggcccagggggtgcaccgtgtggacgtcttcaccgatcaggtggagcatgagaaacagaggattttgacagagttcgagctgctccatcaggtcctcgaagaagaaaaaaactttcttctgtctaggatttactggttaggccatgaaggtactgaagcagggaaacattacgttgcttctaccgagccacagctcaatgatctgaagaagctggtggattcccttaagactaagcagaacatgccgccccggcagttactcgagcccgcccaaccgcacctgccacggtcagaggagttccagtttctcaatccaactcccgtgccattggagctggagaaaaagttatcagaagccaaaagcagacacgatagtatcaccggcagcctgaaaaagttcaaggaccaactccaggctgacaggaaaaaagacgagaacagatttttcaaaagcatgaataaaaacgacatgaaaagctggggccttctacagaagaataaccacaagatgaacaagacaagcgaacccggctctagcagcgccggcggccggaccacatcaggcccccctaaccatcactcctcagccccttctcacagcctgtttcgggcttcttccgctggcaaagtgactttccccgtctgtctactcgcttcctacgacgaaatttctggccagggtgcgtcaagtcaggacaccaaaaccttcgatgttgcgctcagcgaggaactacatgccgctctcagcgaatggctaaccgccatccgtgcctggttctgcgaggttccctctagttag

SEQ ID NO: 169857 - DNA, 1278 bp, Artificial Sequence
  derived and/or modified sequence
atggccagcggccagttcgtgaacaagctgcaggaggaggtgatctgcccaatatgtttggatatccttcagaagccagtgacaattgactgtgggcacaatttttgtttaaaatgcatcactcaaataggggaaaccagctgcgggttttttaaatgtccactatgcaaaacaagtgttcgcaaaaacgccattaggtttaattctctcctacgcaatctcgttgagaaaatacaggctttgcaggcctctgaggtgcaatccaaaaggaaagaagccacatgcccgcggcaccaggagatgttccactacttctgtgaagacgacgggaagtttctgtgtttcgtatgccgcgaatcgaaggaccacaagtctcacaacgtgtctctaatagaggaggcagcccagaattaccagggccaaattcaggagcaaatccaagttctgcagcagaaggagaaagaaacggtccaggttaaggcgcagggtgtccatagggtggacgtgttcaccgaccaagtggagcacgaaaagcaaaggatcttgaccgagttcgagctgttgcaccaggtgctggaggaagaaaaaaactttctactgtccagaatatattggctgggccacgagggaaccgaggcaggaaagcactacgtggccagtactgaaccacagctgaatgacctgaagaaattggtggattcactaaaaactaaacaaaacatgcccccccgtcagctactagaagacatcaaagtagtgctgtgccgttctgaggagttccagtttcttaacccaacaccagtccctctggagctggagaaaaaacttagcgaagcaaaatctcgacacgattccatcaccgggtctctgaagaaatttaaggaccaactgcaggcagaccgcaagaaggacgaaaatcgattcttcaagtccatgaacaagaacgatatgaaatcttgggggctgctgcagaagaacaatcataagatgaataagaccagcgagcccggctcttcctctgctggcggccgaactacgagcggaccacccaaccaccacagctccgccccttctcattctctgttccgcgcaagctccgctggtaaggttacattcccagtctgcctactcgccagctatgacgagatctccggtcagggagctagcagtcaggacacaaagacgtttgacgtggcactctctgaagaactgcacgcggccctatcagagtggctgaccgccatacgtgcatggttttgcgaggttccttcaagctag

SEQ ID NO: 169858 - DNA, 1278 bp, Artificial Sequence
  derived and/or modified sequence
atggccagcggccagttcgtgaacaagctgcaggaggaggtgatctgtcccatttgtttggatatccttcaaaagcctgttaccattgactgtgggcataatttctgtctcaaatgtattacacagattggtgagacaagctgtggctttttcaaatgccctttatgcaagacgtcagtgaggaagaatgcaatccgtttcaactctctgttgagaaatctggtcgagaagatccaggctctccaggctagtgaggtgcagagcaaacgcaaagaggccacctgcccaagacaccaagaaatgttccactatttttgcgaggatgacggtaaattcttgtgtttcgtgtgcagggaatcaaaagatcacaaaagccacaacgtgtctctcatcgaggaagccgctcaaaattatcaaggtcaaatccaggaacaaatccaagtgctccagcagaaagagaaagagaccgtacaagtaaaagctcagggggtgcatcgcgtcgatgtgtttactgaccaggtcgaacacgagaaacagcgtatcctgaccgagtttgaattgctgcatcaagtgctggaagaagaaaaaaactttctgctgagccggatttattggctcggacatgaggggaccgaggctggcaagcattacgtcgcaagcactgagccacagttaaatgatttgaagaagttagtcgactctctgaaaactaagcaaaacatgccacctagacagttactggaagacatcaaggttgtgttgtgtcggtcagaggagtttcagtttttgaaccctactccggtgccgctcgaattggagaagaaactttctgaagccaagagcaggcatgattccattactggttctcttaaaaaattcaaggatcaactccaggctgatcggaaaaaagatgaaaatcgattctttaaatcgatgaacaagaatgatatgaaatcgtggggtctccttcaaaagaacaaccacaaaatgaacaaaacatctgaaccagggtcttcctcagccggaggtcgaacaacaagtgggcctccaaatcaccacagcagcgcgccatctcattccctgttccgggcgtctagtgcaggcaaggtcactttcccggtctgtctcttggcatcttacgatgaaatctcggggcagggggcttctagccaggatacaaagacgttcgacgtcgctcttagcgaagaactgcatgccgcactttctgaatggctgaccgccatccgtgcgtggttctgcaaggttcctagttcctag

SEQ ID NO: 169859 - DNA, 1278 bp, Artificial Sequence
  derived and/or modified sequence
atggccagcggccagttcgtgaacaagctgcaggaggaggtgatctgtcctatctgcttggatattcttcagaagcccgtgacaatagattgcgggcataatttctgcctgaaatgcatcacccaaatcggcgaaacaagctgcggctttttcaagtgccctctgtgcaaaacttccgtgcgcaaaaatgccatccggtttaactccctgctgaggaatttagtcgagaaaatccaggcgctgcaggctagcgaggtgcagtccaaaagaaaggaagccacttgtccacggcaccaggagatgttccactacttctgcgaggatgatgggaaatttctctgcttcgtttgtcgcgaatcaaaggaccacaaatcacacaacgtatcactcatcgaagaggcggctcaaaactaccaagggcagatccaggaacaaatccaggtcctccaacagaaggagaaagaaacggtacaagtgaaggcccagggggtgcatcgcgtggacgtcttcactgaccaggtggaacatgaaaaacagaggattttaacggaattcgagctcctgcatcaggtcttggaagaggagaagaatttccttctgagcagaatctattggctgggtcacgagggcacggaggccggaaagcactatgtggcatcaaccgaaccacaacttaacgatttgaagaagctggtggacagcttaaaaacaaaacagaacatgcctcccaggcagctgctcgaggatatcaaagtggttttatgtagatctgaggaattccagtttctaaatcctactcccgtgcctctggaacttgaaaagaagttgagcgaagcgaagtcacggcatgattcgattaccgggtccctcaagaaattcaaagaccagctccaggcggacagaaaaaaagacgagaatcgctttttcaagtccatgaacaagaacgatatgaagagttgggggctgttgcagaagaataaccataagatgaataaaacttcagaacctgggtcatcatctgccggaggccgcaccacttctggcccacctaaccatcactcatctgctccttctcacagtctcttccgggcaagctctgcaggaaaggtgactttcccggtgtgtctgttggcttcctacgacgaaattagtgggcaaggagccagctcacaggataccaaaacctttgatgtcgccctgagcgaagagctacatgctgccctgagcgagtggctgaccgctatcagggcgtggttctgcgaagtaccaagctcctag

SEQ ID NO: 169860 - DNA, 1278 bp, Artificial Sequence
  derived and/or modified sequence
atggccagcggccagttcgtgaacaagctgcaggaggaggtgatctgtcccatttgcctagatatcctccaaaaaccagtgacgattgattgtggacataatttctgcctcaaatgtatcacccagattggagaaacatcgtgcggcttcttcaagtgccccctgtgcaagaccagcgtcagaaaaaatgccatccggtttaattcgctgttgagaaacctcgtcgagaagatccaggctctccaggccagcgaggtgcagagtaaacgcaaggaagctacctgccctcggcaccaggagatgtttcattacttctgtgaggatgatgggaagttcctgtgtttcgtgtgccgtgaatccaaagatcacaagagccataatgtgagcttgatagaggaagctgcgcagaattaccaaggccagatccaggagcaaatccaagtgctgcagcaaaaggagaaggagacggtgcaggtcaaggcacaaggagttcacagagttgatgtgtttacggaccaggtcgaacatgagaaacagcgaattcttaccgaattcgaacttctgcaccaggtgctcgaggaagagaagaatttccttctgtcgagaatttactggctaggacatgaaggtacagaagccggcaaacactacgttgccagcacggagcctcagctgaatgaccttaaaaagctggttgactctcttaagactaagcagaacatgccacctaggcagctcctggaagacataaaggtcgttctgtgtaggtctgaggaattccaattcctgaaccctaccccggttccgttggagctggagaagaagctgagtgaagcaaaaagtcgccatgactccattaccggcagccttaaaaagtttaaggatcagttgcaagctgataggaaaaaagacgagaacagattctttaaaagcatgaacaagaacgatatgaaatcctggggactactccagaagaataaccataagatgaataagacctctgagcccggatctagttctgcaggcggccggacaacttctggcccaccgaatcaccattcttctgccccaagtcacagtttattccgggcatcctcggctggcaaagttacctttccggtatgcttgttagcttcgtatgacgagataagcggacaaggggcttcgtcacaggatactaagacattcgacgttgccctcagtgaagagctgcacgctgctctcagcgagtggctgacggcaatccgagcttggttctgtgaagtgcccagttcctag

SEQ ID NO: 169861 - DNA, 1278 bp, Artificial Sequence
  derived and/or modified sequence
atggccagcggccagttcgtgaacaagctgcaggaggaggtgatctgccccatctgtctggatattttacagaaaccagtcaccatcgattgtggccacaacttctgcctcaaatgcatcacacagatcggggaaacaagctgtggattcttcaagtgcccattgtgcaagacttccgtgagaaaaaatgctatacgatttaattcccttctgagaaaccttgttgagaaaattcaagcgctgcaggctagcgaagttcaaagtaaacgtaaagaggcaacttgtcctcgacaccaggagatgttccactatttttgcgaagacgacggaaagttcctttgctttgtttgtcgggaatccaaggatcataagtcacataatgtgagcttaatcgaggaggcagcccaaaattatcagggccagatccaagaacagatacaggtgctccaacagaaggaaaaggaaacagtccaggtaaaggcccaaggtgttcacagggtggacgtctttaccgatcaggtagagcatgaaaagcagcggatccttactgagtttgagctgttacatcaggtgctggaggaggaaaagaattttctgctgtctaggatctactggctggggcacgaaggaactgaagctgggaagcattatgttgcctccactgaaccccagctcaatgacttgaaaaaactcgtggattcactgaagactaagcaaaacatgcccccacgtcagctgctcgaggacataaaggtggtactgtgtcgatccgaggaatttcagtttctcaatccgactccagtcccactagaactggagaagaaactatcggaggccaaaagtaggcacgattcaatcacaggttcccttaaaaagtttaaggaccagcttcaagcggaccgaaagaaggacgagaaccgcttttttaaatccatgaataagaatgacatgaaaagctggggcctgctgcagaaaaataaccacaagatgaacaagacaagcgagccaggcagctcaagtgcgggcggaagaaccaccagtggaccacctaatcaccacagtagcgccccgtcccactctctgttcagggcctcctcagccggcaaggtgacctttccagtgtgcctcctggcctcttatgatgagatttcaggacagggcgccagctctcaggacaccaaaacctttgacgtggccctgagcgaagaactgcacgccgccctaagcgaatggctgactgccattcgggcatggttctgcgaggtccctagttcgtag

SEQ ID NO: 169862 - DNA, 1278 bp, Artificial Sequence
  derived and/or modified sequence
atggccagcggccagttcgtgaacaagctgcaggaggaggtgatctgtccaatttgcctggacatcctgcagaagcccgtgacaatagactgcggccataatttctgtctgaagtgtataacccagattggggagaccagctgtggcttcttcaagtgtcctttatgtaagacatctgttaggaaaaacgccatcaggttcaattcactgttgcgaaatctcgtggagaaaatacaagccttacaggcctcagaggtgcagtctaagcgtaaagaggcaacctgtcctcgtcaccaggagatgttccattacttctgcgaagacgacggaaaatttttgtgctttgtatgtcgtgagtcgaaagatcacaagtctcacaacgtgtctctgatcgaagaagcagctcaaaactaccaaggtcaaattcaggagcagattcaggtcctacagcagaaggaaaaagagactgtgcaggttaaagcacaaggcgtccacagagtcgatgtgttcacagaccaggtggagcatgaaaagcagagaatcttgacggagttcgagctgctgcatcaggtcttggaagaagaaaagaatttcttgctctcaaggatctactggctggggcatgagggcacagaggctggcaagcactacgtggcctccacagaaccccagctgaatgacctgaaaaaactgattgactccttaaagaccaaacagaatatgccacccaggcagttactcgaggatatcaaggtggtactctgccgcagcgaagaattccagttcctcaatcccacccctgtacccctggagttggaaaagaaactttcagaggcaaaatctcggcacgattccatcactgggtcattaaagaagtttaaagaccagcttcaggctgatcgcaaaaaagacgaaaaccgcttttttaaatcaatgaacaagaacgacatgaaatcttggggcctgttacaaaaaaataaccacaaaatgaataagacttcggagcctggaagtagcagcgcagggggccgcactacctccggtccgccgaaccaccattcctccgccccctcccactctttgttcagagccagctcagcggggaaggttacgttcccagtatgcctgctcgcatcttacgacgagatttccggtcagggcgcgagttctcaggacactaagacatttgatgtggccctgagtgaggaactccatgccgccctatccgagtggcttactgcaattcgcgcatggttctgtaaggtgccatccagttag

SEQ ID NO: 169863 - DNA, 1278 bp, Artificial Sequence
  derived and/or modified sequence
atggccagcggccagttcgtgaacaagctgcaggaggaggtgatctgcccaatttgtctggacatcctccagaagccagtgactatcgactgcgggcacaatttctgtctgaagtgcataacccaaattggagaaactagttgtgggttcttcaagtgtcccctctgcaagacttccgttcgaaagaacgccattcgatttaattccctgctacggaatctcgtggaaaaaatccaggctcttcaagcaagtgaagtgcagagtaagaggaaggaagccacatgtcctcgacatcaggaaatgttccactatttttgcgaagatgacggaaagtttctgtgttttgtgtgccgggaaagcaaggaccataagagtcacaacgtcagcttaattgaagaagccgcacagaattatcaaggccaaatacaggagcagatccaggttttgcagcagaaagaaaaggaaacggtgcaagtaaaagcccagggtgtccatcgggtcgatgtctttaccgaccaggtggagcacgagaagcagcgcatcctgaccgaattcgaactcttgcaccaggtcttggaagaagaaaagaactttctgctatcgagaatatactggctcggtcatgagggcacagaggctggcaaacattacgtggcttctaccgagccccagctgaatgacctaaagaagctcgttgattctctgaagactaagcagaacatgccaccccgtcagctcctggaagatataaaggttgtgctttgcaggagcgaggagttccagtttttgaatcctacccccgtcccgcttgaactggaaaagaaactgagtgaggccaagtcacgacacgattcgataaccggcagcctaaagaaattcaaagatcagttgcaggctgatcggaaaaaggatgagaataggttctttaagtccatgaacaaaaatgacatgaaaagctggggcctgctgcaaaagaacaatcacaagatgaacaagacaagcgaacctggttctagctctgccgggggccgcacaacgtcaggacccccaaaccaccactcctcggccccgtcccacagtctgttccgagcctcctccgctggtaaagtcacttttcccgtgtgtctcttggcctcttacgatgaaatctccgggcagggcgcaagcagccaggacacgaagacgttcgatgtggccctttcggaagagctacacgccgctctatctgagtggctgacagcaatacgggcctggttctgcgaagtgcccagctcctag

SEQ ID NO: 169864 - DNA, 1278 bp, Artificial Sequence
  derived and/or modified sequence
atggccagcggccagttcgtgaacaagctgcaggaggaggtgatctgcccaatttgcctcgacattctgcagaagcccgttactatcgactgcggacacaatttctgcctcaagtgcatcacgcaaatcggcgagaccagctgtggctttttcaaatgtcccctctgtaagactagcgtgcggaagaatgccatacggtttaatagcctgctccgtaatctggtagagaagattcaggcccttcaagcctccgaggtgcaaagtaaaagaaaggaggccacgtgccccagacaccaggagatgttccattatttctgtgaggacgacggaaagttcctttgctttgtgtgccgtgagtctaaagatcataagtctcataacgtttcgctgattgaggaggccgcacagaattatcagggacaaattcaggaacaaattcaggttctccagcagaaagagaaggagaccgtgcaggtgaaagcacagggcgtgcaccgggtggacgtgtttaccgaccaggtcgaacatgagaaacagcgcatcctgactgagtttgagctcctgcaccaggtacttgaggaagagaagaactttctcctgtcacgaatctattggttgggacacgagggcaccgaggcaggcaaacattatgtagcttcgactgaaccccagctcaacgatttgaaaaagttggttgacagtcttaaaactaagcagaatatgcctcctagacagctacttgagccagcacagccacatctgcccagatccgaagagtttcagttcctcaaccccacaccagtgcccctcgaactcgaaaaaaagttatccgaagcgaagagccgtcacgactcgataaccggctctcttaaaaagttcaaagaccagttgcaggccgaccgaaaaaaggacgaaaaccgattctttaaatcgatgaacaaaaacgatatgaagtcctggggcttgctccagaagaataaccataaaatgaacaaaactagcgaacctgggtctagtagcgccggcgggaggacaacaagcggacccccaaatcatcactcttccgcccctagtcattctcttttccgggcctcatctgccggcaaggtgacatttcctgtttgtctcctggcttcttatgacgagatttctggtcaaggggcttcaagccaggacactaagacctttgacgtggccttgagtgaagaactacatgccgccctgagcgagtggctcactgctatacgggcctggttctgcgaagtgccttcttcgtag

SEQ ID NO: 169865 - DNA, 1278 bp, Artificial Sequence
  derived and/or modified sequence
atggccagcggccagttcgtgaacaagctgcaggaggaggtgatctgcccgatttgccttgacatactccagaaacccgtaactatcgattgtggacataatttctgcctgaagtgtattacccaaatcggggagacatcatgcgggttctttaaatgccctctgtgtaaaacgtctgtgcgcaagaacgctattcggtttaattcgctgttgcggaacctcgtggagaaaattcaggccctgcaggccagcgaagtgcagtccaaacggaaggaagctacttgccctaggcatcaagaaatgttccactacttttgcgaggatgacggaaagtttctgtgctttgtgtgtcgtgaatccaaggatcacaagtcacacaatgtgagtctcattgaggaagcagcccaaaattaccagggacagattcaggagcagatccaagtcttgcaacagaaggaaaaggaaactgtgcaggtgaaggcacagggggtgcatagagtggacgttttcactgatcaggtggaacatgagaaacagaggatcctgactgagttcgaacttctgcatcaggtgctggaggaagagaaaaattttttgctctccaggatctattggttgggacatgagggcacagaggctggaaagcactacgtcgccagcactgagccccagctgaatgacctaaagaaactcgtggacagcctcaagaccaagcagaatatgccaccacgccagctgttggaggacatcaaggttgttctctgcagatcagaggaattccagttcttgaaccccacacccgtgcccctggagctggagaagaagctctcagaggcaaagagccgacatgacagtatcaccggcagcctcaaaaaattcaaggaccaactgcaggctgaccgaaagaaggacgagaatcggttctttaagtctatgaacaagaacgatatgaagagctggggcttactacaaaaaaataatcacaagatgaataagacatcagagccgggaagctctagcgccggcggccgcacaaccagcggccctcctaaccatcactcttcagctccgtctcactctcttttcagagcttcgtcagccgggaaggtgacgtttcctgtatgcctgctggcgtcctacgacgagatttcggggcagggtgcttcttctcaggacacaaagaccttcgacgttgcactctctgaggagcttcatgctgccctaagtgaatggctcacagccattcgagcttggttttgcaaggtcccttcatcctag

SEQ ID NO: 169866 - DNA, 1278 bp, Artificial Sequence
  derived and/or modified sequence
atggccagcggccagttcgtgaacaagctgcaggaggaggtgatctgtccaatctgcttagatatcttgcagaagccagtgacaatcgactgtgggcataatttttgcctcaagtgtatcactcagataggcgaaacctcctgcggtttcttcaagtgcccactctgtaagacaagcgtgcggaagaatgctattcgatttaacagcctgctgcgcaacctggtagagaaaattcaggcactgcaggcctccgaggtgcagtcaaaacgcaaagaggcaacctgcccaagacaccaggagatgtttcactacttttgcgaagacgatggcaagtttctctgcttcgtgtgcagggagtccaaagaccacaaatctcataatgtgtctttgatagaagaggcagcccaaaattaccagggtcaaatccaggaacaaatccaagttctgcagcagaaagagaaagaaacagtacaggtcaaagcacagggggtgcacagagtggacgtctttactgaccaggtggagcacgagaaacagagaatcttgaccgagttcgaactgcttcaccaggtgctcgaagaagagaagaactttctgctgagtcgcatttattggcttggccatgaaggcacagaggctggaaagcattatgtagcctccacggagccccagctgaatgacttgaagaaactggtcgactccctgaagaccaaacagaatatgccacctcgtcagctcctcgagcccgcccagccccacctgccccggtctgaggagttccagttccttaatccgacacccgtccccttggagctggaaaaaaagttgtccgaggccaagagcaggcacgactccataactggaagcctgaagaaatttaaagaccagctacaagccgacaggaagaaggacgagaaccggttcttcaagtctatgaacaagaacgacatgaaaagttgggggctgttgcagaaaaataaccataaaatgaacaaaacttccgagcctggtagttcttcagcaggggggaggactacaagtggaccccccaaccatcactcctcagcgccgagccattcgctgtttagagccagctctgcggggaaagttaccttcccggtgtgtctgctagccagctatgatgagatttctggccagggcgccagcagccaagataccaaaacgtttgatgtggcactctcagaagagctgcacgcagccctgagcgagtggcttactgccatacgcgcttggttctgcgaggtaccaagcagctag

SEQ ID NO: 169867 - DNA, 1278 bp, Artificial Sequence
  derived and/or modified sequence
atggccagcggccagttcgtgaacaagctgcaggaggaggtgatctgccctatctgcctcgacattctacagaaacccgttacaatagactgtggtcacaatttctgtctgaaatgtatcacccagatcggggaaacctcgtgcgggtttttcaaatgccccctatgcaaaacatcagtgaggaagaatgccattcggttcaactcattactccggaacctggttgagaagattcaagccctgcaggcttcagaggtgcagagcaagcgcaaagaagccacctgcccccgtcaccaggagatgtttcactacttctgcgaagatgatgggaagttcctgtgctttgtgtgtcgtgaatctaaagatcacaaaagccacaacgtctcgttgattgaggaagccgctcagaattatcagggacaaatccaggagcagatccaggttctacagcagaaagagaaagagacagtgcaggtgaaggcccagggagtgcaccgggttgacgtgtttaccgaccaggtcgaacatgagaagcagaggatcttaaccgaattcgagctgctgcaccaagtcctagaggaggagaaaaatttcttactgagtcggatttactggctcggtcacgaaggcaccgaggcaggcaagcactacgtcgcttcaaccgagccccagctgaacgatctcaagaagctgattgactcactgaaaaccaagcagaatatgcctccacgccaactgctggaaccagcacagcctcacctgcccagatctgaagaatttcagttcttgaaccccactcccgtgccgctcgaactcgagaagaagctgtccgaggcaaagagtcggcacgacagcattacaggctcccttaagaaattcaaagatcagctgcaagccgacaggaaaaaagacgagaaccggttctttaaaagcatgaacaagaacgacatgaagagttggggccttctgcaaaagaataaccacaagatgaacaaaacttctgaaccagggtcttcatcagctggagggcgtaccacctcagggccccccaatcatcattctagcgcaccctcacattcccttttccgtgctagctctgccggcaaagtcacgtttcctgtttgcctgttggctagctacgacgagatcagtgggcaaggcgctagctcgcaagatacaaagaccttcgatgttgccctgtctgaagaacttcacgccgccctgagtgagtggctgaccgctatacgagcatggttttgtaaagtgccctcttcatag

SEQ ID NO: 169868 - DNA, 1278 bp, Artificial Sequence
  derived and/or modified sequence
atggccagcggccagttcgtgaacaagctgcaggaggaggtgatctgccccatttgtctggatattcttcaaaagcccgtaacaattgactgcggacataacttctgtttaaagtgcattacacagatcggcgaaacctcttgtggattcttcaaatgccctctttgtaagacttcagtgcggaaaaacgctattagattcaactcactgctgcgaaacctggttgagaagattcaggccctccaggccagcgaggtccagtcaaaacgcaaggaagctacgtgcccacggcaccaagaaatgttccactatttttgtgaagacgacggcaagttcctctgtttcgtatgctgcgagtccaaagatcacaaaagtcataatgtatccctcatagaagaagctgcccagaactaccaaggccagattcaggagcagatccaggtgctgcagcagaaagagaaagagaccgtccaggtgaaggcccaaggagtgcatcgagtagacgtgttcacggatcaggtcgaacatgagaagcagcgtatactcacagaattcgaactgttacatcaggtcctggaggaagagaaaaacttcctcctttcacggatttactggcttggacacgagggtaccgaggctggcaagcattatgtggcatctactgagccacaattgaacgatctgaagaagcttgtggacagcctcaagaccaaacagaacatgcctccacgacagctactagagcccgcacagcctcatctgccgaggagcgaagaattccagttcctgaatcctacaccggttcccctcgagctagaaaagaaactcagcgaagcaaagagccgccatgacagcattactgggtctcttaaaaaattcaaggatcagctccaagccgaccggaagaaagacgagaacagattcttcaagagcatgaacaaaaatgacatgaaaagttggggactgctgcagaagaacaaccataagatgaacaagacctccgaacccggtagttcctcggctggagggagaactacatcaggccccccaaaccaccactcaagcgctccttcacattcacttttcagagcctcgtccgcaggcaaagtcacttttcctgtgtgccttctggcctcttacgatgagattagcggccaaggagcttcttctcaagacacgaagactttcgacgtcgccttatcagaggagcttcatgccgctctctcagagtggctgacggcaatccgtgcctggttctgcgaagtgccatcgtcctag

SEQ ID NO: 169869 - DNA, 1278 bp, Artificial Sequence
  derived and/or modified sequence
atggccagcggccagttcgtgaacaagctgcaggaggaggtgatctgcccaatttgcctggacattcttcaaaagccagtgactattgattgcggacacaatttctgcctgaagtgtataacacagataggagagacaagctgcgggttctttaagtgtcccctttgcaaaacctcagttagaaagaacgccatccggttcaactccctgttgcgcaatttggtcgaaaagatacaggctcttcaagcctcggaggtccagtccaaacgcaaagaagcaacctgtccaagacatcaggagatgtttcactacttctgtgaagacgacggaaagtttttatgctttgtgtgtagggaatccaaagatcacaaatctcataatgtgagtctgattgaggaagcggctcagaactaccagggtcagattcaggaacagatccaggtgctacagcagaaggaaaaagaaacagtgcaggtcaaggcacagggagttcatcgcgtggacgtctttacagaccaagtggagcatgaaaaacagcgaatcctgaccgagttcgagctgctccatcaagtcctggaggaggaaaaaaacttcctgctgagccgtatatactggctggggcacgagggaacagaagccggcaaacactacgtggcatcaactgaacctcagctgaatgatcttaagaaactggttgattccctcaaaaccaaacagaatatgccacccaggcagctcctggaagacatcaaagtggtactttgtaggtctgaggaattccagttcctcaaccccacccccgtgcccttggagcttgagaagaagctgtcagaggcgaaatcacggcacgactccataaccgggtcattgaaaaaattcaaggatcagttgcaggcagaccgcaagaaagatgagaatagatttttcaagtctatgaataagaacgatatgaagtcatggggcctgctgcagaaaaataatcacaaaatgaacaaaacatccgaacccggctcttcctccgcagggggtaggaccactagcggaccacccaaccatcactcctcagccccttcgcactcactgtttcgtgctagcagcgctggcaaagtaacattccctgtgtgcctcctggccagctacgatgagattagtggacaaggcgctagctcccaggataccaagacctttgatgtcgccctgtctgaagagctacacgcggccctgagtgaatggctgacggcgatcagagcctggttctgtgaagtccctagcagctag

SEQ ID NO: 169870 - DNA, 1278 bp, Artificial Sequence
  derived and/or modified sequence
atggccagcggccagttcgtgaacaagctgcaggaggaggtgatctgtcccatttgtctggacatcctgcaaaaaccagtcacgatcgattgcgggcacaatttctgtctgaagtgtattacacaaatcggggagacgagctgtggcttcttcaaatgcccactgtgcaagactagcgttcggaaaaatgccatccgcttcaacagtctccttcgaaatctggtggagaagatccaagcccttcaagcatctgaagtgcagtcgaaacgcaaggaggccacctgtccacgtcaccaggaaatgtttcattatttctgtgaggacgacggcaaattcctgtgcttcgtgtgtcgagagtccaaggaccataaatcccacaatgtcagccttatcgaagaggccgcgcagaactatcaggggcagattcaagagcagatccaggtcctgcagcagaaggaaaaggagactgtacaggtaaaagctcagggggtacacagagtggacgtttttaccgaccaggtcgaacacgagaagcagcgcatcttaaccgagttcgagcttctgcatcaggtcctcgaggaggaaaagaacttcctgcttagccgcatatattggctgggccacgaagggaccgaggctgggaagcattacgttgcttcaacggaaccgcaacttaacgatcttaagaagttagttgattcgcttaagaccaaacaaaatatgcctcctcgccagcttttagaacctgctcagcctcacctccctcggagcgaggaattccagttcctgaaccctacaccggtccccctcgaattagagaagaaactcagcgaagccaaatctcggcatgacagcatcactggttcccttaagaaattcaaggaccaattacaggcggataggaagaaagatgaaaataggttttttaaaagtatgaataagaatgacatgaagtcctggggactgttacagaagaacaatcacaaaatgaacaaaactagtgaacctggtagctctagcgccggaggccggactaccagcggcccaccgaaccaccatagctcagccccgtcccactcactgttccgcgcctcttctgccggaaaggtgacctttcctgtatgcctcttagcttcctacgacgaaatatccggacaaggtgcctcatcgcaggacactaagacatttgacgtggcccttagcgaggaactgcacgcagctttgagcgagtggctcaccgcgatccgtgcctggttctgcgaggtcccgagtagttag

SEQ ID NO: 169871 - DNA, 1278 bp, Artificial Sequence
  derived and/or modified sequence
atggccagcggccagttcgtgaacaagctgcaggaggaggtgatctgtcctatctgcctcgacattttgcagaagcccgtgacaatcgattgcggccacaacttttgtttaaagtgtatcacccagatcggcgagactagttgcgggtttttcaaatgtcccttatgcaaaacaagcgtgcggaaaaacgccatccgctttaatagtctgctaaggaacttggtggaaaaaattcaggctctgcaagccagcgaggtgcaatcaaaaaggaaggaggccacgtgtcctagacaccaggaaatgttccattacttctgtgaagatgacggtaaattcttatgcttcgtttgttgcgagtccaaagaccacaagtcccataacgtctccctgatcgaggaggcagcacagaactatcagggccaaatccaggagcagatccaggtgctccagcagaaggagaaggagaccgtgcaagtcaaggctcaaggcgtgcaccgggtcgatgtgttcacagatcaggtagaacacgaaaagcaacgcattttgaccgagtttgaactgttgcaccaggtgctcgaagaggagaagaattttctactgagtaggatatactggttagggcacgaaggaacagaagctggtaagcattatgtggcctcaacagaacctcagttgaatgacctcaagaagctcgtagactccctaaaaacgaagcagaacatgcctccaaggcagctgttagaggatattaaagttgtgttgtgcaggagtgaggaatttcagttcttaaatccgacccctgtgcctttggagctggagaagaagttgtctgaagcaaagtcacgccatgactcaatcacaggaagcttgaaaaagtttaaagaccagctgcaggccgatcgcaagaaagatgagaatagattcttcaaaagcatgaataaaaatgacatgaagtcctggggtctcctgcaaaagaacaatcacaaaatgaacaaaacctcagagcctggctcaagctctgccggcggtcgaaccactagcggtccgcccaaccaccacagtagcgcgccctctcactccttatttcgcgcatcaagcgccggaaaagtcacatttccagtctgtcttctcgcgagttacgacgagatctcaggccaaggcgccagtagtcaagacactaagacctttgacgtagctctgagtgaggagctgcatgcagccctgtccgagtggctgaccgcgatccgtgcatggttttgcgaagtgccatcttcatag

SEQ ID NO: 169872 - DNA, 1278 bp, Artificial Sequence
  derived and/or modified sequence
atggccagcggccagttcgtgaacaagctgcaggaggaggtgatctgccccatttgtctggacatattacagaagcccgtcacaatcgactgcggccataatttctgccttaagtgcatcacacagattggagagacgagttgcggatttttcaagtgccctctgtgtaagacttctgttcgaaaaaacgctattcggtttaacagcctcctgagaaacctggtcgaaaagattcaggccttgcaggcctctgaagtccagtctaagaggaaggaggcgacatgtcctcgtcatcaggaaatgttccattacttctgcgaagacgatggaaaatttctgtgctttgtgtgccgggagtccaaggaccacaagagccataatgtaagcctcattgaggaggctgcccagaattatcagggccaaattcaggagcaaatccaggttctacaacagaaagaaaaggaaacagtgcaagtcaaggcacagggagtgcatcgggtcgacgtattcactgatcaggtggagcacgaaaaacagcgcatcctcacagaatttgagctgctgcaccaggtcctggaggaggagaaaaattttctgctttcccggatatactggctgggacatgaggggactgaggccggcaagcattacgtggcctccacagagccccagctgaatgacctgaagaaacttatcgactcactgaagaccaagcagaatatgccaccccggcaactgctcgaggatattaaagtcgtgctgtgtagatctgaagagtttcagtttctcaatccaacaccggtgccgctggaactcgaaaaaaagttgtctgaggctaagtcaagacatgatagcattacagggtctctcaagaagttcaaggaccagttgcaggcagatcggaaaaaggacgagaatcgcttttttaagtcaatgaacaaaaatgacatgaaaagttggggactgcttcagaagaataaccacaagatgaacaagacttccgagccaggcagctcttccgcgggcggacggactacaagcggcccccctaatcatcactcgagcgcaccatctcacagcctattccgggcaagctcagccggtaaagtgacattcccagtgtgcctgcttgcgtcttacgatgaaatcagcgggcagggcgctagtagtcaggacacaaagaccttcgacgtggcgctgagcgaagaactgcatgcggccctctctgagtggttaacggccatccgagcgtggttttgtaaagtgcccagcagctag

SEQ ID NO: 169873 - DNA, 1278 bp, Artificial Sequence
  derived and/or modified sequence
atggccagcggccagttcgtgaacaagctgcaggaggaggtgatctgtccaatctgtctcgatatactccagaagccagtgaccattgattgtggacacaatttctgtcttaaatgcataacccaaatcggcgagacttcatgcggattctttaaatgccctttgtgcaagacaagtgtaagaaagaatgccattcgctttaatagcctcctgcgcaatctggtggagaaaatccaggcgttgcaagcatccgaggtgcaatccaagagaaaggaagctacctgccctagacaccaagagatgttccattatttctgtgaggatgacggcaagttcctttgcttcgtttgcagggagtctaaggatcacaagtcacataacgtctcattgattgaggaggcagcacagaattaccagggccagatccaggaacagatccaggtgctgcagcagaaggagaaggagaccgtacaggtgaaagctcagggggtccatagggtagatgtgttcactgaccaagtcgaacacgagaagcaaagaatccttacggagttcgagctcctgcaccaggtgctggaagaagaaaagaactttctgttgagccggatttattggttgggccatgagggaaccgaggcggggaagcactatgtcgcgtctaccgaacctcagctcaacgatcttaaaaagttggtggattccctgaagactaaacagaatatgccaccacgccagctgctggagcccgcacagccccacttgcctcgaagtgaggaatttcaattcttaaatccaacaccagttccgctggagctggaaaagaaactgtcagaggctaaatcccgacatgatagcataacgggctctctaaagaagttcaaggaccaactgcaggcggataggaaaaaggatgaaaatcggttctttaaatcaatgaataagaacgacatgaaaagttgggggctcttacaaaaaaataaccacaagatgaacaagacgagtgaacccggctctagctccgccggaggacgaacaacaagtggtccaccaaatcatcactccagcgctccctcacactcgctcttcagagcctcctctgcggggaaagtcacattcccagtatgcctgctcgccagctacgacgaaatttctggccagggcgcttctagtcaggacacaaaaacatttgatgtggctctgtcagaagagctacatgccgcacttagcgaatggttgacagccatccgggcctggttctgcaaggtgccctcttcctag

SEQ ID NO: 169874 - DNA, 1278 bp, Artificial Sequence
  derived and/or modified sequence
atggccagcggccagttcgtgaacaagctgcaggaggaggtgatctgccccatctgcttggacatcttacaaaaacctgtgaccatagactgcggacacaatttttgtctaaagtgtataactcagataggagagaccagttgcggctttttcaagtgcccgctttgtaaaacatccgtacggaaaaacgccattagatttaactcactgctgcgtaatctcgtggagaagatccaggcacttcaggcatctgaggttcaatcaaaaaggaaagaagctacctgtccaaggcatcaagagatgtttcactacttctgtgaagatgacgggaaattcctctgcttcgtgtgtcgtgagagtaaagaccataagtcccataacgtgtcccttatagaggaagcagctcagaattatcaaggacagatccaggagcaaattcaagttctccaacagaaagaaaaggaaaccgtgcaggtcaaggctcagggagtgcatcgggtggacgtcttcacagatcaggtcgagcacgagaaacagagaattcttactgagttcgagctgttgcaccaggtgttggaggaggagaaaaattttctcctgagtaggatttactggcttggccacgagggaacagaagccggaaagcactatgtcgcaagcaccgaaccgcagttaaatgatcttaagaaattggtggatagtctgaaaacaaagcagaacatgcccccgcggcaactgctggaagacattaaggtcgtcttgtgcaggtctgaagaattccaatttctcaatcccacgcctgtcccattagaattggagaaaaagctgtccgaggccaaaagccgacacgactctatcactggaagtctcaagaagtttaaggaccagctgcaggcagaccgcaaaaaagatgagaacagattttttaaaagcatgaacaaaaatgatatgaaatcatggggattgttacaaaaaaataaccacaagatgaacaaaacttctgagcctggatcaagctctgccggaggccgtacgacgtcagggcccccgaaccaccacagtagtgcgccctcgcattccttattccgagccagtagcgcaggcaaggtcacattccctgtttgtctccttgcatcatacgacgagatcagcggacagggcgcgtcaagccaggataccaagacgttcgacgttgcgctcagtgaggagctccatgccgctcttagtgagtggttaaccgctattcgggcatggttttgcgaggttccatcttcgtag

SEQ ID NO: 169875 - DNA, 1278 bp, Artificial Sequence
  derived and/or modified sequence
atggccagcggccagttcgtgaacaagctgcaggaggaggtgatctgtccaatctgccttgacatactgcagaagcctgtcaccattgattgtggacataacttctgtttgaaatgcatcacccagatcggggaaacatcatgtggcttttttaaatgcccactctgtaagacctccgtgcgaaagaacgcaatccgattcaatagccttttgcgaaacttggtcgagaagattcaggccctccaggcgtccgaagtgcagtccaagcgaaaagaggccacctgtcctcgtcatcaggagatgtttcattacttttgcgaagatgatggaaagttcttatgctttgtgtgtcgggaaagcaaagatcacaaatctcataacgtaagtctgatcgaggaagcagcacagaattaccagggtcaaatacaagaacagatccaggtgctccaacaaaaggaaaaggaaaccgtgcaggtcaaggcgcaaggtgtccaccgggtcgacgtctttaccgaccaagtggaacacgaaaaacagagaattctgaccgaatttgaactactccaccaggtccttgaggaagaaaaaaattttctgttgtcccgcatctactggcttggccacgaagggaccgaagcagggaagcactacgtggcaagtacagaacctcaactgaatgacctgaaaaagttggtggatagtctaaagacaaagcaaaatatgcctccgcggcagttactggaggatatcaaagtggtgctgtgccgctcggaagagtttcagtttctgaatcctaccccggtgcccctggagctggagaaaaaactgtcagaggcaaagtctagacacgactccatcactggcagtttaaagaaattcaaggaccaattacaggcagacaggaagaaggacgaaaacaggttctttaaatcaatgaataagaatgatatgaaaagctggggccttctccagaagaacaatcacaaaatgaacaagacttctgagccgggctcttccagcgccggaggcagaacaacctccgggcctcccaatcaccactcaagtgcccctagccactctctgttccgagcttcttctgcaggaaaggttacatttcctgtgtgtctgttggcctcctacgacgagatcagtggccagggcgcctcctcgcaagacacgaaaacctttgatgttgcgttaagcgaggaactgcacgccgctctaagtgaatggctgactgcaatcagggcctggttctgcgaagttccaagcagctag

SEQ ID NO: 169876 - DNA, 1278 bp, Artificial Sequence
  derived and/or modified sequence
atggcaagcggccagtttgttaacaaacttcaggaagaggtgatctgtcctatctgtcttgacattctgcagaaacccgtgacgatcgactgtgggcataacttttgcttgaagtgcattacacagatcggcgagacgtcttgtggattttttaagtgccccttgtgcaagaccagtgtgagaaaaaacgccattaggtttaattcactactgcgaaacctggtggagaaaatacaggcacttcaggccagcgaagtgcagagtaagcgtaaggaggccacctgcccacggcatcaagaaatgtttcattacttttgcgaggatgacgggaagttcttatgcttcgtctgttgcgaatcaaaagatcataagagtcacaacgtgtctttgatcgaggaggctgcacagaactaccaaggtcagattcaggaacagatacaggtgctgcagcagaaggagaaggagactgtccaggtgaaagcccaaggagttcaccgcgtggacgtgttcaccgaccaggttgagcatgaaaagcaacgcattctgacagaatttgaattgctgcatcaagtgctcgaggaggaaaaaaacttcctcttgtctcgcatctactggctagggcatgagggcactgaggctggcaagcattacgtagcttccacggagcctcagctgaacgacctgaagaagctggtggatagcctgaaaaccaagcagaacatgccccctaggcagctcttagaagatattaaggtagttttgtgcaggtcggaagaatttcagttcctgaaccctacgcctgtgcccctggagctggagaagaagctctcggaggcaaaatcgaggcacgattctatcaccggttccctgaagaagttcaaagatcagctccaagccgacaggaaaaaggatgaaaaccggtttttcaaatctatgaacaaaaatgatatgaagtcttgggggttactccaaaagaacaaccataaaatgaacaaaacctccgaacccggttcttcgtccgcagggggtcgcaccacgtcgggaccccctaaccaccacagctcggcgccttcccatagcctgtttagggcttcatcagctggaaaagtgaccttcccagtttgcctgctggcatcatatgatgaaatctcaggccaaggggcatcttcccaggataccaaaacattcgatgtcgcactgtcagaggagcttcacgccgctctgagcgaatggctcactgccatcagggcatggttttgtgaggtaccatcttcctag

SEQ ID NO: 169877 - DNA, 1278 bp, Artificial Sequence
  derived and/or modified sequence
atggcctctggacagtttgtcaacaagctccaggaagaggtgatttgccccatttgccttgatatactgcagaagccggtaaccatagattgtggtcacaacttctgcctgaagtgtattacccagatcggcgaaacgtcgtgcggatttttcaagtgccccctctgcaagaccagcgtgcgcaaaaacgcaatcaggttcaactccctgctgcgaaatttggttgaaaagatccaggccttgcaggcctccgaagtccaatctaagcgcaaagaagcaacctgtcctaggcaccaggaaatgttccactatttttgtgaggacgacggcaaattcttatgctttgtttgtcgcgaatctaaagaccataaaagccataatgtcagtctgattgaggaggctgctcagaactaccagggacagattcaggaacagatccaggttctccaacaaaaggagaaagaaacggtgcaggtgaaagcccagggcgtgcaccgggttgacgtgtttacagaccaggtggaacacgagaaacaaaggattctgaccgaatttgaattgctccaccaagtgttagaagaagaaaaaaactttctcctctctcggatctattggctcggtcacgaaggcacagaggccggaaaacattacgtggcgtctactgagccgcagctaaatgatctgaagaagttagttgattcattgaaaaccaaacagaatatgcctcctcggcagctgctcgagcccgcacagccacatttgccaagatcagaagagtttcagttcctgaaccctacaccagtgcctctagagcttgaaaaaaaactctcagaggcaaagagccgccacgatagtatcaccggtagtcttaagaaattcaaggaccagctccaggccgataggaagaaagatgaaaaccggttttttaagtcgatgaataaaaatgatatgaaaagttgggggctgttacagaagaataatcataaaatgaacaaaaccagtgaacctgggtccagtagcgccggtggcaggacgacctcaggaccgcctaaccaccattcatccgcaccaagccattcactgtttcgggcttcctcagcaggaaaggtgaccttccctgtttgcctgctagcttcctacgacgaaatctccggacaaggtgcatcctctcaggataccaaaacgttcgatgtcgcactgagtgaggagctccacgccgctctttctgaatggctgacagcaatcagggcatggttctgtgaggtcccctcatcttag

SEQ ID NO: 169878 - DNA, 1278 bp, Artificial Sequence
  derived and/or modified sequence
atggctagcggacagttcgtgaacaaattgcaagaggaagtgatctgtcctatatgtttggacatactccaaaagcctgtgaccatcgattgcggtcataatttttgtctcaaatgtattacacaaattggtgagacttcctgtggcttcttcaaatgccccctgtgtaagacatctgttcggaagaatgcaatccggtttaactccttgctccgtaacttggttgaaaagattcaagcgctgcaagcaagtgaagtgcagagtaaacgcaaagaggccacatgccctcggcaccaggagatgtttcactacttttgtgaggacgacggtaagttcctatgctttgtctgccgcgagagtaaagaccacaagagccacaacgtgtcactcatagaggaagcggcacagaactaccaggggcagatccaggagcagattcaggtattgcagcagaaggaaaaggaaacagtacaagtcaaggcacagggtgtacatcgggtggatgtgtttactgaccaggttgagcatgaaaagcagcgaatcttgacagagtttgagctactccaccaggtgctggaagaggaaaagaattttctcctcagccgcatctattggctgggccacgagggcacagaagccggtaaacattatgtggcctctactgagcctcaactgaacgacttgaagaagctcgtggattcattgaaaaccaagcagaatatgccaccaagacagctcctggaggatatcaaagtggtgctgtgtcgctccgaagaatttcagttcctcaacccaacgccagtgccccttgagttagagaaaaagctctctgaggcaaaatctagacatgatagcatcacaggctctctgaagaagttcaaggaccaactccaagctgaccgtaaaaaggatgagaataggttcttcaagtcaatgaacaaaaatgacatgaaaagctggggattattgcaaaagaacaatcacaagatgaacaaaacttccgagcccggaagcagcagcgcgggaggtaggacgaccagcggaccgcctaaccatcatagcagcgctccatcccatagcctgttcagagccagctccgcaggaaaagtgaccttccccgtgtgtctcttggcttcctatgacgaaatatcaggccagggcgctagttcacaggacacaaagactttcgacgttgctctgagtgaggagctccacgccgcactgagtgaatggctgactgccatccgggcatggttttgtgaagtcccttcttcatag

SEQ ID NO: 169879 - DNA, 1278 bp, Artificial Sequence
  derived and/or modified sequence
atggcctcaggccagttcgtcaacaaacttcaggaggaggttatctgtcctatttgcctcgacatcctgcagaaacccgtgacgatcgattgtggccataatttttgtctgaaatgcataacgcagataggggaaacctcttgtggtttctttaagtgcccgttgtgtaaaacctccgttcggaagaatgccatacggttcaacagtctgctgaggaacttggtcgaaaagattcaggccctacaggcaagcgaagttcagagcaagagaaaagaagccacttgcccgaggcaccaggagatgtttcattatttctgtgaagatgatggcaagttcctctgttttgtgtgtcgagagagtaaagaccataagtctcataacgtgtcacttatcgaagaggctgcccagaactatcagggccagatccaagagcagattcaggttctgcagcagaaagagaaagaaacagtccaggttaaggctcaaggagtacatagggtagatgttttcaccgatcaagtggagcatgagaagcagagaatcctgaccgaattcgagttgctgcatcaagtccttgaggaggaaaaaaatttccttctgtcgcgcatctattggttgggtcatgagggtactgaggctggaaagcattatgtggccagcacggagccccagctgaacgacttaaaaaagctagtggattcactgaagaccaaacagaacatgccccctaggcagctgctcgaggatataaaggtagtgctgtgcaggagtgaggaatttcagtttcttaatcccaccccagtccctcttgaattagagaagaagctgagcgaggccaagtctcggcatgacagcataaccggcagtctgaaaaaatttaaggatcagctacaggccgaccgaaaaaaagacgagaaccgttttttcaagtccatgaacaagaacgatatgaaaagttggggactcttgcagaagaacaatcacaagatgaacaagacgtctgagccgggtagcagtagtgccggtggtcgcactacctcgggcccacctaaccaccacagctcagcgccatctcacagcttatttcgggcatcctccgcgggtaaagtgacctttccggtgtgtctcctggcctcttatgatgagatctccggtcaaggggcaagttcacaggacaccaagactttcgacgtggccttgtctgaggagctccatgccgcattgagtgagtggctgacggccatcagagcctggttctgcaaagtcccatcatcctag

SEQ ID NO: 169880 - DNA, 1278 bp, Artificial Sequence
  derived and/or modified sequence
atggccagcggacaatttgtcaacaaactccaggaagaggtcatatgcccaatttgcctagacatactccaaaaacctgtgactatcgactgcggccacaacttctgcttgaagtgtattacgcagatcggcgagacctcctgtggcttttttaaatgcccgctttgcaagacgtctgttcgtaagaacgcgatacggtttaatagcctcctacggaacctagtggaaaagattcaagcccttcaggcatctgaggtacagagtaagaggaaggaagcaacttgtccaagacatcaggaaatgtttcactacttctgtgaagacgatggtaaattcttgtgttttgtgtgcagagaaagtaaagaccataagtcacacaacgtgtccctcattgaagaagctgcccagaactaccagggacagatccaagaacaaatacaggtattgcagcagaaggaaaaagaaaccgtccaggtaaaggcacagggagtgcatcgcgtcgacgtgttcaccgaccaggtcgagcacgagaagcagagaatcctcacagagttcgagttgttacatcaggtgttggaagaggaaaagaattttctgctctctagaatctactggctgggccacgaaggcacagaggctgggaagcactacgtggcctctactgagccccagttaaatgaccttaaaaaacttgtggacagtctcaagaccaaacagaatatgccccctagacagctcctagaggacattaaagttgtactctgtagatctgaagagtttcagtttttaaacccaacacccgtcccattagagctcgaaaaaaaattgtccgaagcaaaaagccgccatgattcaatcacagggagcctgaaaaaattcaaggaccagcttcaggctgaccggaaaaaagacgagaatcggtttttcaaatcaatgaataaaaatgatatgaaaagttggggtctgctccagaaaaataatcacaaaatgaataaaacatccgagcctggcagctcatcagctgggggtagaactacaagcggtcctccaaatcaccatagtagcgcacctagccactctcttttccgtgccagctctgccggaaaggtgaccttcccagtctgcttgctggccagctatgacgaaatttccggacagggtgcaagctctcaagacacgaagaccttcgacgtggctctcagtgaggagttacacgccgcactctctgaatggctaaccgctattcgggcatggttctgtgaggtgccctcctcatag

SEQ ID NO: 169881 - DNA, 1278 bp, Artificial Sequence
  derived and/or modified sequence
atggcctccggacagttcgtaaataagctccaagaagaggtgatctgtcccatttgcttggatatattacagaagccggtgacaatagattgtgggcacaatttctgtctgaagtgcattacgcaaatcggcgagacttcatgcgggttctttaagtgcccactctgcaagacatctgtccgcaaaaatgcaatccggttcaacagcctcctgaggaacctggtggaaaagatccaggctcttcaggccagcgaagtccagagcaaaagaaaagaggccacctgtccacggcaccaagaaatgtttcattacttctgcgaagatgacggaaaatttctgtgctttgtctgcagagaatctaaggatcacaagtcccacaatgtatcccttatagaagaggccgcacaaaactatcagggtcagatccaggaacagattcaggtgctccaacagaaagagaaagaaactgtccaggtcaaagcacagggagtccacagagttgatgtgttcacagaccaggtggaacatgagaagcagcggattctaactgagtttgagctgctgcatcaggtcttagaagaggagaaaaatttccttctgagtcgtatttactggctggggcatgagggaacggaagctgggaagcactatgtcgcatccaccgagcctcaactcaacgacctgaagaagctggtggattcactgaagacgaaacagaacatgcccccacgccagctgctcgaggacatcaaggtggttctgtgccggtctgaagagttccagtttctcaacccaaccccagttccattggagctcgagaagaagctgagtgaggctaagagtagacacgatagcattacaggttccctcaagaagttcaaggaccaactccaggcagatcgcaaaaaagatgagaatcggtttttcaagtcaatgaacaagaatgatatgaagtcctggggactcctgcagaagaacaaccacaagatgaacaagactagtgaacccggtagtagttctgccggaggtcggacgactagcggaccacccaaccatcattcaagcgcaccctcacatagtctgtttagagccagtagtgccggtaaagtcaccttcccagtctgtctcctggcctcttacgacgagatctccggacagggagccagcagtcaagataccaagacttttgatgtggccctgtccgaggagctgcacgccgcactgtctgagtggttgacggccataagggcctggttttgcgaggtcccaagtagctag

SEQ ID NO: 169882 - DNA, 1278 bp, Artificial Sequence
  derived and/or modified sequence
atggcatctgggcaattcgtgaacaaactgcaagaggaagtcatctgtcctatttgcttagatatcctgcagaagcccgtgaccatagattgcggccataacttttgcctgaagtgcatcacccagatcggggagaccagctgtggcttttttaagtgtccattgtgcaaaacgtctgtgagaaaaaatgcaatccggttcaacagcttactgagaaatttagtggaaaagattcaagccctgcaggcttctgaagtccaatctaagcggaaggaagcgacctgtcccagacatcaggagatgttccattatttctgcgaagatgacgggaaattcctgtgcttcgtgtgtcgtgaatccaaggatcacaagagtcataatgtgtctctgattgaggaggccgctcaaaactatcaggggcagattcaggagcaaatacaagtcctacagcagaaggaaaaggaaaccgtccaggtcaaggctcagggggtccatcgagttgacgtgtttactgaccaggtcgagcatgagaagcagcggatactcacagagttcgagttactccaccaggtgttagaggaggaaaaaaacttcttactgtctcgcatatattggctcggccacgagggaaccgaggcaggaaaacattacgtagcttccacggaacctcagctgaacgatttgaaaaagctggtggattcactcaaaactaagcagaatatgccccctaggcagctgcttgaggacattaaggtggtgctctgccggagcgaggagtttcaattccttaacccgacaccagtcccactggagttggagaaaaaactctccgaggctaaatcccgccacgactctattaccggctctttaaagaagtttaaggatcagctccaggctgatcgaaagaaggatgagaataggttcttcaagtccatgaacaaaaacgatatgaagagttggggactcctccagaaaaacaaccacaaaatgaacaaaaccagtgagccgggatcgtcttccgcgggagggaggactacgtccggaccaccgaaccaccactcgagcgcaccatcgcattcgctcttccgagctagctctgctggcaaggtcacctttcctgtgtgtctgctggcatcctatgacgagatttcagggcagggagccagttcacaggatacaaaaaccttcgacgtggccttgagcgaagagctccatgccgcactaagtgagtggctgacagcaatccgggcatggttctgtgaagtcccgagttcatag

SEQ ID NO: 169883 - DNA, 1278 bp, Artificial Sequence
  derived and/or modified sequence
atggcctcaggccagtttgtcaacaagctccaggaggaggtaatttgcccaatttgtctcgacattctgcagaagccggtcacgatcgattgcgggcacaatttctgtctcaagtgcatcacccaaattggggaaacctcttgtggatttttcaagtgtcctctttgtaagacctcagtgcgtaaaaatgcaatccgcttcaactctctgctccgcaacttggtagagaagattcaggctctccaggcatcagaagtgcagtctaagcggaaggaggccacatgcccacggcaccaagaaatgttccactacttttgtgaggacgatggcaagttcttatgcttcgtatgtagagagagtaaagaccacaaaagccataacgtctccctcatagaggaggcggctcaaaattatcagggacagatacaggaacagattcaggtgttacagcaaaaagaaaaggagactgtacaggtcaaagcgcagggagtgcaccgcgtggacgtttttaccgatcaggttgagcatgagaagcaacgaatcttaactgagttcgaactgctgcaccaggttttggaggaggagaagaatttcctgctaagcagaatatactggcttggccacgaaggtacagaagccggaaagcattatgttgcaagtaccgaacctcagttaaacgacttgaagaagctgatagattccctgaagacgaagcagaatatgcctcccaggcagctgctggaggatattaaggtggtgctctgccggtccgaggaatttcagttcctcaatcccacccccgtccccctagagctcgagaagaagctctccgaagctaagtctcgccatgattccattacaggctcgttaaaaaaattcaaggatcagttacaagcagacaggaaaaaagacgagaaccggtttttcaagtccatgaacaagaatgacatgaagtcctggggactgctgcagaagaacaaccataaaatgaataagacttctgaacccggatcctcaagcgctggcggacggacaactagtggcccacccaaccaccactctagcgctccctctcattcgctgtttagagccagtagcgccggtaaggtaaccttccccgtgtgccttctggcctcttacgatgaaatcagtgggcagggtgcctccagtcaagatacaaaaacattcgacgtcgccctgtctgaggagctccatgcagccctaagcgaatggttgactgctattagagcctggttttgcaaagtgccatcctcatag

SEQ ID NO: 169884 - DNA, 1278 bp, Artificial Sequence
  derived and/or modified sequence
atggctagcgggcaatttgtgaataaattacaagaggaggttatctgtccaatttgcctggacatattacagaagcctgtcaccatcgactgtggccataatttctgtctgaagtgtattacccagataggcgagacgagctgcgggttctttaagtgccccctctgcaaaacgtcggtgcgaaaaaatgccattcggttcaactcactcctccgcaatttagtcgagaaaatccaggcccttcaggccagtgaggttcagagtaagcgtaaagaggccacctgtcccaggcaccaggaaatgtttcattacttttgtgaggacgatggcaaatttctatgcttcgtgtgtagggagtccaaagatcacaagtcccacaatgtgtctttgatagaggaagcagcacagaactaccagggtcaaatccaggaacagatacaagttctgcagcaaaaagagaaagaaactgtgcaagtgaaagctcagggtgtgcatcgtgttgacgtgtttacagatcaagtcgaacatgaaaagcaaaggatactaacggagttcgaattgttacaccaggtacttgaggaggaaaagaatttcctccttagccggatctattggctggggcacgagggaaccgaggcaggcaagcactacgtagcctccacagagccccagctcaacgatctcaagaagctggtggactctttgaaaaccaagcagaatatgccaccacggcagctcctggaagatattaaagttgtgctgtgtcggtcagaggagtttcagttcctcaaccccacgcccgtccccctcgagcttgaaaagaagctttctgaggctaagtctcgacatgactctattaccggatctctcaagaagtttaaggaccaactccaggcggaccgcaaaaaggatgaaaatagattcttcaagtctatgaataaaaacgacatgaaaagctgggggctgttacaaaagaacaatcacaaaatgaataaaacatcagagcctggcagctcttccgctggaggacgcacaacttctggtccaccgaaccatcactcgtccgctccgtcgcactcattgttccgcgcaagtagcgccggtaaagtcacgtttcctgtgtgtctgctggctagctatgatgagatatctgggcagggagctagttctcaggacacaaagacctttgacgtggcgcttagcgaggaactgcacgccgctctgtccgagtggcttacagcgattagggcgtggttttgcgaagtgcctagcagttag

SEQ ID NO: 169885 - DNA, 1278 bp, Artificial Sequence
  derived and/or modified sequence
atggcatccggacagttcgtcaacaagctgcaggaggaagtgatctgtccaatttgcctcgacatcctgcagaagcctgttacgatcgattgtggccataatttttgtctgaagtgcattacccagattggcgagacctcttgcggtttctttaaatgccccctatgtaagacttctgtgaggaagaacgcgatccggtttaacagcttattaagaaacctggtggagaagattcaggctctgcaggcctccgaggtgcagagcaagcgcaaagaagcaacatgccctaggcatcaggagatgtttcactacttctgcgaagacgacggaaagttcctttgctttgtatgtcgggaaagcaaggatcataagtctcacaacgtgtcgctgatcgaggaggcagcccagaattaccaggggcagatccaggagcagatccaggtgctccagcagaaggagaaggagacggttcaggtgaaagcccaaggagtgcatcgggtcgatgtgttcaccgaccaagtcgaacatgagaagcagagaatcttaaccgaatttgagctcctgcaccaggtccttgaggaggagaagaactttttgttgtcacgtatttattggttggggcacgaaggtacagaggctggaaaacactacgtcgcaagcactgagcctcagctgaatgacctaaagaaactggtcgacagtttgaaaaccaaacagaacatgccccctaggcaattgttagaacccgcacagcctcatctcccccgaagtgaggagtttcagttcttaaacccaacccccgtccccctagaactcgagaagaaattgagcgaagccaaaagccgccacgactctataactgggtctttaaagaagttcaaggaccaactacaggcagatagaaaaaaggatgagaataggttttttaaatccatgaacaagaacgacatgaagtcctggggcctcctgcaaaagaacaatcataagatgaataaaacctcagaaccaggatcttcaagcgctggcggacgcacaacatcagggccacccaatcaccactctagtgcgcctagccactccttgttccgagctagtagcgctggcaaggtgacgttccccgtgtgtctcttggcttcctatgatgaaattagcggtcagggcgcatcgagtcaggacaccaaaactttcgacgtggccctctctgaagagctccacgcggcactgagcgagtggctcaccgctatcagggcctggttttgcgaagtaccgtcctcttag

SEQ ID NO: 169886 - DNA, 1278 bp, Artificial Sequence
  derived and/or modified sequence
atggctagcggtcagttcgtaaacaagttgcaagaggaggtgatttgccctatctgcttggatattctgcagaaacctgtcacgatcgattgtggccataatttttgcttgaaatgcataacacagatcggagaaacaagctgcggcttctttaaatgtcccctatgtaagacaagtgttcgaaaaaacgcaatccggtttaactcactactacgcaaccttgtggagaagatacaggcccttcaggcttcagaggtacaatccaaacggaaggaggctacctgtccgcgtcaccaagagatgtttcactatttctgcgaggacgatggaaagttcttgtgcttcgtctgccgggaatccaaggatcataagtcacataatgttagccttatagaggaggcagcacagaattatcagggacaaattcaggaacagatccaagtgcttcagcaaaaggagaaggagaccgtgcaggtaaaagcacagggagtgcacagggtcgatgtattcaccgatcaggtggaacacgaaaagcagagaattctaacagagtttgaactactgcaccaagtgttagaggaggagaagaactttttattatctcggatatactggcttgggcacgagggcactgaagcaggtaagcattatgtggcttccactgagcctcaattgaacgacctaaagaagctagtggatagtctgaagaccaagcagaatatgcctccaagacagcttctggaagatatcaaagtggtcctttgcaggtcagaagaattccagtttttaaaccccacaccggtaccgctggagctcgagaagaagctcagtgaggctaaatctcggcacgacagcatcactggcagcttgaagaagtttaaagatcagttacaggctgaccgtaagaaggatgaaaacaggttctttaagtccatgaacaaaaacgacatgaagagttggggcctgctacagaaaaacaatcacaaaatgaataagacatctgagcccggttcctcctctgccggaggccgaaccacctcagggccaccgaatcaccattcttcagctccttcccattcactgttccgcgcatcatccgccggaaaggtaactttccccgtctgtctgctcgcctcttacgatgagatctcgggtcagggtgcatccagtcaggatacaaaaacgtttgatgtcgccctgtctgaagagctgcatgccgctctgagtgagtggttaactgctatacgggcatggttctgcaaggtgccctcctcttag

SEQ ID NO: 169887 - DNA, 1278 bp, Artificial Sequence
  derived and/or modified sequence
atggctagcgggcagttcgtcaacaaactgcaggaggaagtgatttgtccaatctgtctggatatcttacagaaaccagtgactatcgactgtgggcacaacttctgtctgaaatgcatcactcaaatcggggaaacatcttgtggtttttttaagtgtcctctctgcaaaacatccgtccggaaaaatgctattaggtttaatagcctactcagaaatcttgtcgaaaagatacaagcacttcaggcttcagaggtccagtcaaaaaggaaagaagcaacatgtccaagacatcaggagatgtttcattacttctgcgaagatgacggaaagttcctgtgcttcgtatgtcgggaatccaaagaccacaagtctcacaatgtcagcctgatcgaagaggctgctcaaaactatcaggggcagattcaggagcagatccaggtgctgcagcaaaaggaaaaggaaaccgtacaagtgaaggctcaaggagtacatagagtcgacgtgtttactgatcaggtggagcacgagaaacagaggattttaaccgaatttgaattactgcatcaagtcctggaagaggagaaaaatttcctcctgagtagaatttactggcttggacacgaggggacggaggccggtaaacactacgttgctagcacagaacctcaactgaatgatcttaagaagttagtcgacagcctaaaaaccaagcaaaacatgcccccacgccaactcctcgaaccggcacagcctcacctccctagaagcgaagagttccagtttctgaatcctacaccagtgcctctagaattggagaagaaactcagcgaggccaagagccgacacgacagcattacagggtctctgaagaagttcaaggaccaattacaggccgacaggaagaaggatgagaacaggttcttcaagagcatgaataagaacgacatgaagtcttggggactgctgcaaaaaaacaaccataagatgaacaagacttccgaaccgggaagcagcagcgcgggtggaaggactacatccggtcctcccaaccaccactcgagcgccccatcccactccctctttagggcgagttctgcgggtaaggtgactttccctgtttgtctcctcgcttcttacgatgaaatctcgggccagggagcttctagccaggacaccaaaacgtttgacgttgctctatctgaggaactgcacgccgctctgtctgaatggttgaccgcgatcagggcttggttctgcgaggtaccctcctcatag

SEQ ID NO: 169888 - DNA, 1278 bp, Artificial Sequence
  derived and/or modified sequence
atggccagtgggcagttcgttaacaaacttcaggaggaggtcatctgtccaatctgcttggacatcttacagaaacccgtgacaattgactgcggccacaacttctgccttaagtgtatcacccagatcggagagacgagttgcgggttctttaagtgtcccctgtgtaagacttctgttcgcaagaatgccattcggtttaatagcctgctgcgcaacttggtggagaagatacaggccctgcaggctagcgaggttcagagcaaaaggaaggaggccacctgcccacgccatcaggaaatgttccactatttctgtgaggatgacggaaagtttctgtgctttgtgtgcagagaatctaaagaccataagtctcacaatgtgagcttaatagaggaggccgcacagaattatcagggacagattcaggaacaaattcaggtcctgcagcagaaagagaaagagacagtacaggtcaaagcacagggtgtccaccgtgtcgacgtttttactgaccaagtggagcacgaaaagcagaggatcctgacagaattcgagctgttacaccaggttctggaagaggagaaaaatttcttgctgtcccgcatctattggctgggacacgagggaacagaagccggtaaacattatgtggcctctacagagccccagctgaacgacctgaaaaagctcatcgactccctcaaaaccaaacagaacatgcctcctagacagcttcttgagcccgcacagccccatctgcctaggtccgaagaattccagtttctgaatccaacgcccgtgcctcttgagttggaaaagaagttgtccgaggcaaaaagccgacatgacagcattaccgggtctctgaagaagttcaaagaccagctccaggcagataggaagaaagacgagaacaggttcttcaagagcatgaacaaaaacgacatgaagtcttggggtctgctacagaagaacaaccataagatgaataagacatccgagcctggctcaagcagtgctggcggaaggactacgagtgggccacccaatcaccatagttccgccccttcacattctctgtttcgggcatcatccgcaggaaaagtgaccttcccagtctgtctcctggcctcctacgacgagatttccggccagggggcatcttcacaagatacgaaaacattcgatgtggccctgtcagaagaactacacgcagccctttcagaatggctgactgcaattcgagcctggttttgtaaagtgccgtccagttag

SEQ ID NO: 169889 - DNA, 1278 bp, Artificial Sequence
  derived and/or modified sequence
atggcctcaggccagttcgtcaacaaactgcaggaggaggtgatttgcccaatctgtttagatattctgcagaagccagtgaccatcgactgcggccataacttctgtctcaagtgtataactcaaatcggggaaactagctgcgggttttttaaatgtcccctgtgtaagacaagtgtacgaaaaaatgccatccgatttaattctttgctgcgcaacttagtagaaaaaatccaagcgctccaagcaagtgaggtccagtccaaaagaaaggaggcaacctgcccacgccaccaagaaatgttccactatttttgcgaggatgatggaaagttcctgtgtttcgtttgttgcgagagtaaagaccacaaaagccacaatgtaagcctcattgaggaggcagctcagaattatcaaggccagattcaagagcagatacaggtcctgcaacagaaagagaaggaaacagtgcaggtgaaggcccagggagttcatcgggttgacgtgtttacagaccaggtagaacacgagaaacagcggatactcacagaatttgagctcctgcatcaggtgcttgaggaggagaaaaacttcctcctcagtcggatttactggttaggccacgagggaaccgaggctggaaaacattatgtggccagtaccgaacctcagctcaatgatctcaaaaagttagttgactccttgaagaccaagcagaatatgccccctaggcagttgcttgagcctgcacagccacatctcccacgcagtgaggagttccaatttctaaaccctactccagtaccccttgagctggaaaagaagctttccgaagcaaagtcacggcacgattcaatcactggtagtttgaagaagtttaaggatcagctccaggcggacagaaagaaggatgagaatcgctttttcaaatccatgaacaaaaacgacatgaagtcttggggtttgctccagaagaacaaccacaagatgaataagacatctgaacctggctcttcctccgctggcggaagaaccacatctgggcctcccaatcatcacagctccgctcctagccactctctctttagagctagttctgctggcaaagtgacattcccagtatgtttgctggcatcatatgatgaaatctcaggccagggtgcttcctcccaggatactaagacattcgatgtggctctttcagaggagcttcatgccgctctgtcagaatggctgacggctatccgggcttggttttgtgaagtgcccagcagttag

SEQ ID NO: 169890 - DNA, 1278 bp, Artificial Sequence
  derived and/or modified sequence
atggcctcggggcagtttgtcaataagctgcaggaagaggtcatctgccccatatgcctggacatactccagaagccagtcacgattgactgcgggcataacttttgtctcaaatgcataacccaaatcggggagacgtcctgcggattttttaagtgtcctctgtgcaagaccagtgtccgtaagaacgctatccggtttaacagcttgctaagaaacctggtggagaagattcaggctctgcaagccagcgaggtccagtctaagaggaaagaagccacatgcccaagacatcaggagatgttccattatttctgtgaagatgacggtaagtttctctgtttcgtgtgccgagagagcaaagatcacaaatcccacaacgtctccttgatcgaagaggctgcccagaactatcagggtcagattcaggaacagattcaggtgttacagcagaaggaaaaggaaacagtccaggtaaaggcgcagggggttcacagagttgacgtgttcacagaccaggttgagcatgagaagcagcggatactcaccgagttcgagttactccaccaggtgctagaagaggagaaaaactttctactatccaggatctactggctcggacatgaggggactgaggccggaaaacattacgtggcaagcacggaaccacagctgaacgacctcaagaagctcgtggattccctcaaaaccaaacagaacatgcccccaaggcaacttctcgaggacatcaaagttgttctctgccgttccgaagaattccagtttctcaatcctacaccagtccctctcgagcttgagaaaaagctgtccgaagccaaaagccgacacgattcaatcaccggatccctgaagaagttcaaggatcagctgcaggccgaccggaaaaaagacgaaaaccggttcttcaagagtatgaacaaaaacgatatgaaatcgtggggcctgttgcagaaaaataaccataaaatgaataaaaccagtgaacctggatcgtctagtgctgggggaaggaccacatccggtccgcctaatcaccactcttccgcccctagccatagcctgttcagggcttcttcagccggtaaggtgaccttccccgtgtgcctcctggcatcctacgacgaaatctccggacagggagcaagctcccaggacacaaagacgtttgacgtggccctgtcagaagagctgcatgctgcgctcagcgagtggctgactgcgatccgggcatggttctgtgaggtgccatcatcatag

SEQ ID NO: 169891 - DNA, 1278 bp, Artificial Sequence
  derived and/or modified sequence
atggcaagtggccagttcgttaacaagctccaggaggaggtgatctgcccaatttgcctagatattttacaaaagccagtcactatcgattgcggacataacttttgtctcaagtgtattactcaaatcggggagacatcttgtggatttttcaagtgccccttgtgcaagacttctgtaagaaaaaatgccatcaggttcaacagcttactccgtaatctcgtggagaagattcaggcgctgcaagcctcggaggtgcagtcaaaacgcaaggaagccacttgtcctaggcaccaagagatgtttcattacttctgcgaagatgatgggaaatttctgtgcttcgtctgtcgagaatctaaggaccacaagagccataatgtgtctcttatcgaagaggcagcacagaactaccagggccagatccaggagcagattcaggttttgcagcagaaggaaaaagagaccgtccaggtgaaggcacagggcgtccaccgcgtggacgtgtttacggaccaggttgagcatgagaaacaaagaattcttaccgagttcgaactactgcaccaagtcctggaagaggaaaagaacttcttacttagtcgtatatactggctaggtcatgaaggaaccgaggcgggtaagcactacgtggcctcaacggagcctcagctgaatgatctcaagaagcttgtggatagcctgaaaacaaagcagaacatgccgcctaggcagctgttggagccagcacagccacacctcccacggtcagaagagttccagttcctgaaccctacaccggtgcccctcgagttagaaaaaaagctgtcagaagccaaaagcagacatgacagcatcactggttctctgaagaaattcaaggaccagcttcaggctgaccgtaaaaaagatgagaataggttttttaagtcgatgaacaaaaatgacatgaagtcttggggattgctgcaaaagaataatcataaaatgaacaagaccagtgaacctggcagttcctctgccggtggacggacgacctctggacctcctaaccaccactcttctgccccttcacacagcctgttccgggcaagttccgctggcaaggtaacatttcctgtctgtctcctcgcttcttacgatgagatcagtggacagggggcatctagtcaagatacaaaaaccttcgacgttgctttatcagaggaactgcacgctgccttgagcgaatggctgacagcaattcgagcttggttctgcgaagtgcctagctcgtag

SEQ ID NO: 169892 - DNA, 1278 bp, Artificial Sequence
  derived and/or modified sequence
atggcctctggccaattcgttaataaactgcaggaggaagtcatctgtccgatttgtctggatatccttcagaaaccagtgacgatcgattgcgggcacaacttctgtctgaagtgcatcacccaaatcggtgaaactagttgcggcttcttcaaatgtcctctttgcaagacatcagtaagaaagaacgctattcgattcaactcgttgctgcgtaacctagtcgagaagattcaggccctacaggcgagcgaggtccagtcaaagagaaaggaggctacgtgtcctcgccaccaagagatgtttcactacttttgtgaggatgatggcaaattcttgtgctttgtgtgctgcgagagcaaagaccataagagccataacgtgtccctcatagaagaggctgcccagaactaccagggacagatccaggagcagatccaggtgcttcagcagaaagaaaaggagaccgttcaagtgaaggcgcaaggtgtgcatcgcgtagacgtctttactgaccaggtagagcatgaaaagcagaggatcttaacagaatttgaactcctgcaccaggtgctggaagaggagaaaaactttctgctgtcacgaatctattggctggggcacgaaggtactgaagctgggaagcactacgtggcgagtacggagcctcagttaaatgacctaaaaaagctcgtcgattctctcaaaaccaagcagaatatgccacccagacagctactcgaagacatcaaagttgtgttgtgcaggtctgaggaattccaattcttaaaccccacacccgtaccattggagctcgagaagaagctgtcggaggcaaaatctcgacatgactcaatcaccggcagcttgaaaaagtttaaagatcagctccaagccgatcgcaagaaagatgagaacagatttttcaaatccatgaataaaaatgacatgaaatcttgggggctcttacagaagaataatcacaagatgaacaaaacatctgagcccggaagttcctcagctggagggaggacaacctctgggcctcctaaccatcactcaagcgcaccttcccactctctattccgagcgtcatccgccggtaaagtgactttcccggtgtgcctgctggcatcctacgatgagatttccggtcagggcgctagttctcaggacacaaagactttcgatgtggccctatctgaggagcttcatgcggcactgagtgagtggttgactgccatacgggcatggttctgcgaggtgccatccagctag

SEQ ID NO: 169893 - DNA, 1278 bp, Artificial Sequence
  derived and/or modified sequence
atggcatctggtcaatttgtcaataagctccaggaagaggtgatttgccccatttgcctggatatcttgcagaaaccggtgactatagactgtgggcataacttctgtttgaaatgtattactcagattggcgagacgagctgtggcttcttcaagtgtccactgtgcaagacctctgttcggaagaacgctattaggttcaactccctattgcgcaatttggtggagaaaatacaagctctccaggctagcgaggtgcaatcaaagcgaaaagaagccacctgcccacgtcaccaggagatgttccactacttttgtgaagatgatggtaagttcctgtgtttcgtctgccgagaaagcaaagaccacaagtcccataatgtttctcttatcgaggaggctgctcagaactatcagggccaaatccaggaacagatccaagtcctgcagcagaaagagaaggaaactgtgcaggtcaaggctcaaggagtgcaccgcgtcgatgtgtttacagaccaggttgagcacgagaagcagagaattctcactgagtttgagctcctacaccaggtgctggaggaagagaagaactttctcctgtccaggatatactggctcgggcacgagggcaccgaagcagggaagcattatgttgcttctaccgagccacagcttaacgatttgaagaagcttatcgattcgcttaagactaagcagaacatgccccctcgccagctgttggaagatattaaggtggtgctttgcagaagcgaggagtttcagttcctcaatcccactcctgtgcctttggagttggaaaagaagctttccgaagcaaagtctcggcacgactctattaccggttcattaaagaagtttaaagatcaattgcaggctgacaggaagaaggatgagaaccggttctttaaatcgatgaacaagaatgacatgaagagctggggcttgctgcagaaaaataaccataaaatgaacaagacttccgagcctggcagctccagcgccggagggagaacaacaagcgggcctcccaaccaccacagttcagctccctcgcattctttgttccgcgcatcctcggcaggaaaggtgacatttccggtctgcctgctggcttcctatgacgagataagcggccaaggagctagctctcaggatacaaaaacattcgatgtggccctaagtgaggagttacacgctgctctttctgaatggttaacagccatacgtgcctggttctgtaaggtaccgtcatcttag

SEQ ID NO: 169894 - DNA, 1278 bp, Artificial Sequence
  derived and/or modified sequence
atggccagcggacagttcgtgaacaagctacaggaagaagtgatttgtccaatatgtttagacattttacagaagcccgtaaccattgactgtggtcataacttctgcctgaaatgcatcacccagatcggtgagacctcatgcggcttttttaaatgcccactgtgcaaaacgtcagtgcgcaaaaatgctatccggtttaactctctgctacgcaacttggtcgaaaagattcaagcccttcaggcaagtgaggtccagtctaaaaggaaagaagcaacttgtccaaggcaccaggaaatgttccactacttctgcgaagacgacgggaagttcctgtgtttcgtgtgcagagagagcaaggatcacaagagccataacgtgtccttaatcgaggaggcagcacagaattaccagggccaaatccaagaacagattcaggtgttacagcagaaggagaaagaaacggtgcaggtcaaggctcagggcgtccaccgcgtggacgtgtttaccgaccaagttgagcatgaaaagcagaggatcctgaccgagtttgagctactgcaccaagttctcgaagaggaaaaaaacttcctcttgtccaggatctattggctgggtcatgaaggcacagaggccggaaagcattacgtggcctctacagagcctcagttgaatgacttgaagaaactcgtcgacagcttaaagactaagcagaacatgccccctaggcagcttctggagcctgcccaacctcacctgccccgaagcgaggagttccagtttctcaatcctacaccagttccgctcgagctcgagaaaaaactcagcgaggctaagagcaggcacgatagtatcactgggagcctcaagaaattcaaagaccagctgcaagccgacaggaagaaggatgaaaatcgtttcttcaagtccatgaacaagaatgatatgaagagctggggcctgcttcagaaaaataaccacaaaatgaacaaaacctcagagccaggctcctcgagcgctggtgggaggactacatcgggaccacccaaccaccactcctctgccccaagtcattccctgttccgagcctcttctgccggaaaggtcactttcccggtatgtttactggcttcctacgacgagatcagtggtcaaggggcttcctcgcaggacactaagacgtttgatgtcgctttatcagaagaactccacgccgcactgtcggagtggctgacggctattagagcgtggttctgcaaggtgccaagtagttag

SEQ ID NO: 169895 - DNA, 1278 bp, Artificial Sequence
  derived and/or modified sequence
atggcctctggccagttcgtaaacaaattgcaggaggaggtcatctgccccatctgtctggacatcttacaaaagcccgttactattgactgcgggcacaacttttgcctcaagtgtatcacgcaaatcggcgaaaccagctgcggattctttaaatgtcctctgtgtaagaccagtgtccggaagaacgcaattcggtttaatagcttactgagaaacctggtggaaaaaatacaggctttgcaagcctcagaggtgcagtccaagcgaaaggaggctacatgcccaaggcaccaggaaatgttccactatttttgtgaagacgacggtaaattcttgtgtttcgtctgccgggagagtaaggaccacaagagtcataatgttagtctgatcgaggaagcagcgcagaactaccagggacagatccaagaacagattcaagtacttcagcagaaggaaaaggagaccgtgcaggtaaaggcacagggcgtacatagagtggacgtgtttactgaccaggttgaacatgagaaacagcgcatattgactgagtttgaactgctgcatcaggttctggaagaagagaaaaacttcctgctttcgcgcatctattggctaggacatgaaggaaccgaagcaggtaagcactatgtggcatctaccgaaccccagctgaatgacctaaaaaagctcgtagattcccttaaaactaaacaaaacatgccacccagacagctcttggaagacattaaagtcgtgctgtgtcgctcagaagagttccaatttctgaatcctaccccagttcctctggagctggaaaaaaagttaagcgaggccaagagcaggcacgacagtattacaggttccctaaagaaattcaaggaccagctgcaggctgatagaaaaaaggatgagaatcggttctttaagagcatgaacaaaaatgatatgaagtcctggggcctgttacaaaaaaataatcacaagatgaataagacatcagagccaggctcatcttcagcaggcggaaggactacaagcggacctccaaatcatcactcaagtgcacccagtcactctcttttccgcgcttcctccgcgggtaaagtgaccttcccagtttgcttgcttgcgagctatgatgaaatcagcggtcagggggcttcgagtcaggacaccaagacctttgatgtggccctcagtgaagagctgcatgctgccttgtcggagtggttaactgccatcagggcttggttctgcgaggtgccttcatcttag

SEQ ID NO: 169896 - DNA, 1278 bp, Artificial Sequence
  derived and/or modified sequence
atggcatccggccagtttgtgaacaaactacaggaggaagtgatctgccccatctgtctggatatactgcaaaaaccagtcacgatcgattgcggacacaacttttgtctgaaatgcatcacgcagataggcgaaacctcctgcgggtttttcaaatgccccctttgtaaaacctccgtgcggaagaatgctattcgcttcaactctcttctgcggaacctggtggaaaaaatccaggccctgcaggcttctgaagtgcagagcaaacgtaaggaagccacatgcccgcgacaccaggaaatgttccactacttctgtgaggatgatggtaaattcctgtgcttcgtatgcagggagtccaaggatcacaaaagtcacaatgtcagcctgattgaagaggcagctcagaactaccaagggcagatacaggaacaaatccaagttcttcaacaaaaagagaaggagactgtgcaagtgaaagctcagggggtgcatcgcgttgatgtgttcacagaccaagtggaacatgagaaacagagaattcttacagagtttgagctgcttcaccaagtgttggaggaagagaagaatttcctgctctccagaatatactggctgggtcatgagggtaccgaagccggtaagcactacgtagccagcacagaaccacagctgaacgacctgaaaaaacttgtcgactctttgaaaacaaaacaaaatatgcctccccgtcagttattggaggacattaaggttgtgctgtgccggtcagaagaatttcagtttctcaacccgacacccgtcccactggagcttgagaaaaagctttctgaagctaaatcacggcacgacagtataaccggctccctgaagaaatttaaggaccagctccaagccgatcgcaagaaggacgaaaaccgattctttaagtccatgaataaaaacgatatgaagtcctggggtctgttgcagaaaaataaccacaaaatgaataagacgtcagagccgggatcttctagcgccggaggcagaaccactagcggtccacctaaccatcactccagtgcgcctagccatagtctgtttcgggcttcatctgccggtaaggtgacattcccagtctgcttgcttgcttcttatgacgaaatttctgggcagggcgcttcttcccaggatactaaaacattcgatgtagcactatccgaggaattacacgccgctctgtccgagtggctaacggctatccgggcatggttctgcgaagttccatccagctag

SEQ ID NO: 169897 - DNA, 2043 bp, Artificial Sequence
  derived and/or modified sequence
attacacattcaaagtatccatttgttctcaagaggtagcaagaaacagtatccacagtggactccggggctcctacagacttggcacagcttcctacagtcttgaaacagccctgttgttctgtcatggccagtgggcagtttgtgaacaaactgcaagaggaagtgatctgccccatctgcctggacattctgcagaaacctgtcaccatcgactgtgggcacaatttctgcctcaaatgcatcactcagattggggaaacatcatgtggatttttcaaatgtcccctctgcaaaacttccgtaaggaagaacgcaatcaggttcaactcgctgttgcggaatctggtggagaaaatccaagctctacaagcctctgaggtgcagtccaaaaggaaagaggctacatgcccgaggcaccaggagatgttccactatttctgcgaggatgatgggaagttcctctgttttgtgtgttgtgaatccaaggaccacaaatcccataatgtcagcttgatcgaagaagctgcccagaattatcaggggcagattcaagagcagatccaagtcttgcagcaaaaggagaaggagacagtacaagtgaaggcacaaggtgtacacagggtcgatgtcttcacggaccaggtagaacatgagaagcaaaggatcctcacagaatttgaactcctgcatcaagtcctagaggaggagaagaatttcctgctatcacggatttactggctgggtcatgagggaacggaagcggggaaacactatgttgcctccactgagccacagttgaacgatctcaagaagctcgttgattccctgaagaccaagcagaacatgccacccaggcagctgctggaggatatcaaagtcgtcttgtgcagaagtgaagagtttcagtttctcaacccaacccctgttcctctggaactggagaaaaaactcagtgaagcaaaatcaagacacgactccatcacagggagcctgaaaaaattcaaagaccaactccaggctgataggaaaaaagatgaaaacagattcttcaaaagcatgaataaaaatgacatgaagagctggggcttgttacagaaaaataatcataaaatgaacaaaacctcagagcccgggtcatcttctgcaggcggcagaactacatcggggccaccaaatcaccactcttcagccccatcccactccctgtttcgggcctcgtctgctgggaaagtcacttttccagtatgtctcctggcctcttatgatgagatttctggtcaaggagcgagctctcaggatacgaagacatttgacgttgcgctgtccgaggagctccatgcggcactgagtgagtggctgacagcgatccgggcttggttttgtgaggttccttcaagctaagccagctcagagaacacggggagcggtggtgctacacggacttcggagcatagagtggcgctgagtgagtggctgagaccgaccacggttcttgacttagtggaattgggtcgaaggagtggagaatgggagggctcgggctactgagagtggagatgggggcgggggtggtggtgaagagagttggagaaggaatggacgagttcttgagcaaaaggaggggaagagacaatctccagccacccgccccacgcttgacttcttatcactttggctgtggtgccgcctagtggaaaaaggaagtccctgcagcagtccccgcactctttaagcagctgtttaccgaaggcaccagttcagccaggagtgaaatccggagaggagcaacgccagcctgggtcacagtccatcaaaccccatgagcccgaccactctcgctcttccttacattcccacgtcccccttctctcccaacccctcatatcagcaagggaaattaattaatgagatttgataaatcagtagatagaatgaggtccccattctgaaatatttagcagactggaaccaccacgcaagcctctgtagggggtggatggagacacttctaactttaataaactgcgactgaacgtggaa

SEQ ID NO: 169898 - DNA, 2025 bp, Artificial Sequence
  derived and/or modified sequence
atccatttgttctcaagaggtagcaagaaacagtatccacagtggactccggggctcctacagacttggcacagcttcctacagtcttgaaacagccctgttgttctgtcatggccagtgggcagtttgtgaacaaactgcaagaggaagtgatctgccccatctgcctggacattctgcagaaacctgtcaccatcgactgtgggcacaatttctgcctcaaatgcatcactcagattggggaaacatcatgtggatttttcaaatgtcccctctgcaaaacttccgtaaggaagaacgcaatcaggttcaactcgctgttgcggaatctggtggagaaaatccaagctctacaagcctctgaggtgcagtccaaaaggaaagaggctacatgcccgaggcaccaggagatgttccactatttctgcgaggatgatgggaagttcctctgttttgtgtgtcgtgaatccaaggaccacaaatcccataatgtcagcttgatcgaagaagctgcccagaattatcaggggcagattcaagagcagatccaagtcttgcagcaaaaggagaaggagacagtacaagtgaaggcacaaggtgtacacagggtcgatgtcttcacggaccaggtagaacatgagaagcaaaggatcctcacagaatttgaactcctgcatcaagtcctagaggaggagaagaatttcctgctatcacggatttactggctgggtcatgagggaacggaagcggggaaacactatgttgcctccactgagccacagttgaacgatctcaagaagctcgttgattccctgaagaccaagcagaacatgccacccaggcagctgctggagccagctcaaccacatcttcctagaagtgaagagtttcagtttctcaacccaacccctgttcctctggaactggagaaaaaactcagtgaagcaaaatcaagacatgactccatcacagggagcctaaaaaaattcaaagaccaactccaggctgataggaaaaaagatgaaaacagattcttcaaaagcatgaataaaaatgacatgaagagctggggcttgttacagaaaaataatcataaaatgaacaaaacctcagagcccgggtcatcttctgcaggcggcagaactacatcggggccaccaaatcaccactcttcagccccatcccactccctgtttcgggcctcgtctgctgggaaagtcacttttccagtatgtctcctggcctcttatgatgagatttctggtcaaggagcgagctctcaggatacgaagacatttgacgttgcgctgtccgaggagctccatgcggcactgagtgagtggctgacagcgatccgggcttggttttgtgaggttccttcaagctaagccagctcagagaacacggggagcggtggtgctacacggacttcggagcatagagtggcgctgagtgagtggctgagaccgaccacggttcttgacttagtggaattgggtcgaaggagtggagaatgggagggctcgggctactgagagtggagatgggggcgggggtggtggtgaagagagttggagaaggaatggacgaattcttgagcaaaaggaggggaagagacaatctccagccacccgccccacgcttgacttcttatcactttggctgtggtgccgcctagtggaaaaaggaagtccctgcagcagtccccgcactctttaagcagctgtttaccgaaggcaccagttcagccaggagtgaaatccggagaggagcaacgccagcctgggtcacagtccatcaaaccccatgagcccgaccactctcgctcttccttacattcccacgtcccccttctctcccaacccctcatatcagcaagggaaattaattaatgagatttgataaatcagtagatagaatgaggtccccattctgaaatatttagcagactggaaccaccacgcaagcctctgtagggggtggatggagacacttctaactttaataaactgcgactgaacgtgg

SEQ ID NO: 169899 - DNA, 2043 bp, Artificial Sequence
  derived and/or modified sequence
attacacattcaaagtatccatttgttctcaagaggtagcaagaaacagtatccacagtggactccggggctcctacagacttggcacagcttcctacagtcttgaaacagccctgttgttctgtcatggccagtgggcagtttgtgaacaaactgcaagaggaagtgatctgccccatctgcctggacattctgcagaaacctgtcaccatcgactgtgggcacaatttctgcctcaaatgcatcactcagattggggaaacatcatgtggatttttcaaatgtcccctctgcaaaacttccgtaaggaagaacgcaatcaggttcaactcgctgttgcggaatctggtggagaaaatccaagctctacaagcctctgaggtgcagtccaaaaggaaagaggctacatgcccgaggcaccaggagatgttccactatttctgcgaggatgatgggaagttcctctgttttgtgtgtcgtgaatccaaggaccacaaatcccataatgtcagcttgatcgaagaagctgcccagaattatcaggggcagattcaagagcagatccaagtcttgcagcaaaaggagaaggagacagtacaagtgaaggcacaaggtgtacacagggtcgatgtcttcacggaccaggtagaacatgagaagcaaaggatcctcacagaatttgaactcctgcatcaagtcctagaggaggagaagaatttcctgctatcacggatttactggctgggtcatgagggaacggaagcggggaaacactatgttgcctccactgagccacagttgaacgatctcaagaagctcgttgattccctgaagaccaagcagaacatgccacccaggcagctgctggaggatatcaaagtcgtcttgtgcagaagtgaagagtttcagtttctcaacccaacccctgttcctctggaactggagaaaaaactcagtgaagcaaaatcaagacatgactccatcacagggagcctaaaaaaattcaaagaccaactccaggctgataggaaaaaagatgaaaacagattcttcaaaagcatgaataaaaatgacatgaagagctggggcttgttacagaaaaataatcataaaatgaacaaaacctcagagcccgggtcatcttctgcaggcggcagaactacatcggggccaccaaatcaccactcttcagccccatcccactccctgtttcgggcctcgtctgctgggaaagtcacttttccagtatgtctcctggcctcttatgatgagatttctggtcaaggagcgagctctcaggatacgaagacatttgacgttgcgctgtccgaggagctccatgcggcactgagtgagtggctgacagcgatccgggcttggttttgtgaggttccttcaagctaagccagctcagagaacacggggagcggtggtgctacacggacttcggagcatagagtggcgctgagtgagtggctgagaccgaccacggttcttgacttagtggaattgggtcgaaggagtggagaatgggagggctcgggctactgagagtggagatgggggcgggggtggtggtgaagagagttggagaaggaatggacgaattcttgagcaaaaggaggggaagagacaatctccagccacccgccccacgcttgacttcttatcactttggctgtggtgccgcctagtggaaaaaggaagtccctgcagcagtccccgcactctttaagcagctgtttaccgaaggcaccagttcagccaggagtgaaatccggagaggagcaacgccagcctgggtcacagtccatcaaaccccatgagcccgaccactctcgctcttccttacattcccacgtcccccttctctcccaacccctcatatcagcaagggaaattaattaatgagatttgataaatcagtagatagaatgaggtccccattctgaaatatttagcagactggaaccaccacgcaagcctctgtagggggtggatggagacacttctaactttaataaactgcgactgaacgtggaa

SEQ ID NO: 169900 - DNA, 2043 bp, Artificial Sequence
  derived and/or modified sequence
attacacattcaaagtatccatttgttctcaagaggtagcaagaaacagtatccacagtggactccggggctcctacagacttggcacagcttcctacagtcttgaaacagccctgttgttctgtcatggccagtgggcagtttgtgaacaaactgcaagaggaagtgatctgccccatctgcctggacattctgcagaaacctgtcaccatcgactgtgggcacaatttctgcctcaaatgcatcactcagattggggaaacatcatgtggatttttcaaatgtcccctctgcaaaacttccgtaaggaagaacgcaatcaggttcaactcgctgttgcggaatctggtggagaaaatccaagctctacaagcctctgaggtgcagtccaaaaggaaagaggctacatgcccgaggcaccaggagatgttccactatttctgcgaggatgatgggaagttcctctgttttgtgtgtcgtgaatccaaggaccacaaatcccataatgtcagcttgatcgaagaagctgcccagaattatcaggggcagattcaagagcagatccaagtcttgcagcaaaaggagaaggagacagtacaagtgaaggcacaaggtgtacacagggtcgatgtcttcacggaccaggtagaacatgagaagcaaaggatcctcacagaatttgaactcctgcatcaagtcctagaggaggagaagaatttcctgctatcacggatttactggctgggtcatgagggaacggaagcggggaaacactatgttgcctccactgagccacagttgaacgatctcaagaagctcgttgattccctgaagaccaagcagaacatgccacccaggcagctgctggaggatatcaaagtcgtcttgtgcagaagtgaagagtttcagtttctcaacccaacccctgttcctctggaactggagaaaaaactcagtgaagcaaaatcaagacacgactccatcacagggagcctgaaaaaattcaaagaccaactccaggctgataggaaaaaagatgaaaacagattcttcaaaagcatgaataaaaatgacatgaagagctggggcttgttacagaaaaataatcataaaatgaacaaaacctcagagcccgggtcatcttctgcaggcggcagaactacatcggggccaccaaatcaccactcttcagccccatcccactccctgtttcgggcctcgtctgctgggaaagtcacttttccagtatgtctcctggcctcttatgatgagatttctggtcaaggagcgagctctcaggatacgaagacatttgacgttgcgctgtccgaggagctccatgcggcactgagtgagtggctgacagcgatccgggcttggttttgtaaggttccttcaagctaagccagctcagagaacacggggagcggtggtgctccacggacttcggagcatagagtggcgctgagtgagtggctgagaccgaccacggttcttgacttagtggaattgggtcgaaggagtggagaatgggagggctcgggctactgagagtggagatgggggcgggggtggtggtgaagagagttggagaaggaatggacgagttcttgagcaaaaggaggggaagagacaatctccagccacccgccccacgcttgacttcttatcactttggctgtggtgccgcctagtggaaaaaggaagtccctgcagcagtccccgcactctttaagcagctgtttaccgaaggcaccagttcagccaggagtgaaatccagagacgagcaacgccagcctgggtcacagtccatcaaaccccatgagcccgaccactctcgctcttccttacattcccacgtcccccttctctcccaacccctcatatcagcaagggaaattaattaatgagatttgataaatcagtagatagaatgaggtccccattctgaaatatttagcagactggaaccaccacgcaagcctctgtagggggtggatggagacacttctaactttaataaactgcgactgaacgtggaa

SEQ ID NO: 169901 - DNA, 2043 bp, Artificial Sequence
  derived and/or modified sequence
attacacattcaaagtatccatttgttctcaagaggtagcaagaaacagtatccacagtggactccggggctcctacagacttggcacagcttcctacagtcttgaaacagccctgttgttctgtcatggccagtgggcagtttgtgaacaaactgcaagaggaagtgatctgccccatctgcctggacattctgcagaaacctgtcaccatcgactgtgggcacaatttctgcctcaaatgcatcactcagattggggaaacatcatgtggatttttcaaatgtcccctctgcaaaacttccgtaaggaagaacgcaatcaggttcaactcgctgttgcggaatctggtggagaaaatccaagctctacaagcctctgaggtgcagtccaaaaggaaagaggctacatgcccgaggcaccaggagatgttccactatttctgcgaggatgatgggaagttcctctgttttgtgtgtcgtgaatccaaggaccacaaatcccataatgtcagcttgatcgaagaagctgcccagaattatcaggggcagattcaagagcagatccaagtcttgcagcaaaaggagaaggagacagtacaagtgaaggcacaaggtgtacacagggtcgatgtcttcacggaccaggtagaacatgagaagcaaaggatcctcacagaatttgaactcctgcatcaagtcctagaggaggagaagaatttcctgctatcacggatttactggctgggtcatgagggaacggaagcggggaaacactatgttgcctccactgagccacagttgaacgatctcaagaagctcgttgattccctgaagaccaagcagaacatgccacccaggcagctgctggaggatatcaaagtcgtcttgtgcagaagtgaagagtttcagtttctcaacccaacccctgttcctctagaactggagaaaaaactcagtgaagcaaaatcaagacacgactccatcacagggagcctgaaaaaattcaaagaccaactccaggctgataggaaaaaagatgaaaacagattcttcaaaagcatgaataaaaatgacatgaagagctggggcttgttacagaaaaataatcataaaatgaacaaaacctcagagcccgggtcatcttctgcaggcggcagaactacatcggggccaccaaatcaccactcttcagccccatcccactccctgtttcgggcctcgtctgctgggaaagtcacttttccagtatgtctcctggcctcttatgatgagatttctggtcaaggagcgagctctcaggatacgaagacatttgacgttgcgctgtccgaggagctccatgcggcactgagtgagtggctgacagcgatccgggcttggttttgtgaggttccttcaagctaagccagctcagagaacacggggagcggtggtgctacacggacttcggagcatagagtggcgctgagtgagtggctgagaccgaccacggttcttgacttagtggaattgggtcgaaggagtggagaatgggagggctcgggctactgagagtggagatgggggcgggggtggtggtgaagagagttggagaaggaatggacgagttcttgagcaaaaggaggggaagagacaatctccagccacccgccccacgcttgacttcttatcactttggctgtggtgccgcctagtggaaaaaggaagtccctgcagcagtccccgcactctttaagcagctgtttaccgaaggcaccagttcagccaggagtgaaatccggagaggagcaacgccagcctgggtcacagtccatcaaaccccatgagcccgaccactctcgctcttccttacattcccacgtcccccttctctcccaacccctcatatcagcaagggaaattaattaatgagatttgataaatcagtagatagaatgaggtccccattctgaaatatttagcagactggaaccaccacgcaagcctctgtagggggtggatggagacacttctaactttaataaactgcgactgaacgtggaa

SEQ ID NO: 169902 - DNA, 2043 bp, Artificial Sequence
  derived and/or modified sequence
attacacattcaaagtatccatttgttctcaagaggtagcaagaaacagtatccacagtggactccggggctcctacagacttggcacagcttcctacagtcttgaaacagccctgttgttctgtcatggccagtgggcagtttgtgaacaaactgcaagaggaagtgatctgccccatctgcctggacattctgcagaaacctgtcaccatcgactgtgggcacaatttctgcctcaaatgcatcactcagattggggaaacatcatgtggatttttcaaatgtcccctctgcaaaacttccgtaaggaagaacgcaatcaggttcaactcgctgttgcggaatctggtggagaaaatccaagctctacaagcctctgaggtgcagtccaaaaggaaagaggctacatgcccgaggcaccaggagatgttccactatttctgcgaggatgatgggaagttcctctgttttgtgtgtcgtgaatccaaggaccacaaatcccataatgtcagcttgatcgaagaagctgcccagaattatcaggggcagattcaagagcagatccaagtcttgcagcaaaaggagaaggagacagtacaagtgaaggcacaaggtgtacacagggtcgatgtcttcacggaccaggtagaacatgagaagcaaaggatcctcacagaatttgaactcctgcatcaagtcctagaggaggagaagaatttcctgctatcacggatttactggctgggtcatgagggaacggaagcggggaaacactatgttgcctccactgagccacagttgaacgatctcaagaagctcgttgattccctgaagaccaagcagaacatgccacccaggcagctgctggaggatatcaaagtcgtcttgtgcagaagtgaagagtttcagtttctcaacccaacccctgttcctctagaactggagaaaaaactcagtgaagcaaaatcaagacacgactccatcacagggagcctgaaaaaattcaaagaccaactccaggctgataggaaaaaagatgaaaacagattcttcaaaagcatgaataaaaatgacatgaagagctggggcttgttacagaaaaataatcataaaatgaacaaaacctcagagcccgggtcatcttctgcaggcggcagaactacatcggggccaccaaatcaccactcttcagccccatcccactccctgtttcgggcctcgtctgctgggaaagtcacttttccagtatgtctcctggcctcttatgatgagatttctggtcaaggagcgagctctcaggatacgaagacatttgacgttgcgctgtccgaggagctccatgcggcactgagtgagtggctgacagcgatccgggcttggttttgtgaggttccttcaagctaagccagctcagagaacacggggagcggtggtgctacacggacttcggagcatagagtggcgctgagtgagtggctgagaccgaccacggttcttgacttagtggaattgggtcgaaggagtggagaatgggagggctcgggctactgagagtggagatgggggcgggggtggtggtgaagagagttggagaaggaatggacgaattcttgagcaaaaggaggggaagagacaatctccagccacccgccccacgcttgacttcttatcactttggctgtggtgccgcctagtggaaaaaggaagtccctgcagcagtccccgcactctttaagcagctgtttaccgaaggcaccagttcagccaggagtgaaatccggagaggagcaacgccagcctgggtcacagtccatcaaaccccatgagcccgaccactctcgctcttccttacattcccacgtcccccttctctcccaacccctcatatcagcaagggaaattaattaatgagatttgataaatcagtagatagaatgaggtccccattctgaaatatttagcagactggaaccaccacgcaagcctctgtagggggtggatggagacacttctaactttaataaactgcgactgaacgtggaa

SEQ ID NO: 169903 - DNA, 2043 bp, Artificial Sequence
  derived and/or modified sequence
attacacattcaaagtatccatttgttctcaagaggtagcaagaaacagtatccacagtggactccggggctcctacagacttggcacagcttcctacagtcttgaaacagccctgttgttctgtcatggccagtgggcagtttgtgaacaaactgcaagaggaagtgatctgccccatctgcctggacattctgcagaaacctgtcaccatcgactgtgggcacaatttctgcctcaaatgcatcactcagattggggaaacatcatgtggatttttcaaatgtcccctctgcaaaacttccgtaaggaagaacgcaatcaggttcaactcgctgttgcggaatctggtggagaaaatccaagctctacaagcctctgaggtgcagtccaaaaggaaagaggctacatgcccgaggcaccaggagatgttccactatttctgcgaggatgatgggaagttcctctgttttgtgtgtcgtgaatccaaggaccacaaatcccataatgtcagcttgatcgaagaagctgcccagaattatcaggggcagattcaagagcagatccaagtcttgcagcaaaaggagaaggagacagtacaagtgaaggcacaaggtgtacacagggtcgatgtcttcacggaccaggtagaacatgagaagcaaaggatcctcacagaatttgaactcctgcatcaagtcctagaggaggagaagaatttcctgctatcacggatttactggctgggtcatgagggaacggaagcggggaaacactatgttgcctccactgagccacagttgaacgatctcaagaagctcgttgattccctgaagaccaagcagaacatgccacccaggcagctgctggaggatatcaaagtcgtcttgtgcagaagtgaagagtttcagtttctcaacccaacccctgttcctctggaactggagaaaaaactcagtgaagcaaaatcaagacacgactccatcacagggagcctgaaaaaattcaaagaccaactccaggctgataggaaaaaagatgaaaacagattcttcaaaagcatgaataaaaatgacatgaagagctggggcttgttacagaaaaataatcataaaatgaacaaaacctcagagcccgggtcatcttctgcaggcggcagaactacatcggggccaccaaatcaccactcttcagccccatcccactccctgtttcgggcctcgtctgctgggaaagtcacttttccagtatgtctcctggcctcttatgatgagatttctggtcaaggagcgagctctcaggatacgaagacatttgacgttgcgctgtccgaggagctccatgcggcactgagtgagtggctgacagcgatccgggcttggttttgtgaggttccttcaagctaagccagctcagagaacacggggagcggtggtgctacacggacttcggagcatagagtggcgctgagtgagtggctgagaccgaccacggttcttgacttagtggaattgggtcgaaggagtggagaatgggagggctcgggctactgagagtggagatgggggcgggggtggtggtgaagagagttggagaaggaatggacgagttcttgagcaaaaggaggggaagagacaatctccagccacccgccccacgcttgacttcttatcactttggctgtggtgccgcctagtggaaaaaggaagtccctgcagcagtccccgcactctttaagcagctgtttaccgaaggcaccagttcagccaggagtgaaatccggagaggagcaacgccagcctgggtcacagtccatcaaaccccatgagcccgaccactctcgctcttccttacattcccacgtcccccttctctcccaacccctcatatcagcaagggaaattaattaatgagatttgataaatcagtagatagaatgaggtccccattctgaaatatttagcagactggaaccaccacgcaagcctctgtagggggtggatggagacacttctaactttaataaactgcgactgaacgtggaa

SEQ ID NO: 169904 - DNA, 2043 bp, Artificial Sequence
  derived and/or modified sequence
attacacattcaaagtatccatttgttctcaagaggtagcaagaaacagtatccacagtggactccggggctcctacagacttggcacagcttcctacagtcttgaaacagccctgttgttctgtcatggccagtgggcagtttgtgaacaaactgcaagaggaagtgatctgccccatctgcctggacattctgcagaaacctgtcaccattgactgtgggcacaatttctgcctcaaatgcatcactcagattggggaaacatcatgtggatttttcaaatgtcccctctgcaaaacttccgtaaggaagaacgcaatcaggttcaactcgctgttgcggaatctggtggagaaaatccaagctctacaagcctctgaggtgcagtccaaaaggaaagaggctacatgcccgaggcaccaggagatgttccattatttctgcgaggatgatgggaagttcctctgttttgtgtgtcgtgaatccaaggaccacaaatcccataatgtcagcttgatcgaagaagctgcccagaattatcaggggcagattcaagagcagatccaagtcttgcagcaaaaggagaaggagacagtacaagtgaaggcacaaggtgtacacagggtcgatgtcttcacggaccaggtagaacatgagaagcaaaggatcctcacagaatttgaactcctgcatcaagtcctagaggaggagaagaatttcctgctatcacggatttactggctgggtcatgagggaacggaagcagggaaacactatgttgcctccactgagccacagttgaacgatctcaagaagctcattgattccctgaagaccaagcagaacatgccacccaggcagctgctggaggatatcaaagtcgtcttgtgcagaagtgaagagtttcagtttctcaacccaacccctgttcctctggaactggagaaaaaactcagtgaagcaaaatcaagacatgactccatcacagggagcctgaaaaaattcaaagaccaactccaggctgataggaaaaaagatgaaaacagattcttcaaaagcatgaataaaaatgacatgaagagctggggcttgttacagaaaaataatcataaaatgaacaaaacctcagagcccgggtcatcttctgcaggcggcagaactacatcggggccaccaaatcaccactcttcagccccatcccactccctgtttcgggcctcgtctgctgggaaagtcacttttccagtatgtctcctggcctcttatgatgagatttctggtcaaggagcgagctctcaggatacgaagacatttgacgttgcgctgtccgaggagctccatgcggcactgagtgagtggctgacagcgatccgggcttggttttgtaaggttccttcaagctaagccagctcagagaacacggggagcggtggtgctccacggacttcggagcatagagtggcgctgagtgagtggctgagaccgaccacggttcttgacttagtggaattgggtcgaaggagtggagaatgggagggctcgggctactgagagtggagatgggggcgggggtggtggtgaagagagttggagaaggaatggacgagttcttgagcaaaaggaggggaagagacaatctccagccacccgccccacgcttgacttcttatcactttggctgtggtgccgcctagtggaaaaaggaagtccctgcagcagtccccgcactctttaagcagctgtttaccgaaggcaccagttcagccaggagtgaaatccagagacgagcaacgccagcctgggtcacagtccatcaaaccccatgagcccgaccactctcgctcttccttacattcccacgtcccccttctctcccaacccctcatatcagcaagggaaattaattaatgagatttgataaatcagtagatagaatgaggtccccattctgaaatatttagcagactggaaccaccacgcaagcctctgtagggggtggatggagacacttctaactttaataaactgcgactgaacgtggaa

SEQ ID NO: 169905 - DNA, 1648 bp, Artificial Sequence
  derived and/or modified sequence
atccatttgttctcaagaggtagcaagaaacagtatccacagtggactccggggctcctacagacttggcacagcttcctacagtcttgaaacagccctgttgttctgtcatggccagtgggcagtttgtgaacaaactgcaagaggaagtgatctgccccatctgcctggacattctgcagaaacctgtcaccatcgactgtgggcacaatttctgcctcaaatgcatcactcagattggggaaacatcatgtggatttttcaaatgtcccctctgcaaaacttccgtaaggaagaacgcaatcaggttcaactcgctgttgcggaatctggtggagaaaatccaagctctacaagcctctgaggtgcagtccaaaaggaaagaggctacatgcccgaggcaccaggagatgttccactatttctgcgaggatgatgggaagttcctctgttttgtgtgtcgtgaatccaaggaccacaaatcccataatgtcagcttgatcgaagaagctgcccagaattatcaggggcagattcaagagcagatccaagtcttgcagcaaaaggagaaggagacagtacaagtgaaggcacaaggtgtacacagggtcgatgtcttcacggaccaggtagaacatgagaagcaaaggatcctcacagaatttgaactcctgcatcaagtcctagaggaggagaagaatttcctgctatcacggatttactggctgggtcatgagggaacggaagcggggaaacactatgttgcctccactgagccacagttgaacgatctcaagaagctcgttgattccctgaagaccaagcagaacatgccacccaggcagctgctggaggatatcaaagtcgtcttgtgcagaagtgaagagtttcagtttctcaacccaacccctgttcctctggaactggagaaaaaactcagtgaagcaaaatcaagacatgactccatcacagggagcctaaaaaaattcaaagaccaactccaggctgataggaaaaaagatgaaaacagattcttcaaaagcatgaataaaaatgacatgaagagctggggcttgttacagaaaaataatcataaaatgaacaaaacctcagagcccgggtcatcttctgcaggcggcagaactacatcggggccaccaaatcaccactcttcagccccatcccactccctgtttcgggcctcgtctgctgggaaagtcacttttccagtatgtctcctggcctcttatgatgagatttctggtcaaggagcgagctctcaggatacgaagacatttgacgttgcgctgtccgaggagctccatgcggcactgagtgagtggctgacagcgatccgggcttggttttgtgaggttccttcaagctaagccagctcagagaacacggggagcggtggtgctacacggacttcggagcatagagtggcgctgatggaaaaaggaagtccctgcagcagtccccgcactctttaagcagctgtttaccgaaggcaccagttcagccaggagtgaaatccggagaggagcaacgccagcctgggtcacagtccatcaaaccccatgagcccgaccactctcgctcttccttacattcccacgtcccccttctctcccaacccctcatatca

SEQ ID NO: 169906 - DNA, 2025 bp, Artificial Sequence
  derived and/or modified sequence
atccatttgttctcaagaggtagcaagaaacagtatccacagtggactccggggctcctacagacttggcacagcttcctacagtcttgaaacagccctgttgttctgtcatggccagtgggcagtttgtgaacaaactgcaagaggaagtgatctgccccatctgcctggacattctgcagaaacctgtcaccatcgactgtgggcacaatttctgcctcaaatgcatcactcagattggggaaacatcatgtggatttttcaaatgtcccctctgcaaaacttccgtaaggaagaacgcaatcaggttcaactcgctgttgcggaatctggtggagaaaatccaagctctacaagcctctgaggtgcagtccaaaaggaaagaggctacatgcccgaggcaccaggagatgttccactatttctgcgaggatgatgggaagttcctctgttttgtgtgtcgtgaatccaaggaccacaaatcccataatgtcagcttgatcgaagaagctgcccagaattatcaggggcagattcaagagcagatccaagtcttgcagcaaaaggagaaggagacagtacaagtgaaggcacaaggtgtacacagggtcgatgtcttcacggaccaggtagaacatgagaagcaaaggatcctcacagaatttgaactcctgcatcaagtcctagaggaggagaagaatttcctgctatcacggatttactggctgggtcatgagggaacggaagcggggaaacactatgttgcctccactgagccacagttgaacgatctcaagaagctcgttgattccctgaagaccaagcagaacatgccacccaggcagctgctggagccagctcaaccacatcttcctagaagtgaagagtttcagtttctcaacccaacccctgttcctctggaactggagaaaaaactcagtgaagcaaaatcaagacacgactccatcacagggagcctgaaaaaattcaaagaccaactccaggctgataggaaaaaagatgaaaacagattcttcaaaagcatgaataaaaatgacatgaagagctggggcttgttacagaaaaataatcataaaatgaacaaaacctcagagcccgggtcatcttctgcaggcggcagaactacatcggggccaccaaatcaccactcttcagccccatcccactccctgtttcgggcctcgtctgctgggaaagtcacttttccagtatgtctcctggcctcttatgatgagatttctggtcaaggagcgagctctcaggatacgaagacatttgacgttgcgctgtccgaggagctccatgcggcactgagtgagtggctgacagcgatccgggcttggttttgtgaggttccttcaagctaagccagctcagagaacacggggagcggtggtgctacacggacttcggagcatagagtggcgctgagtgagtggctgagaccgaccacggttcttgacttagtggaattgggtcgaaggagtggagaatgggagggctcgggctactgagagtggagatgggggcgggggtggtggtgaagagagttggagaaggaatggacgagttcttgagcaaaaggaggggaagagacaatctccagccacccgccccacgcttgacttcttatcactttggctgtggtgccgcctagtggaaaaaggaagtccctgcagcagtccccgcactctttaagcagctgtttaccgaaggcaccagttcagccaggagtgaaatccggagaggagcaacgccagcctgggtcacagtccatcaaaccccatgagcccgaccactctcgctcttccttacattcccacgtcccccttctctcccaacccctcatatcagcaagggaaattaattaatgagatttgataaatcagtagatagaatgaggtccccattctgaaatatttagcagactggaaccaccacgcaagcctctgtagggggtggatggagacacttctaactttaataaactgcgactgaacgtgg

SEQ ID NO: 169907 - DNA, 1648 bp, Artificial Sequence
  derived and/or modified sequence
atccatttgttctcaagaggtagcaagaaacagtatccacagtggactccggggctcctacagacttggcacagcttcctacagtcttgaaacagccctgttgttctgtcatggccagtgggcagtttgtgaacaaactgcaagaggaagtgatctgccccatctgcctggacattctgcagaaacctgtcaccatcgactgtgggcacaatttctgcctcaaatgcatcactcagattggggaaacatcatgtggatttttcaaatgtcccctctgcaaaacttccgtaaggaagaacgcaatcaggttcaactcgctgttgcggaatctggtggagaaaatccaagctctacaagcctctgaggtgcagtccaaaaggaaagaggctacatgcccgaggcaccaggagatgttccactatttctgcgaggatgatgggaagttcctctgttttgtgtgtcgtgaatccaaggaccacaaatcccataatgtcagcttgatcgaagaagctgcccagaattatcaggggcagattcaagagcagatccaagtcttgcagcaaaaggagaaggagacagtacaagtgaaggcacaaggtgtacacagggtcgatgtcttcacggaccaggtagaacatgagaagcaaaggatcctcacagaatttgaactcctgcatcaagtcctagaggaggagaagaatttcctgctatcacggatttactggctgggtcatgagggaacggaagcggggaaacactatgttgcctccactgagccacagttgaacgatctcaagaagctcgttgattccctgaagaccaagcagaacatgccacccaggcagctgctggaggatatcaaagtcgtcttgtgcagaagtgaagagtttcagtttctcaacccaacccctgttcctctggaactggagaaaaaactcagtgaagcaaaatcaagacacgactccatcacagggagcctgaaaaaattcaaagaccaactccaggctgataggaaaaaagatgaaaacagattcttcaaaagcatgaataaaaatgacatgaagagctggggcttgttacagaaaaataatcataaaatgaacaaaacctcagagcccgggtcatcttctgcaggcggcagaactacatcggggccaccaaatcaccactcttcagccccatcccactccctgtttcgggcctcgtctgctgggaaagtcacttttccagtatgtctcctggcctcttatgatgagatttctggtcaaggagcgagctctcaggatacgaagacatttgacgttgcgctgtccgaggagctccatgcggcactgagtgagtggctgacagcgatccgggcttggttttgtaaggttccttcaagctaagccagctcagagaacacggggagcggtggtgctccacggacttcggagcatagagtggcgctgatggaaaaaggaagtccctgcagcagtccccgcactctttaagcagctgtttaccgaaggcaccagttcagccaggagtgaaatccagagacgagcaacgccagcctgggtcacagtccatcaaaccccatgagcccgaccactctcgctcttccttacattcccacgtcccccttctctcccaacccctcatatca

SEQ ID NO: 169908 - DNA, 2025 bp, Artificial Sequence
  derived and/or modified sequence
atccatttgttctcaagaggtagcaagaaacagtatccacagtggactccggggctcctacagacttggcacagcttcctacagtcttgaaacagccctgttgttctgtcatggccagtgggcagtttgtgaacaaactgcaagaggaagtgatctgccccatctgcctggacattctgcagaaacctgtcaccatcgactgtgggcacaatttctgcctcaaatgcatcactcagattggggaaacatcatgtggatttttcaaatgtcccctctgcaaaacttccgtaaggaagaacgcaatcaggttcaactcgctgttgcggaatctggtggagaaaatccaagctctacaagcctctgaggtgcagtccaaaaggaaagaggctacatgcccgaggcaccaggagatgttccactatttctgcgaggatgatgggaagttcctctgttttgtgtgtcgtgaatccaaggaccacaaatcccataatgtcagcttgatcgaagaagctgcccagaattatcaggggcagattcaagagcagatccaagtcttgcagcaaaaggagaaggagacagtacaagtgaaggcacaaggtgtacacagggtcgatgtcttcacggaccaggtagaacatgagaagcaaaggatcctcacagaatttgaactcctgcatcaagtcctagaggaggagaagaatttcctgctatcacggatttactggctgggtcatgagggaacggaagcggggaaacactatgttgcctccactgagccacagttgaacgatctcaagaagctcgttgattccctgaagaccaagcagaacatgccacccaggcagctgctggagccagctcaaccacatcttcctagaagtgaagagtttcagtttctcaacccaacccctgttcctctagaactggagaaaaaactcagtgaagcaaaatcaagacacgactccatcacagggagcctgaaaaaattcaaagaccaactccaggctgataggaaaaaagatgaaaacagattcttcaaaagcatgaataaaaatgacatgaagagctggggcttgttacagaaaaataatcataaaatgaacaaaacctcagagcccgggtcatcttctgcaggcggcagaactacatcggggccaccaaatcaccactcttcagccccatcccactccctgtttcgggcctcgtctgctgggaaagtcacttttccagtatgtctcctggcctcttatgatgagatttctggtcaaggagcgagctctcaggatacgaagacatttgacgttgcgctgtccgaggagctccatgcggcactgagtgagtggctgacagcgatccgggcttggttttgtgaggttccttcaagctaagccagctcagagaacacggggagcggtggtgctacacggacttcggagcatagagtggcgctgagtgagtggctgagaccgaccacggttcttgacttagtggaattgggtcgaaggagtggagaatgggagggctcgggctactgagagtggagatgggggcgggggtggtggtgaagagagttggagaaggaatggacgaattcttgagcaaaaggaggggaagagacaatctccagccacccgccccacgcttgacttcttatcactttggctgtggtgccgcctagtggaaaaaggaagtccctgcagcagtccccgcactctttaagcagctgtttaccgaaggcaccagttcagccaggagtgaaatccggagaggagcaacgccagcctgggtcacagtccatcaaaccccatgagcccgaccactctcgctcttccttacattcccacgtcccccttctctcccaacccctcatatcagcaagggaaattaattaatgagatttgataaatcagtagatagaatgaggtccccattctgaaatatttagcagactggaaccaccacgcaagcctctgtagggggtggatggagacacttctaactttaataaactgcgactgaacgtgg

SEQ ID NO: 169909 - DNA, 2025 bp, Artificial Sequence
  derived and/or modified sequence
atccatttgttctcaagaggtagcaagaaacagtatccacagtggactccggggctcctacagacttggcacagcttcctacagtcttgaaacagccctgttgttctgtcatggccagtgggcagtttgtgaacaaactgcaagaggaagtgatctgccccatctgcctggacattctgcagaaacctgtcaccattgactgtgggcacaatttctgcctcaaatgcatcactcagattggggaaacatcatgtggatttttcaaatgtcccctctgcaaaacttccgtaaggaagaacgcaatcaggttcaactcgctgttgcggaatctggtggagaaaatccaagctctacaagcctctgaggtgcagtccaaaaggaaagaggctacatgcccgaggcaccaggagatgttccattatttctgcgaggatgatgggaagttcctctgttttgtgtgtcgtgaatccaaggaccacaaatcccataatgtcagcttgatcgaagaagctgcccagaattatcaggggcagattcaagagcagatccaagtcttgcagcaaaaggagaaggagacagtacaagtgaaggcacaaggtgtacacagggtcgatgtcttcacggaccaggtagaacatgagaagcaaaggatcctcacagaatttgaactcctgcatcaagtcctagaggaggagaagaatttcctgctatcacggatttactggctgggtcatgagggaacggaagcagggaaacactatgttgcctccactgagccacagttgaacgatctcaagaagctcattgattccctgaagaccaagcagaacatgccacccaggcagctgctggagccagctcaaccacatcttcctagaagtgaagagtttcagtttctcaacccaacccctgttcctctggaactggagaaaaaactcagtgaagcaaaatcaagacatgactccatcacagggagcctgaaaaaattcaaagaccaactccaggctgataggaaaaaagatgaaaacagattcttcaaaagcatgaataaaaatgacatgaagagctggggcttgttacagaaaaataatcataaaatgaacaaaacctcagagcccgggtcatcttctgcaggcggcagaactacatcggggccaccaaatcaccactcttcagccccatcccactccctgtttcgggcctcgtctgctgggaaagtcacttttccagtatgtctcctggcctcttatgatgagatttctggtcaaggagcgagctctcaggatacgaagacatttgacgttgcgctgtccgaggagctccatgcggcactgagtgagtggctgacagcgatccgggcttggttttgtaaggttccttcaagctaagccagctcagagaacacggggagcggtggtgctccacggacttcggagcatagagtggcgctgagtgagtggctgagaccgaccacggttcttgacttagtggaattgggtcgaaggagtggagaatgggagggctcgggctactgagagtggagatgggggcgggggtggtggtgaagagagttggagaaggaatggacgagttcttgagcaaaaggaggggaagagacaatctccagccacccgccccacgcttgacttcttatcactttggctgtggtgccgcctagtggaaaaaggaagtccctgcagcagtccccgcactctttaagcagctgtttaccgaaggcaccagttcagccaggagtgaaatccagagacgagcaacgccagcctgggtcacagtccatcaaaccccatgagcccgaccactctcgctcttccttacattcccacgtcccccttctctcccaacccctcatatcagcaagggaaattaattaatgagatttgataaatcagtagatagaatgaggtccccattctgaaatatttagcagactggaaccaccacgcaagcctctgtagggggtggatggagacacttctaactttaataaactgcgactgaacgtgg

SEQ ID NO: 169910 - DNA, 2025 bp, Artificial Sequence
  derived and/or modified sequence
atccatttgttctcaagaggtagcaagaaacagtatccacagtggactccggggctcctacagacttggcacagcttcctacagtcttgaaacagccctgttgttctgtcatggccagtgggcagtttgtgaacaaactgcaagaggaagtgatctgccccatctgcctggacattctgcagaaacctgtcaccatcgactgtgggcacaatttctgcctcaaatgcatcactcagattggggaaacatcatgtggatttttcaaatgtcccctctgcaaaacttccgtaaggaagaacgcaatcaggttcaactcgctgttgcggaatctggtggagaaaatccaagctctacaagcctctgaggtgcagtccaaaaggaaagaggctacatgcccgaggcaccaggagatgttccactatttctgcgaggatgatgggaagttcctctgttttgtgtgttgtgaatccaaggaccacaaatcccataatgtcagcttgatcgaagaagctgcccagaattatcaggggcagattcaagagcagatccaagtcttgcagcaaaaggagaaggagacagtacaagtgaaggcacaaggtgtacacagggtcgatgtcttcacggaccaggtagaacatgagaagcaaaggatcctcacagaatttgaactcctgcatcaagtcctagaggaggagaagaatttcctgctatcacggatttactggctgggtcatgagggaacggaagcggggaaacactatgttgcctccactgagccacagttgaacgatctcaagaagctcgttgattccctgaagaccaagcagaacatgccacccaggcagctgctggagccagctcaaccacatcttcctagaagtgaagagtttcagtttctcaacccaacccctgttcctctggaactggagaaaaaactcagtgaagcaaaatcaagacacgactccatcacagggagcctgaaaaaattcaaagaccaactccaggctgataggaaaaaagatgaaaacagattcttcaaaagcatgaataaaaatgacatgaagagctggggcttgttacagaaaaataatcataaaatgaacaaaacctcagagcccgggtcatcttctgcaggcggcagaactacatcggggccaccaaatcaccactcttcagccccatcccactccctgtttcgggcctcgtctgctgggaaagtcacttttccagtatgtctcctggcctcttatgatgagatttctggtcaaggagcgagctctcaggatacgaagacatttgacgttgcgctgtccgaggagctccatgcggcactgagtgagtggctgacagcgatccgggcttggttttgtgaggttccttcaagctaagccagctcagagaacacggggagcggtggtgctacacggacttcggagcatagagtggcgctgagtgagtggctgagaccgaccacggttcttgacttagtggaattgggtcgaaggagtggagaatgggagggctcgggctactgagagtggagatgggggcgggggtggtggtgaagagagttggagaaggaatggacgagttcttgagcaaaaggaggggaagagacaatctccagccacccgccccacgcttgacttcttatcactttggctgtggtgccgcctagtggaaaaaggaagtccctgcagcagtccccgcactctttaagcagctgtttaccgaaggcaccagttcagccaggagtgaaatccggagaggagcaacgccagcctgggtcacagtccatcaaaccccatgagcccgaccactctcgctcttccttacattcccacgtcccccttctctcccaacccctcatatcagcaagggaaattaattaatgagatttgataaatcagtagatagaatgaggtccccattctgaaatatttagcagactggaaccaccacgcaagcctctgtagggggtggatggagacacttctaactttaataaactgcgactgaacgtgg

SEQ ID NO: 169911 - DNA, 1648 bp, Artificial Sequence
  derived and/or modified sequence
atccatttgttctcaagaggtagcaagaaacagtatccacagtggactccggggctcctacagacttggcacagcttcctacagtcttgaaacagccctgttgttctgtcatggccagtgggcagtttgtgaacaaactgcaagaggaagtgatctgccccatctgcctggacattctgcagaaacctgtcaccatcgactgtgggcacaatttctgcctcaaatgcatcactcagattggggaaacatcatgtggatttttcaaatgtcccctctgcaaaacttccgtaaggaagaacgcaatcaggttcaactcgctgttgcggaatctggtggagaaaatccaagctctacaagcctctgaggtgcagtccaaaaggaaagaggctacatgcccgaggcaccaggagatgttccactatttctgcgaggatgatgggaagttcctctgttttgtgtgtcgtgaatccaaggaccacaaatcccataatgtcagcttgatcgaagaagctgcccagaattatcaggggcagattcaagagcagatccaagtcttgcagcaaaaggagaaggagacagtacaagtgaaggcacaaggtgtacacagggtcgatgtcttcacggaccaggtagaacatgagaagcaaaggatcctcacagaatttgaactcctgcatcaagtcctagaggaggagaagaatttcctgctatcacggatttactggctgggtcatgagggaacggaagcggggaaacactatgttgcctccactgagccacagttgaacgatctcaagaagctcgttgattccctgaagaccaagcagaacatgccacccaggcagctgctggaggatatcaaagtcgtcttgtgcagaagtgaagagtttcagtttctcaacccaacccctgttcctctagaactggagaaaaaactcagtgaagcaaaatcaagacacgactccatcacagggagcctgaaaaaattcaaagaccaactccaggctgataggaaaaaagatgaaaacagattcttcaaaagcatgaataaaaatgacatgaagagctggggcttgttacagaaaaataatcataaaatgaacaaaacctcagagcccgggtcatcttctgcaggcggcagaactacatcggggccaccaaatcaccactcttcagccccatcccactccctgtttcgggcctcgtctgctgggaaagtcacttttccagtatgtctcctggcctcttatgatgagatttctggtcaaggagcgagctctcaggatacgaagacatttgacgttgcgctgtccgaggagctccatgcggcactgagtgagtggctgacagcgatccgggcttggttttgtgaggttccttcaagctaagccagctcagagaacacggggagcggtggtgctacacggacttcggagcatagagtggcgctgatggaaaaaggaagtccctgcagcagtccccgcactctttaagcagctgtttaccgaaggcaccagttcagccaggagtgaaatccggagaggagcaacgccagcctgggtcacagtccatcaaaccccatgagcccgaccactctcgctcttccttacattcccacgtcccccttctctcccaacccctcatatca

SEQ ID NO: 169912 - DNA, 2025 bp, Artificial Sequence
  derived and/or modified sequence
atccatttgttctcaagaggtagcaagaaacagtatccacagtggactccggggctcctacagacttggcacagcttcctacagtcttgaaacagccctgttgttctgtcatggccagtgggcagtttgtgaacaaactgcaagaggaagtgatctgccccatctgcctggacattctgcagaaacctgtcaccatcgactgtgggcacaatttctgcctcaaatgcatcactcagattggggaaacatcatgtggatttttcaaatgtcccctctgcaaaacttccgtaaggaagaacgcaatcaggttcaactcgctgttgcggaatctggtggagaaaatccaagctctacaagcctctgaggtgcagtccaaaaggaaagaggctacatgcccgaggcaccaggagatgttccactatttctgcgaggatgatgggaagttcctctgttttgtgtgtcgtgaatccaaggaccacaaatcccataatgtcagcttgatcgaagaagctgcccagaattatcaggggcagattcaagagcagatccaagtcttgcagcaaaaggagaaggagacagtacaagtgaaggcacaaggtgtacacagggtcgatgtcttcacggaccaggtagaacatgagaagcaaaggatcctcacagaatttgaactcctgcatcaagtcctagaggaggagaagaatttcctgctatcacggatttactggctgggtcatgagggaacggaagcggggaaacactatgttgcctccactgagccacagttgaacgatctcaagaagctcgttgattccctgaagaccaagcagaacatgccacccaggcagctgctggagccagctcaaccacatcttcctagaagtgaagagtttcagtttctcaacccaacccctgttcctctagaactggagaaaaaactcagtgaagcaaaatcaagacacgactccatcacagggagcctgaaaaaattcaaagaccaactccaggctgataggaaaaaagatgaaaacagattcttcaaaagcatgaataaaaatgacatgaagagctggggcttgttacagaaaaataatcataaaatgaacaaaacctcagagcccgggtcatcttctgcaggcggcagaactacatcggggccaccaaatcaccactcttcagccccatcccactccctgtttcgggcctcgtctgctgggaaagtcacttttccagtatgtctcctggcctcttatgatgagatttctggtcaaggagcgagctctcaggatacgaagacatttgacgttgcgctgtccgaggagctccatgcggcactgagtgagtggctgacagcgatccgggcttggttttgtgaggttccttcaagctaagccagctcagagaacacggggagcggtggtgctacacggacttcggagcatagagtggcgctgagtgagtggctgagaccgaccacggttcttgacttagtggaattgggtcgaaggagtggagaatgggagggctcgggctactgagagtggagatgggggcgggggtggtggtgaagagagttggagaaggaatggacgagttcttgagcaaaaggaggggaagagacaatctccagccacccgccccacgcttgacttcttatcactttggctgtggtgccgcctagtggaaaaaggaagtccctgcagcagtccccgcactctttaagcagctgtttaccgaaggcaccagttcagccaggagtgaaatccggagaggagcaacgccagcctgggtcacagtccatcaaaccccatgagcccgaccactctcgctcttccttacattcccacgtcccccttctctcccaacccctcatatcagcaagggaaattaattaatgagatttgataaatcagtagatagaatgaggtccccattctgaaatatttagcagactggaaccaccacgcaagcctctgtagggggtggatggagacacttctaactttaataaactgcgactgaacgtgg

SEQ ID NO: 169913 - DNA, 1648 bp, Artificial Sequence
  derived and/or modified sequence
atccatttgttctcaagaggtagcaagaaacagtatccacagtggactccggggctcctacagacttggcacagcttcctacagtcttgaaacagccctgttgttctgtcatggccagtgggcagtttgtgaacaaactgcaagaggaagtgatctgccccatctgcctggacattctgcagaaacctgtcaccatcgactgtgggcacaatttctgcctcaaatgcatcactcagattggggaaacatcatgtggatttttcaaatgtcccctctgcaaaacttccgtaaggaagaacgcaatcaggttcaactcgctgttgcggaatctggtggagaaaatccaagctctacaagcctctgaggtgcagtccaaaaggaaagaggctacatgcccgaggcaccaggagatgttccactatttctgcgaggatgatgggaagttcctctgttttgtgtgttgtgaatccaaggaccacaaatcccataatgtcagcttgatcgaagaagctgcccagaattatcaggggcagattcaagagcagatccaagtcttgcagcaaaaggagaaggagacagtacaagtgaaggcacaaggtgtacacagggtcgatgtcttcacggaccaggtagaacatgagaagcaaaggatcctcacagaatttgaactcctgcatcaagtcctagaggaggagaagaatttcctgctatcacggatttactggctgggtcatgagggaacggaagcggggaaacactatgttgcctccactgagccacagttgaacgatctcaagaagctcgttgattccctgaagaccaagcagaacatgccacccaggcagctgctggaggatatcaaagtcgtcttgtgcagaagtgaagagtttcagtttctcaacccaacccctgttcctctggaactggagaaaaaactcagtgaagcaaaatcaagacacgactccatcacagggagcctgaaaaaattcaaagaccaactccaggctgataggaaaaaagatgaaaacagattcttcaaaagcatgaataaaaatgacatgaagagctggggcttgttacagaaaaataatcataaaatgaacaaaacctcagagcccgggtcatcttctgcaggcggcagaactacatcggggccaccaaatcaccactcttcagccccatcccactccctgtttcgggcctcgtctgctgggaaagtcacttttccagtatgtctcctggcctcttatgatgagatttctggtcaaggagcgagctctcaggatacgaagacatttgacgttgcgctgtccgaggagctccatgcggcactgagtgagtggctgacagcgatccgggcttggttttgtgaggttccttcaagctaagccagctcagagaacacggggagcggtggtgctacacggacttcggagcatagagtggcgctgatggaaaaaggaagtccctgcagcagtccccgcactctttaagcagctgtttaccgaaggcaccagttcagccaggagtgaaatccggagaggagcaacgccagcctgggtcacagtccatcaaaccccatgagcccgaccactctcgctcttccttacattcccacgtcccccttctctcccaacccctcatatca

SEQ ID NO: 169914 - DNA, 1648 bp, Artificial Sequence
  derived and/or modified sequence
atccatttgttctcaagaggtagcaagaaacagtatccacagtggactccggggctcctacagacttggcacagcttcctacagtcttgaaacagccctgttgttctgtcatggccagtgggcagtttgtgaacaaactgcaagaggaagtgatctgccccatctgcctggacattctgcagaaacctgtcaccattgactgtgggcacaatttctgcctcaaatgcatcactcagattggggaaacatcatgtggatttttcaaatgtcccctctgcaaaacttccgtaaggaagaacgcaatcaggttcaactcgctgttgcggaatctggtggagaaaatccaagctctacaagcctctgaggtgcagtccaaaaggaaagaggctacatgcccgaggcaccaggagatgttccattatttctgcgaggatgatgggaagttcctctgttttgtgtgtcgtgaatccaaggaccacaaatcccataatgtcagcttgatcgaagaagctgcccagaattatcaggggcagattcaagagcagatccaagtcttgcagcaaaaggagaaggagacagtacaagtgaaggcacaaggtgtacacagggtcgatgtcttcacggaccaggtagaacatgagaagcaaaggatcctcacagaatttgaactcctgcatcaagtcctagaggaggagaagaatttcctgctatcacggatttactggctgggtcatgagggaacggaagcagggaaacactatgttgcctccactgagccacagttgaacgatctcaagaagctcattgattccctgaagaccaagcagaacatgccacccaggcagctgctggaggatatcaaagtcgtcttgtgcagaagtgaagagtttcagtttctcaacccaacccctgttcctctggaactggagaaaaaactcagtgaagcaaaatcaagacatgactccatcacagggagcctgaaaaaattcaaagaccaactccaggctgataggaaaaaagatgaaaacagattcttcaaaagcatgaataaaaatgacatgaagagctggggcttgttacagaaaaataatcataaaatgaacaaaacctcagagcccgggtcatcttctgcaggcggcagaactacatcggggccaccaaatcaccactcttcagccccatcccactccctgtttcgggcctcgtctgctgggaaagtcacttttccagtatgtctcctggcctcttatgatgagatttctggtcaaggagcgagctctcaggatacgaagacatttgacgttgcgctgtccgaggagctccatgcggcactgagtgagtggctgacagcgatccgggcttggttttgtaaggttccttcaagctaagccagctcagagaacacggggagcggtggtgctccacggacttcggagcatagagtggcgctgatggaaaaaggaagtccctgcagcagtccccgcactctttaagcagctgtttaccgaaggcaccagttcagccaggagtgaaatccagagacgagcaacgccagcctgggtcacagtccatcaaaccccatgagcccgaccactctcgctcttccttacattcccacgtcccccttctctcccaacccctcatatca

SEQ ID NO: 169915 - DNA, 2025 bp, Artificial Sequence
  derived and/or modified sequence
atccatttgttctcaagaggtagcaagaaacagtatccacagtggactccggggctcctacagacttggcacagcttcctacagtcttgaaacagccctgttgttctgtcatggccagtgggcagtttgtgaacaaactgcaagaggaagtgatctgccccatctgcctggacattctgcagaaacctgtcaccatcgactgtgggcacaatttctgcctcaaatgcatcactcagattggggaaacatcatgtggatttttcaaatgtcccctctgcaaaacttccgtaaggaagaacgcaatcaggttcaactcgctgttgcggaatctggtggagaaaatccaagctctacaagcctctgaggtgcagtccaaaaggaaagaggctacatgcccgaggcaccaggagatgttccactatttctgcgaggatgatgggaagttcctctgttttgtgtgtcgtgaatccaaggaccacaaatcccataatgtcagcttgatcgaagaagctgcccagaattatcaggggcagattcaagagcagatccaagtcttgcagcaaaaggagaaggagacagtacaagtgaaggcacaaggtgtacacagggtcgatgtcttcacggaccaggtagaacatgagaagcaaaggatcctcacagaatttgaactcctgcatcaagtcctagaggaggagaagaatttcctgctatcacggatttactggctgggtcatgagggaacggaagcggggaaacactatgttgcctccactgagccacagttgaacgatctcaagaagctcgttgattccctgaagaccaagcagaacatgccacccaggcagctgctggagccagctcaaccacatcttcctagaagtgaagagtttcagtttctcaacccaacccctgttcctctggaactggagaaaaaactcagtgaagcaaaatcaagacacgactccatcacagggagcctgaaaaaattcaaagaccaactccaggctgataggaaaaaagatgaaaacagattcttcaaaagcatgaataaaaatgacatgaagagctggggcttgttacagaaaaataatcataaaatgaacaaaacctcagagcccgggtcatcttctgcaggcggcagaactacatcggggccaccaaatcaccactcttcagccccatcccactccctgtttcgggcctcgtctgctgggaaagtcacttttccagtatgtctcctggcctcttatgatgagatttctggtcaaggagcgagctctcaggatacgaagacatttgacgttgcgctgtccgaggagctccatgcggcactgagtgagtggctgacagcgatccgggcttggttttgtaaggttccttcaagctaagccagctcagagaacacggggagcggtggtgctccacggacttcggagcatagagtggcgctgagtgagtggctgagaccgaccacggttcttgacttagtggaattgggtcgaaggagtggagaatgggagggctcgggctactgagagtggagatgggggcgggggtggtggtgaagagagttggagaaggaatggacgagttcttgagcaaaaggaggggaagagacaatctccagccacccgccccacgcttgacttcttatcactttggctgtggtgccgcctagtggaaaaaggaagtccctgcagcagtccccgcactctttaagcagctgtttaccgaaggcaccagttcagccaggagtgaaatccagagacgagcaacgccagcctgggtcacagtccatcaaaccccatgagcccgaccactctcgctcttccttacattcccacgtcccccttctctcccaacccctcatatcagcaagggaaattaattaatgagatttgataaatcagtagatagaatgaggtccccattctgaaatatttagcagactggaaccaccacgcaagcctctgtagggggtggatggagacacttctaactttaataaactgcgactgaacgtgg

SEQ ID NO: 169916 - DNA, 1648 bp, Artificial Sequence
  derived and/or modified sequence
atccatttgttctcaagaggtagcaagaaacagtatccacagtggactccggggctcctacagacttggcacagcttcctacagtcttgaaacagccctgttgttctgtcatggccagtgggcagtttgtgaacaaactgcaagaggaagtgatctgccccatctgcctggacattctgcagaaacctgtcaccatcgactgtgggcacaatttctgcctcaaatgcatcactcagattggggaaacatcatgtggatttttcaaatgtcccctctgcaaaacttccgtaaggaagaacgcaatcaggttcaactcgctgttgcggaatctggtggagaaaatccaagctctacaagcctctgaggtgcagtccaaaaggaaagaggctacatgcccgaggcaccaggagatgttccactatttctgcgaggatgatgggaagttcctctgttttgtgtgtcgtgaatccaaggaccacaaatcccataatgtcagcttgatcgaagaagctgcccagaattatcaggggcagattcaagagcagatccaagtcttgcagcaaaaggagaaggagacagtacaagtgaaggcacaaggtgtacacagggtcgatgtcttcacggaccaggtagaacatgagaagcaaaggatcctcacagaatttgaactcctgcatcaagtcctagaggaggagaagaatttcctgctatcacggatttactggctgggtcatgagggaacggaagcggggaaacactatgttgcctccactgagccacagttgaacgatctcaagaagctcgttgattccctgaagaccaagcagaacatgccacccaggcagctgctggaggatatcaaagtcgtcttgtgcagaagtgaagagtttcagtttctcaacccaacccctgttcctctggaactggagaaaaaactcagtgaagcaaaatcaagacacgactccatcacagggagcctgaaaaaattcaaagaccaactccaggctgataggaaaaaagatgaaaacagattcttcaaaagcatgaataaaaatgacatgaagagctggggcttgttacagaaaaataatcataaaatgaacaaaacctcagagcccgggtcatcttctgcaggcggcagaactacatcggggccaccaaatcaccactcttcagccccatcccactccctgtttcgggcctcgtctgctgggaaagtcacttttccagtatgtctcctggcctcttatgatgagatttctggtcaaggagcgagctctcaggatacgaagacatttgacgttgcgctgtccgaggagctccatgcggcactgagtgagtggctgacagcgatccgggcttggttttgtgaggttccttcaagctaagccagctcagagaacacggggagcggtggtgctacacggacttcggagcatagagtggcgctgatggaaaaaggaagtccctgcagcagtccccgcactctttaagcagctgtttaccgaaggcaccagttcagccaggagtgaaatccggagaggagcaacgccagcctgggtcacagtccatcaaaccccatgagcccgaccactctcgctcttccttacattcccacgtcccccttctctcccaacccctcatatca

SEQ ID NO: 169917 - protein, 179 aa, Artificial Sequence
  derived and/or modified sequence
MAKTAMAYKEKMKELSMLSLICSCFYPEPRNINIYTYDDMEVKQINKRASGQAFELILKPPSPISEAPRTLASPKKKDLSLEEIQKKLEAAEERRKSQEAQVLKQLAEKREHEREVLQKALEENNNFSKMAEEKLILKMEQIKENREANLAAIIERLQEKERHAAEVRRNKELQVELSG

SEQ ID NO: 169918 - protein, 168 aa, Artificial Sequence
  derived and/or modified sequence
MAKTAMAYKEKMKELSMLSLICSCFYPEPRNINIYTYDDMEVKQINKRASGQAFELILKPPSPKKKDLSLEEIQKKLEAAEERRKSQEAQVLKQLAEKREHEREVLQKALEENNNFSKMAEEKLILKMEQIKENREANLAAIIERLQEKERHAAEVRRNKELQVELSG

SEQ ID NO: 169919 - DNA, 507 bp, Artificial Sequence
  derived and/or modified sequence
atggccaagaccgccatggcctacaaggagaagatgaaggagctgagcatgctgagcctgatctgcagctgcttctaccccgagcccagaaacatcaacatctacacctacgacgacatggaggtgaagcagatcaacaagagagccagcggccaggccttcgagctgatcctgaagccccccagccccaagaagaaggacctgagcctggaggagatccagaagaagctggaggccgccgaggagagaagaaagagccaggaggcccaggtgctgaagcagctggccgagaagagagagcacgagagagaggtgctgcagaaggccctggaggagaacaacaacttcagcaagatggccgaggagaagctgatcctgaagatggagcagatcaaggagaacagagaggccaacctggccgccatcatcgagagactgcaggagaaggagagacacgccgccgaggtgagaagaaacaaggagctgcaggtggagctgagcggctag

SEQ ID NO: 169920 - DNA, 540 bp, Artificial Sequence
  derived and/or modified sequence
atggccaagaccgccatggcctacaaggagaagatgaaggagctgagcatgctgagcctgatctgcagctgcttctaccccgagcccagaaacatcaacatctacacctacgacgacatggaggtgaagcagatcaacaagagagccagcggccaggccttcgagctgatcctgaagccccccagccccatcagcgaggcccccagaaccctggccagccccaagaagaaggacctgagcctggaggagatccagaagaagctggaggccgccgaggagagaagaaagagccaggaggcccaggtgctgaagcagctggccgagaagagagagcacgagagagaggtgctgcagaaggccctggaggagaacaacaacttcagcaagatggccgaggagaagctgatcctgaagatggagcagatcaaggagaacagagaggccaacctggccgccatcatcgagagactgcaggagaaggagagacacgccgccgaggtgagaagaaacaaggagctgcaggtggagctgagcggctag

SEQ ID NO: 169921 - DNA, 507 bp, Artificial Sequence
  derived and/or modified sequence
atggccaaaacagccatggcgtacaaagaaaagatgaaagaactctccatgttgtcccttatctgctcttgcttttaccccgagcctagaaacatcaatatctacacatatgacgatatggaggtgaagcaaataaataaacgggcatccggccaagctttcgagctcatcctgaagccaccttctcccaaaaaaaaagatttatcgctggaagaaatccaaaagaagctggaagctgcagaggaaaggagaaagagtcaagaggcccaagtcctgaagcagctagctgagaaaagggagcatgagagggaggtgctgcaaaaggccttggaggagaataacaacttctcaaagatggctgaagaaaaactgattctcaaaatggagcagatcaaagaaaatagagaggctaaccttgcagcaataatagagaggctgcaggaaaaagagaggcacgctgccgaggttcggagaaacaaggagctgcaagtcgaattgtcaggctag

SEQ ID NO: 169922 - DNA, 540 bp, Artificial Sequence
  derived and/or modified sequence
atggctaagacagcgatggcctataaagagaagatgaaggaactttctatgctaagcctgatatgtagctgtttttatcctgaacccaggaacatcaacatatacacctatgatgatatggaggttaaacagattaacaagcgagcttcgggtcaagcattcgaactgatcttaaagccgccctctccaatatccgaggcaccacgaacactggctagtcccaagaagaaagatttgtccctcgaggaaatccagaagaagctggaagctgccgaagaacgccggaagagccaagaagcccaggttctgaaacaactcgccgaaaaacgcgagcacgaacgcgaggtgttacagaaggctctggaggagaataataacttcagcaaaatggcggaagagaagctgattctgaagatggaacagatcaaggaaaacagggaggctaacctcgcagcaattatagaacgcctccaggaaaaagagcgccatgcagccgaggtgcgtcggaataaagagcttcaagtggagctatctggatag

SEQ ID NO: 169923 - DNA, 507 bp, Artificial Sequence
  derived and/or modified sequence
atggccaagacagccatggcctacaaggagaagatgaaggagctgtccatgctgagcctcatctgcagctgcttctacccagagcccaggaacatcaacatctacacctatgatgacatggaggtgaagcagatcaacaagagggccagcggccaggcctttgagctgatcctgaagccacccagccccaagaagaaggacctgagcctggaggagatccagaagaagctggaggccgctgaggagaggaggaagagccaggaggcccaggtgctgaagcagctggccgagaagcgggagcacgagcgggaggtgctgcagaaggccctggaggagaacaacaacttcagcaagatggccgaggagaagctgatcctgaagatggagcagatcaaggaaaatcgggaggccaacctggccgccatcatcgagcggctgcaggagaaggagagacatgctgctgaggtgagaagaaacaaggagctgcaggtggagctgtctggatag

SEQ ID NO: 169924 - DNA, 540 bp, Artificial Sequence
  derived and/or modified sequence
atggccaagacagccatggcctacaaggagaagatgaaggagctgtccatgctgagcctcatctgcagctgcttctacccagagcccaggaacatcaacatctacacctatgatgacatggaggtgaagcagatcaacaagagggccagcggccaggcctttgagctgatcctgaagccacccagccccatcagcgaggcccccaggaccctggccagccccaagaagaaggacctgagcctggaggagatccagaagaagctggaggccgctgaggagaggaggaagagccaggaggcccaggtgctgaagcagctggccgagaagcgggagcacgagcgggaggtgctgcagaaggccctggaggagaacaacaacttcagcaagatggccgaggagaagctgatcctgaagatggagcagatcaaggagaaccgggaggccaacctggccgccatcatcgagcggctgcaggagaaggagagacatgctgctgaggtgagaagaaacaaggagctgcaggtggagctgagcggctag

SEQ ID NO: 169925 - DNA, 507 bp, Artificial Sequence
  derived and/or modified sequence
atggccaagaccgccatggcctacaaggagaagatgaaggagctgtcgatgctgagcttgatatgtagctgcttctaccctgagcctcggaacataaacatatacacctacgacgatatggaggtgaaacaaattaataagcgggcgagcggccaggcgtttgagctgatcctaaagcctccttctccgaaaaagaaggatctgtcccttgaagagattcagaagaaactcgaagcagccgaggagcgccgcaagtcccaagaggcccaagtccttaagcaactagccgaaaaaagagagcatgaacgggaggttttgcaaaaggccctcgaggagaacaataactttagcaagatggcggaggagaagctcatactcaagatggagcagattaaagagaaccgggaggctaacctcgcagctattattgagagacttcaggagaaggagaggcacgcggccgaggtccgccgaaataaggagctgcaggtggagctctctggctag

SEQ ID NO: 169926 - DNA, 540 bp, Artificial Sequence
  derived and/or modified sequence
atggccaagaccgccatggcctacaaggagaagatgaaggagctgtcgatgctgtctctgatttgttcatgtttctaccctgagcctagaaatatcaacatttatacttacgatgatatggaagtgaaacaaatcaataagcgggcatcagggcaggcattcgagcttatactgaagcctccaagcccaatatctgaagctccccgcacgctagccagtcctaaaaaaaaagatttgtcccttgaggaaatccaaaagaaactggaagccgccgaggaaagaaggaaaagtcaggaggcccaggttctaaagcagttggcagagaagagagagcacgagagagaagtgctgcagaaagccctcgaagagaataacaacttttctaagatggcggaggaaaaactgatattgaaaatggaacagattaaggagaacagggaggctaacctcgccgctatcatcgagagactgcaggagaaggaacggcacgctgcagaagtccgcaggaacaaagagctgcaagtagagctgtcaggttag

SEQ ID NO: 169927 - DNA, 507 bp, Artificial Sequence
  derived and/or modified sequence
atggctaaaactgccatggcctacaaagaaaagatgaaagaactgagcatgctctccctgatttgtagttgcttttacccggagccgaggaatataaatatttatacctatgatgatatggaggtgaagcagataaacaagagggcctctggccaggccttcgagctcatcttgaagccaccctctcccaagaagaaggacttaagccttgaagagatccagaaaaaactggaagcggctgaggaaagaaggaagtcccaggaagcacaagtcttaaaacagctagccgagaaacgggaacatgaacgcgaggtgttacagaaggccctcgaggagaataacaatttcagcaagatggccgaggagaaacttatacttaagatggagcaaattaaggagaaccgggaagctaatctggcggctatcatcgaacgcctccaggagaaggagcggcacgcggctgaagttcgcagaaataaggagttgcaggtggagttaagcggctag

SEQ ID NO: 169928 - DNA, 540 bp, Artificial Sequence
  derived and/or modified sequence
atggcgaagaccgccatggcttacaaagaaaagatgaaggaattatccatgcttagtctgatctgttcttgcttttaccccgagcccaggaacattaacatttacacctacgatgacatggaggtcaagcagattaacaagagggcttctgggcaggcgttcgaactgattttaaagccaccctcacccatcagtgaggctccgaggacattagcatctcccaagaaaaaagatctttcgctcgaagaaattcagaagaaactggaagcagccgaggaacggagaaagagccaggaggcacaagtgttaaagcagctcgccgagaaaagagagcacgaaagagaggtactgcagaaggcactggaggagaataataacttctcaaagatggccgaggagaagctaatcctgaagatggaacagatcaaggaaaatcgcgaggctaacctggcagctataatagagcggctgcaagaaaaggagagacacgccgcagaggtccggagaaataaagagctgcaggtcgagctttccggatag

SEQ ID NO: 169929 - DNA, 2210 bp, Artificial Sequence
  derived and/or modified sequence
agctcctaggaagcttcagggcttaaagctccactctacttggactgtactatcaggcccccaaaatggggggagccgacagggaaggactgatttccatttcaaactgcattctggtactttgtactccagcaccattggccgatcaatatttaatgcttggagattctgactctgcgggagtcatgtcaggggaccttgggagccaatctgcttgagcttctgagtgataattattcatgggctcctgcctcttgctctttctctagcacggtcccactctgcagactcagtgccttattcagtcttctctctcgctctctccgctgctgtagccggaccctttgccttcgccactgctcagcgtctgcacatccctacaatggctaaaacagcaatggcctacaaggaaaaaatgaaggagctgtccatgctgtcactgatctgctcttgcttttacccggaacctcgcaacatcaacatctatacttacgatgatatggaagtgaagcaaatcaacaaacgtgcctctggccaggcttttgagctgatcttgaagccaccatctcctatctcagaagccccacgaactttagcttctccaaagaagaaagacctgtccctggaggagatccagaagaaactggaggctgcagaggaaagaagaaagtctcaggaggcccaggtgctgaaacaattggcagagaagagggaacacgagcgagaagtccttcagaaggctttggaggagaacaacaacttcagcaagatggcggaggaaaagctgatcctgaaaatggaacaaattaaggaaaaccgtgaggctaatctagctgctattattgaacgtctgcaggaaaaggagaggcatgctgcggaggtgcgcaggaacaaggaactccaggttgaactgtctggctgaagcaagggagggtctggcacgccccaccaatagtaaatccccctgcctatattataatggatcatgcgatatcaggatggggaatgtatgacatggtttaaaaagaactcattataaaaaaaaaaaaacaaaaaaaatcaaaaattaaaaaaaatcaatgcggtctctttgcagaatgttttgcttgatgtttaaaaaataccttggatcttattttgtaaatacttacatttttgttaaaaaatacaagtattgcattatgcaagttatttcataatcttacatgtcctgtaacaggcttttgatgttgtgtctttccactcaaatgaatttgctaggtctgttctttttgaagctccccatgtctaactccattccaaaagaaaaatgaggtcagtagacagtctatggtgctagaaacccaccattgcctaatgacctagaaggctttgttgtctctgagcttgactaagaccatacctagatcacaggtattatgactccacatgaaccttcacatttgttcgctcataatctacttactgcctaaaaactacaaaaccaggctaagaaataccaccagtcatagcatttacttctgcttctcctggattatgtgctacaaatgtgctttggctttagaaagggatggatgagaagacagacctgagaccaatctgggtagaagcaaaaagttgaaccttttaaagtgctgaacacaaatccaaattcgaatggttcaagcagccgtgaaatcgctcttcataaagtgggcttaattctctagtttaagttcttttgatggaatgaattaattaatgtgtcaggtggcttatttgtggatgccatgattgatgatgttcattttaagctcttacctatagtacaagtacatgatgctactgaatatttttccacttggaaactgtgagctggttgttgcattaaaacacacatacaaacaaaatcaaaaacactgcggactttcactcaagctggtctttcttccccagtgtaaggcaatcctgcctactaacaacaccaacaacaaaacactccatctgtgaagctgacgcagttaagggggctaggcagggcatttgtgccaactaagaatcaccagatacccaccataagtacctatcgcagttttgaagtcgtttctccccaactcccaactcctgaaggttgctgcctgcatatttactcttcattagtgctattttcctgtatgtcattgtgagcaagctgtgattaataaagaattggagttctgtgaactaataaa

SEQ ID NO: 169930 - DNA, 1516 bp, Artificial Sequence
  derived and/or modified sequence
ttctctctcgctctctccgctgctgtagccggaccctttgccttcgccactgctcagcgtctgcacatccctacaatggctaaaacagcaatggcctacaaggaaaaaatgaaggagctgtccatgctgtcactgatctgctcttgcttttacccggaacctcgcaacatcaacatctatacttacgatgatatggaagtgaagcaaatcaacaaacgtgcctctggccaggcttttgagctgatcttgaagccaccatctccaaagaagaaagacctgtccctggaggagatccagaagaaactggaggctgcagaggaaagaagaaagtctcaggaggcccaggtgctgaaacaattggcagagaagagggaacacgagcgagaagtccttcagaaggctttggaggagaacaacaacttcagcaagatggcggaggaaaagctgatcctgaaaatggaacaaattaaggaaaaccgtgaggctaatctagctgctattattgaacgtctgcaggaaaaggagaggcatgctgcggaggtgcgcaggaacaaggaactccaggttgaactgtctggctgaagcaagggagggtctggcacgccccaccaatagtaaatccccctgcctatattataatggatcatgcgatatcaggatggggaatgtatgacatggtttaaaaagaactcattataaaaaaaaaaaaacaaaaaaaatcaaaaattaaaaaaaatcaatgcggtctctttgcagaatgttttgcttgatgtttaaaaaataccttggatcttattttgtaaatacttacatttttgttaaaaaatacaagtattgcattatgcaagttatttcataatcttacatgtcctgtaacaggcttttgatgttgtgtctttccactcaaatgaatttgctaggtctgttctttttgaagctccccatgtctaactccattccaaaagaaaaatgaggtcagtagacagtctatggtgctagaaacccaccattgcctaatgacctagaaggctttgttgtctctgagcttgactaagaccatacctagatcacaggtattatgactccacatgaaccttcacatttgttcgctcataatctacttactgcctaaaaactacaaaaccaggctaagaaataccaccagtcatagcatttacttctgcttctcctggattatgtgctacaaatgtgctttggctttagaaagggatggatgagaagacagacctgagaccaatctgggtagaagcaaaaagttgaaccttttaaagtgctgaacacaaatccaaattcgaatggttcaagcagccgtgaaatcgctcttcataaagtgggcttaattctctagtttaagttcttttgatggaatgaattaattaatgtgtcaggtggcttatttgtggatgccatgattgatgatgttcattttaagctcttacctatagtacaagtacatgatgctactgaatatttttccacttggaaactgtgagct

SEQ ID NO: 169931 - protein, 219 aa, Artificial Sequence
  derived and/or modified sequence
MADKAKPAKAANRTPPKSPGDPSKDRAAKRLSLESEGAGEGAAASPELSALEEAFRRFAVHGDARATGREMHGKNWSKLCKDCQVIDGRNVTVTDVDIVFSKIKGKSCRTITFEQFQEALEELAKKRFKDKSSEEAVREVHRLIEGKAPIISGVTKAISSPTVSRLTDTTKFTGSHKERFDPSGKGKGKAGRVDLVDESGYVSGYKHAGTYDQKVQGGK

SEQ ID NO: 169932 - DNA, 660 bp, Artificial Sequence
  derived and/or modified sequence
atggccgacaaggccaagcccgccaaggccgccaacagaaccccccccaagagccccggcgaccccagcaaggacagagccgccaagagactgagcctggagagcgagggcgccggcgagggcgccgccgccagccccgagctgagcgccctggaggaggccttcagaagattcgccgtgcacggcgacgccagagccaccggcagagagatgcacggcaagaactggagcaagctgtgcaaggactgccaggtgatcgacggcagaaacgtgaccgtgaccgacgtggacatcgtgttcagcaagatcaagggcaagagctgcagaaccatcaccttcgagcagttccaggaggccctggaggagctggccaagaagagattcaaggacaagagcagcgaggaggccgtgagagaggtgcacagactgatcgagggcaaggcccccatcatcagcggcgtgaccaaggccatcagcagccccaccgtgagcagactgaccgacaccaccaagttcaccggcagccacaaggagagattcgaccccagcggcaagggcaagggcaaggccggcagagtggacctggtggacgagagcggctacgtgagcggctacaagcacgccggcacctacgaccagaaggtgcagggcggcaagtag

SEQ ID NO: 169933 - DNA, 660 bp, Artificial Sequence
  derived and/or modified sequence
atggctgataaagcaaaacctgcgaaggctgcgaataggacgcctcctaaatctccaggcgacccttctaaagatagagccgctaagaggttgtcgttggaatctgagggagctggtgagggagcagctgcctcacccgagctgagcgccctggaggaagccttccgccgatttgccgtgcacggcgatgcacgagccactggaagagagatgcacggtaagaactggagtaaactgtgcaaggattgtcaggtaatcgatggaagaaacgtgacagtaacggacgtagacattgtttttagtaagatcaaggggaagtcatgccgcactataactttcgaacaattccaagaagctctcgaggaacttgccaagaagcgtttcaaagacaagagctctgaagaggccgtgcgcgaagtgcaccggctgatcgagggcaaggctcccatcatatcgggagttaccaaggcaattagcagcccaactgtaagtcggctgactgacactaccaagtttacaggtagtcataaggagagatttgaccctagtggaaagggtaaggggaaggccggacgggtggatctggtggacgaatccggctacgtatctggatataaacacgcgggaacatacgaccagaaggtccaaggtggcaagtag

SEQ ID NO: 169934 - DNA, 660 bp, Artificial Sequence
  derived and/or modified sequence
atggctgacaaggccaagccagccaaggccgccaacagaacaccacccaagagccctggggaccccagcaaggacagagctgccaagaggctgagcctggagagcgagggcgctggggagggcgctgctgccagccctgagctgagcgccctggaggaggccttccgccgctttgctgtgcatggagatgcccgggccaccggccgggagatgcacggcaagaactggagcaagctgtgcaaggactgccaggtgattgatggaagaaatgtgacagtgacagatgtggacatcgtgttcagcaagatcaagggcaagagctgcaggaccatcacctttgagcagttccaggaggccctggaggagctggccaagaagcgcttcaaggacaagagcagcgaggaggccgtgcgggaggtgcacaggctcatcgagggcaaggcccccatcatcagcggcgtgaccaaggccatcagcagccccaccgtgtcccggctgacagacaccaccaagttcaccggcagccacaaggagagatttgaccccagcggcaagggcaagggcaaggccggccgggtggacctggtggatgaaagtggctacgtgtctggctacaagcacgccggcacctatgaccagaaggtgcagggcggcaagtag

SEQ ID NO: 169935 - DNA, 660 bp, Artificial Sequence
  derived and/or modified sequence
atggccgacaaggccaagcccgccaaggccgccaaccggaccccccctaagtcacccggggatccatctaaggaccgagctgccaagagactaagtcttgaatcagaaggtgccggtgaaggggccgcagcctcccctgaactatctgctctcgaagaggcctttaggcggtttgctgtccacggagacgcgcgggccactgggagagagatgcacgggaagaactggtccaaactgtgtaaagactgccaagttattgacggccgtaacgtgacagtgaccgacgtggacattgtcttctcaaagattaagggcaagtcatgtcgcaccatcactttcgagcagtttcaagaggctctcgaagagctggcaaagaaaaggtttaaggacaagtcctctgaggaggccgtgagggaggtgcacagactcattgagggtaaggcgccgattatcagtggagtcactaaagccataagctcccccacggtcagtcggctgaccgatactaccaagttcactggctcgcacaaagagcgatttgacccgagcggcaaaggcaagggaaaggctgggagggttgatcttgtcgacgagtccggatatgtttccggctataaacatgccggcacctatgatcagaaggtgcagggcggtaaatag

SEQ ID NO: 169936 - DNA, 660 bp, Artificial Sequence
  derived and/or modified sequence
atggccgataaggcgaagcctgctaaggcagccaacaggacaccaccaaagtcacccggagaccccagcaaggaccgggcagccaagcgcctgagtctagagtcggaaggcgcaggtgagggggctgccgcttccccagaactgagcgctctggaggaggcctttaggcggttcgcagtgcacggcgacgctcgcgcaacaggtcgagaaatgcacggaaagaattggagtaagctttgcaaggactgccaggtcatcgacggaaggaatgtgactgtgaccgacgttgacatagtgttttctaagataaaaggaaaaagctgccgtacaataacctttgagcaattccaggaggcactggaagagctggcaaagaaacgttttaaagataaatcctcagaggaggctgtaagagaggtgcatcgcctgatcgaaggcaaagccccaattatcagcggagtgacaaaagccatttcctcacctactgtcagtcggctgacggatactactaagtttacagggtctcacaaggaacggttcgacccttccggcaagggaaaaggaaaggcgggaagggtggatttagtggatgagtccggctatgtgtccggctacaagcacgcagggacatacgatcagaaggtgcagggagggaagtag

SEQ ID NO: 169937 - DNA, 5116 bp, Artificial Sequence
  derived and/or modified sequence
gggcggtgctgggcgggacgggcgggcgcggggcggcggctggagagctccgctgagcaccgggtcgcgcgcggccgagtcgcggaggcgcctccgctgcagtcgctgcgtctccaagcaacatggctgacaaggccaagcctgccaaagctgccaacaggacgccccccaagtccccgggggacccctcgaaggaccgggcagccaagaggctgtcgctggaatcggagggtgctggtgagggggcagccgcatcccctgagctcagtgccctggaggaggccttccggcgctttgccgtgcacggggacgccagggccaccgggagggagatgcacggcaagaactggtcgaagctgtgcaaggactgccaggtgatcgacggcaggaacgtgaccgtcactgacgtggacatcgtcttcagcaagatcaaagggaagtcttgccggaccatcacctttgagcagttccaggaggcgctggaggagctcgccaagaagcgattcaaagacaagagcagcgaggaggccgttcgcgaggtgcacaggctcatcgagggcaaggcgcccatcatctcaggggtgacgaaagccatctcgtcgcccacagtgtcgaggctcacggacaccaccaagttcacgggctcccacaaggagcgcttcgacccctctggcaagggcaagggcaaggctggccgcgtggatctggtggacgagtcaggctatgtgtccggctacaagcacgcaggcacctacgaccagaaggtgcaagggggcaagtagcccccgctccatgcctcgcggcactgccggtgtccccagagcagggactctgtcacctcgcacttcattacattcctgtactaactggggcagaactcagacgggtgccccagagggggctggggggcggccaggcccaggcctccctcctgcccctcctcctaccggatgcccccagcactcccctctcaaaccaggtttgggccccagttcgctgaccctcctaatacacctgcctcgtcctcagccatttccaaagtgtctcgcggatcacaccacactgggcacgtggtttgcaggtcaaaggggcgttttaaagcagctggctgtcatggcaacaggaggctgtgctgacctcctgagcggcagacaccttccaggagccctgagggtggcaggagctaaccccaaccagcaggcaactaacacggaattggccccacaccggacgtgggaggtgtctgtggggcccgaggcctgtcctgtgtgcagcggacaccacggggccttcctgctttcctgggcagagggcagagtgaggccacctggcgggggtgctgggcgcctggcacatgtgtggggaagccggtcacatggacacacctgtgcacacatgcctacaggccagctctgtgccaagggcaacctaggtaaaacgaaagccgtcaggggcagtgggcggcttcccggctgaccacagtggcttggactgtgagggtagagtaggctcgctttgctttcctgagaagatgcggtggctgcctatgttctcagagcgggtctgggaagattcagaatgtccggtccctgtggtgttgccaggcaagagacacgaagtgccgagacactcctcgcctcaccgcgtgacagagcctctgcccggccctcccgttcgcccgtcctcactagctgcaccctgtttgctcgcagacctcccattgccacagcccaagcaccttcttcaactctcccaaaatggctcagcctaacctctcctggccaatcccccccgccggagagcaggacactagggaggacccccagtcctgcagtgtctgtgggggtttctctgccagcagggggctgagcagagcccatccaggacactccacactgccaggacacacccaggcggcccgcccttgcctgtctgcacctggggagaagccggcgctcctgctccctcctggggaggctgacgggtgtggccacccgctgtcacaatggcacactgccactgtcccttggcacgcacacagccacagccacacgtgtgacctgctgggccgtggttctggagtctacctgcggatgagcctgcggcagtcctggggaaacttttccagagcctgttagcccgtggctacggtcaggctctggccagggcagagggctgcccagggccaggctcacagtacaggagggtggcgaggcccctccctcactggcacgcatgagcaccacccgcctccccgactcccaagagtgcacctgctgcggccacagctccgtggaaggactccccctacctgagcagagcagaagccccagggcggagctcccagccagcatggtccgctgagggctggggggcggtctccgaggcccctcaacagagaagcctccacctgaggatggggaggacctggcaggcagcttccacggcagggctgggaagttcagtgcctggaaataaagagcaaggaaaaatggacctcaggcttcgtggctcctttaggatgtcacctcaccggcctggggaaggcggggggtgcccaagcccagccctgtgcccccgctgaacctggctggaccgcgtgtgaaaggcagaactaacgtgcggaaacatttgaaaacaactctgaatgtgcggttcggaatcacccgatcacagacgagcggtcaccggaatcgcccggtcacagacgagcagtcatcggactcacccgatcacagacgagcggtcaccggaatcgcccgatcacagacgagcggccaccggaatcgcccaatcacagacaagcagtcatcggaatcacccgatcacagacgagcagtcatcggactcacccgatcacagacgagcggtcaccagactcgcccgatcacagacgagcagtcatcggaatcacccgatcacagacgagcagtcatcggactcacccgatcacagacgagcggtcaccagaatcgcccgatcacagacgagcagtcatcggaatcacccgatcacagacgagtggccaccggaatcacccgataacagcccatcacaactccaaagcccttgtgttgaaaaggccgaggacgagtggtcaccaaacagggtggctccccaggtcccgaagcctgagacccggaaggccctggcacccttacaccctcggactcctgccctcctcggcctccctggccccagcgcggctccaccctgggctgcgtctcctggtcacaggctgcgtttctcctttctgtccgtgggcagcccagtccccacagtcacggccaagccacgcagaacgaacatgactccagaggacctcgccctggagctgagcctggcgccgggtcaggacggagggaagggcgggttggggtccgcgggtcctcacaccgcacggcaggcacagaggctcgccaggccctgatccggtctgtggggacgagggacactgaggagaggtgctgggcaccaggacgctgcctcctggtccctggttggcctcagacaagcacggcctcgagaaaagagccaagcgcatcgggagcacaccagaaaccggccctgagcacgagaagagcctccgcccggcccgggcaccacccgacctcgcagggagcaggccctgtcaccgacgggtcacctcgcccacacggccagcaccgactcaccacagcccttcccagacctggctggagtggccggagcggcggggctcatggctcccatcttggcccctggaggtgagctcattcacagaagtggtcccttcactctgagagagaaaatcgtggcgtgcatcccaaaccctaggccacgcctgtgggtttcgtgaatgagatcgaggctgctgtggcaccctgcccgtcctggcctggagcaccctgggatcctggagggagaggccccacgcccccactctccctccacacttccagggttggtgcccacgagttagaggcacgccctcccccagcggccctcaggcttttctcagacatgcgggagccaggagagcacccttctccactcagctccaaagcgaatctttgaaaacacccactcggctcccatctctgtcacctagccaggaggggtagcaaaaataaagtcacgaggacatagtggtcaccactgtcagttacaacttgtctgtggaatccgtaattgcatctgtgtgccgcctccgaacacagaacattgtttggacggcagccccactgcacataacagacccgtgcatcttcctcagtcagtttctgaatattgtgaattcaggcaggtgtgtgttctcttctgcatgtttttatgcactgccaattagcttctactaaccacggttcaacagaaaataaatgtgtatttgtgaataacaaactgcacaacctgcaaaccaggagagagggacaggttctgtcaggggtgacaccaggacacagggacaggttctgtcgggggtgacaccaggacacagggacaggttctgtcatgggtgacacgaggacacagggacaggttctatcatgggtgacaccaggagagagggacaggttctgttgggggtgacaagaggagacagggacaggttctgtcgggggtgacaccaggagagagggacaggttctgtcaggggtgacaccaggagagagggacaggttctgttgggggtgacaccaggacacaggaataggttctgtcgggaggacagtgctgatcgtgtctcagcatcaggaaaggagaaaggcagagggagagcgctgagaagactgttcacgccagagtgcttatttatttttaatttactgctataggataagcaaccaggtagtgttcctaacaattagcgttaccaaaattaaagttcaaattatatgtttaaaatattgtagaagatatatatttatactggactacttttacaccttctaatatcctgtccaagtttgggcgcagatggtggagttgggctggcatcatgtcctgtggccgccccacttgcctgttggtgccactccatcccgggccccagggatgccagctcagggctgaccacagcagccctgcgtgggcatcacctcctaccccagcccccatcctgggctgctgcggccgc

SEQ ID NO: 169938 - protein, 652 aa, Artificial Sequence
  derived and/or modified sequence
MGGWKGPGQRRGKEGPEARRRAAERGGGGGGGGVPAPRSPAREPRPRSCLLLPPPWGAAMTPDLLNFKKGWMSILDEPGEPPSPSLTTTSTSQWKKHWFVLTDSSLKYYRDSTAEEADELDGEIDLRSCTDVTEYAVQRNYGFQIHTKDAVYTLSAMTSGIRRNWIEALRKTVRPTSAPDVTKLSDSNKENALHSYSTQKGPLKAGEQRAGSEVISRGGPRKADGQRQALDYVELSPLTQASPQRARTPARTPDRLAKQEELERDLAQRSEERRKWFEATDSRTPEVPAGEGPRRGLGAPLTEDQQNRLSEEIEKKWQELEKLPLRENKRVPLTALLNQSRGERRGPPSDGHEALEKEVQALRAQLEAWRLQGEAPQSALRSQEDGHIPPGYISQEACERSLAEMESSHQQVMEELQRHHERELQRLQQEKEWLLAEETAATASAIEAMKKAYQEELSRELSKTRSLQQGPDGLRKQHQSDVEALKRELQVLSEQYSQKCLEIGALMRQAEEREHTLRRCQQEGQELLRHNQELHGRLSEEIDQLRGFIASQGMGNGCGRSNERSSCELEVLLRVKENELQYLKKEVQCLRDELQMMQKDKRFTSGKYQDVYVELSHIKTRSEREIEQLKEHLRLAMAALQEKESMRNSLAE

SEQ ID NO: 169939 - DNA, 4753 bp, Artificial Sequence
  derived and/or modified sequence
ttttatgggcggatggaaggggccggggcagcgtcggggaaaggaagggccggaggcgcggcggcgggcggccgagaggggcggcggcggcggcggcggcggggttcccgcgccgcggagcccggcccgagagccgcgtccacgttcctgcctcctgctcccgccgccctggggcgccgccatgacgcccgatctgctcaacttcaagaagggatggatgtcgatcttggacgagcctggagagcctccctccccctcgctcaccaccacctctacttcgcagtggaagaaacattggtttgtgctgacagattcaagtctcaaatattacagagactccactgctgaggaggcagatgagctggatggtgagatcgacctgcgttcctgcacggatgtcactgagtacgcggtgcagcgcaactatggcttccagatccacaccaaggatgctgtctataccttgtcggccatgacctcaggcatccggcggaactggatcgaggctctgagaaagaccgtacgtccaacttcagccccagatgtcaccaagctctcggactctaacaaggagaacgcgctgcacagctacagcacccagaagggccccctgaaggcaggggagcagcgggcgggctctgaggtcatcagccggggtggccctcggaaggcggacgggcagcgtcaggccttggactacgtggagctctcgccgctgacccaggcttccccgcagcgggcccgcaccccagcccgcactcctgaccgcctggccaagcaggaggagctggagcgggacctggcccagcgctccgaggagcggcgcaagtggtttgaggccacagacagcaggaccccagaggtgcctgctggtgaggggccgcgccggggcctgggtgcccccctgactgaggaccagcaaaaccggcttagtgaggagatcgagaagaagtggcaggagctggagaagctgcccctgcgggagaataagcgggtgcccctcactgccctgctcaaccaaagccgcggagagcgccgagggcccccaagtgacggccacgaggcactggagaaggaggttcaggctcttcgggcccagctggaggcgtggcgtctccaaggggaggctcctcagagtgcactgagatcccaggaggatggccacatccccccgggctacatctcacaggaggcatgtgagcgcagcctggcagagatggagtcctcgcaccagcaggtgatggaggagctgcagcggcaccacgagcgggagctgcagcgcctgcagcaggagaaggagtggctcctggctgaggagacggcagccacggcctcagccattgaagccatgaagaaggcctaccaggaagagctgagccgagagctgagcaaaacacggagtctccagcagggcccggatggcctccggaagcagcaccagtcagatgtggaggcactgaagcgagagctgcaggtgctatcggagcagtactcgcagaagtgcctggagattggggcactcatgcggcaggctgaggagcgcgagcacacgctgcgccgctgccagcaggagggccaggagctgctgcgccacaaccaggagctgcatggccgcctgtcagaggagatagaccagctgcgcggcttcattgcctcgcagggcatgggcaatggctgcgggcgcagcaacgagcggagttcctgcgagctagaggtgctgcttcgcgtaaaagaaaacgaactccagtacctaaagaaggaggtgcagtgcctccgggacgagctccagatgatgcagaaggacaagcgcttcacctcgggaaagtaccaggacgtctatgtggagctgagccacatcaagacacggtctgagcgggagatcgagcagctgaaggagcacctgcgtcttgccatggccgccctccaggagaaggagtcgatgcgcaacagcctggctgagtagaggtcccgcccagctgcagaccctccaggctggaggaccagccgccctccttccctcctggatggaagtaaaaagccaagctttctccccaccctctgtgggccacacgtgcacttgcacccaccacacacacacacacacacacacacacacacacagacacacagacacatacgcacacacgtgcacacatgtacacacggatacacacacacacacacacactgcatatctgagcgcgcccctcgcactgggtctcaccttgcaccttcttcaggattttatatgtgaagagatttttatatagatttttttcctttttttccaaaacactttatactttaaaaaaaaaaaaaaaaagcaattcctggtggctgtgtgcctccaaccctggtccccctctgtctccagccaccctctgcttgggcttctgagctggtggccctggcccagaggtctggcggaggcccaggcagcagccatggcggggtgtctctacaggggagaggcgggagcctgccaccctcttcctgccctacctcctactaacacttcctgccccatttggacccgtaccatggggctcaggacagagggagctagcagctggcctccatggccccacagcctccttcgaggctgtgctgggtgcagaaccgccagagccacccaaaaggtgtttctcttctgctccctgaacctcttaacttaataaaacgttccagcagctctggtgtcctagatggctggcagaacaggaatggagattggggtttcttgaagtggcttccccactcacaccctacccacaccccacccttcctaaagcagcggcctctaggcttctgagggtggggctgaaaatccaaggtctcccttagtacagactgtgacgcccccagtgtggcttgcaggctagtggcagcggaagcatgtgggaaatagcaagtccagtcccaccccaacctactgaaccagcgtctgcattttaacagggtgccccagtgattcacgtgaccttcaaagtctgaggagccctggagtagggcccagggcccaggcctgagagagaggcctggggctaagactagccctgaccatgaccttgggcaagtcacacccctcactgagcctcagtttgcttctccatcaaatgggtgtttttctttcagtcccagtcctctcctgaggcttttcccagaggtcatgcccagccctgggcaggggtgagggcagggttgtggctgccaggcacaggtccagcgggctgggagtcctcaccatggctggctgtgctgattatggttgcatggggctgggaagaggtcccatttctgagccacagaaacaggccacatccagtaggggtcctggaaggctgtgagaacccagaggagaccctgacccagcctgcaggtagaagactgcctttggaggcagctttgaaagatgactcttccagatggaagaatcaggaagggccttcccacgtggaggcaccagcaggagcaaacgtccctggtgtgttcaggcaaagagccacaggagagtgacctcgtggagtgggaagagattgtttcccattcccttgccagggattggttgaggaatggacaaggcttgcagttcacgcaagccagtgaaatgcgaggggaagtcttgggagtggggtggaggaggtcatctgggaagggtgtccttggtcttaaaaagaggcacaagaggccgggcgcggtggctcttgcctattatcctagcactttgggaggccaaggcagggggatcacttgaggtcaggagttcgagaccagcctggccaacatggtgaaaccccgtctctactaaaaatacaaaaaattagccagacgtggtgccaagcacctgtaatcccagctactcaggaggctgaggcaggagaatcacttgaacccaggaggcagaagttgcagtgagccaagatcgcgccactgcactccagcctgtgtgacaagggcgaaactccatctcaaaaaaaaagggggagggtggcgcaaggagaggacacctctctcctggccctgtcgccatcttccctcatcaatagctaaaaatggcaaagaagaaagagccaggaccccgtgccatcaaatcctccggccttgtgctgccctgtctcggcactgcttgccttaggagatcaggagtgttcctagccactgggagatgggatgcctgccactggcagctctgccgtccatcctcaccatcccaccgtccccccaagacagctctccatcccatcctctgcctcccttctagcctcaacctaactcagggctcccccgtctcacacctgggttgcaggaacatcctcttcaccaacccccctcccatccctcctcagggctgcctagggcagctacaaaaaccaggccagcctctgaaaggtgctccacatctcattaaaaaccgtgaaatcgcactgccccactatcagaatagctcagaggagaaggtctgccagtaccaagtgctggtggggatacggagaagagcagctcccaggcgctgctggtgcaaatgtgctttgttgcacccacggcaggaaactgaccagcttctcatcaagttaaatacgcatctaccctatggcctagcatttccactcttgcttacacatccaggagaaatgagtccttacatgcacaaaaggatgagtaccgtaatactcacatcagcaaataaacaatacagctgtgtgtcagtagtagaatgaataaattgtggtcgattcataaaaaaaaaaaaaaa

SEQ ID NO: 169940 - DNA, 1959 bp, Artificial Sequence
  derived and/or modified sequence
atgggcggctggaagggccccggccagagaagaggcaaggagggccccgaggccagaagaagagccgccgagagaggcggcggcggcggcggcggcggcgtgcccgcccccagaagccccgccagagagcccagacccagaagctgcctgctgctgccccccccctggggcgccgccatgacccccgacctgctgaacttcaagaagggctggatgagcatcctggacgagcccggcgagccccccagccccagcctgaccaccaccagcaccagccagtggaagaagcactggttcgtgctgaccgacagcagcctgaagtactacagagacagcaccgccgaggaggccgacgagctggacggcgagatcgacctgagaagctgcaccgacgtgaccgagtacgccgtgcagagaaactacggcttccagatccacaccaaggacgccgtgtacaccctgagcgccatgaccagcggcatcagaagaaactggatcgaggccctgagaaagaccgtgagacccaccagcgcccccgacgtgaccaagctgagcgacagcaacaaggagaacgccctgcacagctacagcacccagaagggccccctgaaggccggcgagcagagagccggcagcgaggtgatcagcagaggcggccccagaaaggccgacggccagagacaggccctggactacgtggagctgagccccctgacccaggccagcccccagagagccagaacccccgccagaacccccgacagactggccaagcaggaggagctggagagagacctggcccagagaagcgaggagagaagaaagtggttcgaggccaccgacagcagaacccccgaggtgcccgccggcgagggccccagaagaggcctgggcgcccccctgaccgaggaccagcagaacagactgagcgaggagatcgagaagaagtggcaggagctggagaagctgcccctgagagagaacaagagagtgcccctgaccgccctgctgaaccagagcagaggcgagagaagaggcccccccagcgacggccacgaggccctggagaaggaggtgcaggccctgagagcccagctggaggcctggagactgcagggcgaggccccccagagcgccctgagaagccaggaggacggccacatcccccccggctacatcagccaggaggcctgcgagagaagcctggccgagatggagagcagccaccagcaggtgatggaggagctgcagagacaccacgagagagagctgcagagactgcagcaggagaaggagtggctgctggccgaggagaccgccgccaccgccagcgccatcgaggccatgaagaaggcctaccaggaggagctgagcagagagctgagcaagaccagaagcctgcagcagggccccgacggcctgagaaagcagcaccagagcgacgtggaggccctgaagagagagctgcaggtgctgagcgagcagtacagccagaagtgcctggagatcggcgccctgatgagacaggccgaggagagagagcacaccctgagaagatgccagcaggagggccaggagctgctgagacacaaccaggagctgcacggcagactgagcgaggagatcgaccagctgagaggcttcatcgccagccagggcatgggcaacggctgcggcagaagcaacgagagaagcagctgcgagctggaggtgctgctgagagtgaaggagaacgagctgcagtacctgaagaaggaggtgcagtgcctgagagacgagctgcagatgatgcagaaggacaagagattcaccagcggcaagtaccaggacgtgtacgtggagctgagccacatcaagaccagaagcgagagagagatcgagcagctgaaggagcacctgagactggccatggccgccctgcaggagaaggagagcatgagaaacagcctggccgagtag

SEQ ID NO: 169941 - DNA, 1959 bp, Artificial Sequence
  derived and/or modified sequence
atgggaggatggaaagggcccgggcaacggcgcgggaaagagggacccgaagctcgccgacgcgctgctgagagaggcggcgggggaggcggcgggggggtgcccgctcccaggtcacctgcccgagaacccagacctcgctcatgcctcctgctgccaccaccctggggcgccgccatgacgcccgacctcctcaactttaagaaaggttggatgagtatcctcgatgaaccaggggaacccccatctccctctctgaccaccacctccacctctcagtggaagaaacactggttcgtgctgacagatagctctctcaaatattaccgcgattccaccgctgaggaagctgacgagttggacggtgagatagacttgcgttcttgcactgacgtgacagagtacgcagtgcagaggaactatggatttcagatacacacaaaggatgccgtgtatacgctttccgccatgacaagcggaatccgcaggaactggattgaagcgctgaggaagacagtcaggcctacgtctgctcctgacgtgactaaactgagcgatagcaataaggagaacgctctgcattcctactctacccagaagggcccgttgaaagcaggcgagcaacgggccggcagtgaagtcatttccagagggggacccaggaaagccgatgggcaaagacaagcgctcgactacgtggaactgtcccccctgacccaggctagcccacaaagagcccgcacacccgcgaggaccccagatcggcttgccaagcaagaggagctggaaagagacctggcacagcgatctgaagagagacggaaatggtttgaagctacagattcccgcacccctgaagttcctgctggtgaaggacctaggagggggcttggagccccactgaccgaagaccaacagaatagactgtctgaggaaattgaaaaaaagtggcaggagctggagaaactgccactccgggaaaataagcgcgtgcctttaactgccctcctcaaccagagccgcggggagcggcgcggacctccgtctgatgggcatgaagctctggagaaagaagtccaggctttgcgcgcccagctggaggcctggcgcttgcaaggggaggctccccagtcggcccttcgctcacaggaggatggacacatcccccccgggtatatttcccaggaggcttgtgagcggagtctggccgaaatggagtcctcccaccagcaggtaatggaagagctgcagaggcatcacgaacgagagctgcagagactgcaacaagagaaggaatggctgttagctgaagaaaccgcagccaccgcctcagccatcgaagccatgaaaaaggcctatcaggaagagcttagcagagagctctcgaaaacaaggtcattgcaacaaggcccggacggactccgaaaacagcaccaatccgacgtcgaggcattgaaacgcgagcttcaggtgctcagcgaacagtacagtcagaagtgtcttgagatcggcgcgctgatgaggcaagccgaggagcgcgagcacactctcaggaggtgtcagcaagagggtcaggaactgctacgccacaatcaggagttacatgggcgtctgtcagaggagattgatcaactcagagggtttatcgcgtcgcagggtatgggtaacggttgtggtcgctcaaatgaacgctcctcttgcgagctggaagtccttttgcgagttaaggagaatgaactacaatacctgaaaaaggaggtgcagtgtcttagggatgaactccagatgatgcaaaaggataagaggtttacttctgggaagtatcaggatgtctacgtagagctgagtcatatcaagacgcggtcagagcgcgagatagagcaactcaaagagcatttgcggctggcgatggctgctctgcaggagaaagagtctatgcgaaacagtctagccgaatag

SEQ ID NO: 169942 - DNA, 1959 bp, Artificial Sequence
  derived and/or modified sequence
atgggcggctggaagggccctggccagaggcggggcaaggagggccctgaggcccggcggcgggctgctgagcggggcggcggcggcggcggcggcggcgtgcctgcccccaggagccctgcccgggagccccggcccaggagctgcctgctgctgcccccaccctggggcgccgccatgaccccagacctgctgaacttcaagaagggctggatgagcatcctggatgagcccggggagccccccagccccagcctgaccaccaccagcaccagccagtggaagaagcactggtttgtgctgacagacagcagcctgaagtactacagagacagcacagctgaggaggctgatgagctggatggagaaattgacctgcggagctgcacagatgtgacagaatatgctgtgcagagaaattatggcttccagatccacaccaaggatgctgtgtacaccctgagcgccatgaccagcggcatcagaagaaactggattgaggccctgaggaagacagtgcggcccaccagcgccccagatgtgaccaagctgagtgacagcaacaaggaaaatgccctgcacagctacagcacccagaagggccccctgaaggccggggagcagagagctggcagcgaggtgatcagccggggcggccccaggaaggcagatggccagaggcaggccctggactatgtggagctgagccccctgacccaggccagcccccagagggcccggaccccagcccggaccccagaccggctggccaagcaggaggagctggagcgggacctggcccagaggtctgaggagaggaggaagtggtttgaggccacagacagcaggaccccagaggtgcctgctggggagggcccccggcggggcctgggcgcccccctgacagaggaccagcagaaccggctgtctgaggagattgagaagaagtggcaggagctggagaagctgcccctgcgggagaacaagagggtgcccctgacagccctgctgaaccagagcagaggagagcggcggggccccccatctgatggccacgaggccctggagaaggaggtgcaggccctgcgggcccagctggaggcctggaggctgcagggcgaggccccccagagcgccctgcggagccaggaggatggccacatccccccaggctacatcagccaggaggcctgtgagaggagcctggccgagatggagagcagccaccagcaggtgatggaggagctgcagaggcaccacgagcgggagctgcagaggctgcagcaggagaaggagtggctgctggccgaggagacagctgccacagccagcgccatcgaggccatgaagaaggcctaccaggaggagctgagccgggagctgagcaagaccaggagcctgcagcagggcccagatggcctgaggaagcagcaccagagtgatgtggaggccctgaagcgggagctgcaggtgctgtctgagcagtacagccagaagtgcctggagattggagccctgatgaggcaggccgaggagcgggagcacaccctgcggcgctgccagcaggagggccaggagctgctgcggcacaaccaggagctgcacggccgcctgtctgaggagattgaccagctgcggggcttcatcgccagccagggcatgggaaatggctgcggccgcagcaatgaaagaagcagctgtgagctggaggtgctgctgcgggtgaaggaaaatgagctgcagtacctgaagaaggaggtgcagtgcctgagagatgagctgcagatgatgcagaaggacaagcgcttcaccagcggcaagtaccaggatgtgtatgtggagctgagccacatcaagaccaggtctgagcgggagattgagcagctgaaggagcacctgcggctggccatggccgccctgcaggagaaggagagcatgaggaacagcctggccgagtag

SEQ ID NO: 169943 - DNA, 1959 bp, Artificial Sequence
  derived and/or modified sequence
atgggcggctggaagggccccggccagcggcggggcaaggagggcccagaggcgagacgacgggccgccgaacggggaggtggcggaggcggtggcggagtgccagcccctcggtccccagcacgcgaaccaaggcctcgaagttgtctgctgctcccaccaccttggggagctgctatgactcccgatctcctgaactttaagaaaggctggatgtcaatcctggatgagcctggtgagccacccagtccgtccttgacgaccactagtacttcacagtggaaaaagcactggtttgtgttgactgactcctctctgaagtactacagagactccacagcagaagaagcggacgaactggatggtgagatcgacctccgcagctgtacagacgtgacagagtacgccgtacagcggaattacggcttccagatacatactaaggacgcagtctatactctttcagctatgacgtctggtatccgccggaattggatcgaagctctgcggaaaacagtacgacctaccagcgctcctgatgttacgaaattgtccgattccaataaggagaatgccttacattcctactccacacagaaaggccctctcaaagcgggggaacaaagagctggctctgaagtgatctccagaggaggacctaggaaggccgatggccagcggcaggcactggattacgtggagctgtccccacttacacaagcttcaccccagagagcccgaactcctgcccgaacacctgaccgtcttgctaaacaggaggaattagagcgggacctggcccagcgcagcgaggagagaagaaagtggttcgaggcaaccgattccaggactccggaggtgccagcaggtgaggggccccgccgcggccttggtgctccgctaactgaggaccaacagaaccgactgagtgaagaaatcgagaaaaagtggcaagagttggaaaagctgccactgagagaaaacaagcgagtgcccttgacagcactgctgaaccagtctcgcggggagagacgaggccctccttctgatggacacgaggcactggagaaggaagtgcaagccctacgggcccaattggaggcctggaggctccagggagaggccccccaaagcgctctgcggagccaagaggacggacatatccctcctgggtacatctcccaggaagcttgcgaacgtagtctggctgaaatggaatcctcccaccaacaggtgatggaagaacttcagcggcaccacgagcgggagcttcaacggttgcagcaggagaaagaatggctattggcagaggaaacggcagcaacagcgtccgctattgaggccatgaaaaaagcttaccaggaggagctctctcgggagctgagcaagacccgtagcttacagcagggacctgatggcctgaggaagcagcaccaatctgacgtggaggctctgaagagagagctgcaagtgctgtctgaacagtacagccaaaagtgtctcgaaattggggccctcatgcgacaggccgaggagcgggagcatacgctgcgacgatgccaacaggagggccaggagctgctgcgtcataatcaagaactgcatggaagactttctgaagagattgatcagctgagggggtttatcgcatctcaaggaatggggaacggttgcgggcgcagtaatgagcgttcttcatgcgagctggaagtgttgcttagagttaaggagaatgagctgcagtacctcaaaaaagaggtccagtgcctgcgcgatgagttgcagatgatgcagaaagataaacgcttcacgagcggcaagtaccaggacgtttatgtcgagctatcacacattaagactaggtccgaaagagaaatcgaacaacttaaggagcatctgcgccttgccatggctgcccttcaggagaaagaatcaatgcggaattcactagcggagtag

SEQ ID NO: 169944 - DNA, 1959 bp, Artificial Sequence
  derived and/or modified sequence
atgggcggatggaagggcccaggccagcgacgcggtaaggagggcccagaggcacggagaagggctgcggaacgtgggggaggcggaggtggaggaggtgttcctgcgcctaggagccctgctcgcgaacccaggcctaggagctgtctgcttctcccaccgccttggggtgccgctatgactcccgacctgttgaatttcaaaaaagggtggatgtccatccttgacgagcctggcgaaccacccagccctagcctgaccaccacgagcacttcacagtggaagaaacactggttcgtgctcacagattctagtctaaagtactaccgcgactcgaccgcagaagaggccgacgagttggacggcgaaatcgacctgcgttcttgtacggatgtcacggagtacgctgttcaaagaaattatgggttccagattcacaccaaggatgccgtttacaccctctccgcaatgactagtggtataaggcggaattggatagaagcgttacgtaaaactgtccggcctacatctgcacccgacgtaacgaagctgtctgattccaacaaagaaaacgcgttacattcctactcaacccaaaaaggccctctgaaagccggtgaacagagagccggatctgaggtgatttcacggggtgggccacgcaaggctgatggccaacgccaggccctggattatgtggagctgtctcccctcacccaagcaagtcctcagcgggctcggaccccggctaggacacctgaccggctcgcaaaacaggaggagctagaacgagacctcgcacagcggtcagaagagaggagaaagtggtttgaggcaacagattctagaactccagaggttccagccggtgaggggcctaggcgtgggcttggagcaccccttacagaggaccagcaaaaccgactgtccgaggaaatcgagaaaaagtggcaggaactcgagaagttgcccctccgagaaaataaaagggttcccctgacagctctgctgaaccagtctaggggggaaagaaggggtcctccatccgacggacacgaggcgctggagaaggaagtccaggcactcagggcccaactggaagcatggcgactccagggggaagctcctcagtcggccttgcgttcacaggaggacggccatataccccctggatacatttcacaggaggcttgcgagaggagtctggccgaaatggaatctagccaccagcaggttatggaggagctgcaacgccaccatgagagagaacttcagcgactacagcaggaaaaagagtggttgctggcagaggagacggccgctactgcgtctgccatcgaagcgatgaaaaaggcgtatcaggaggagctgtcccgagagctcagcaaaaccaggagcctgcagcagggcccagatggtctcaggaaacaacatcagtctgatgtggaagcactcaagcgcgagctgcaagtgctaagcgagcagtactcacagaagtgccttgagatcggagctctgatgaggcaagctgaggagcgggagcacactctccgaagatgtcagcaggagggacaggagttacttagacacaaccaagaactccacgggaggctgtcggaggagatagaccagttgagaggtttcattgcgtcccaggggatggggaatggatgcggcagatctaatgaacggtcctcctgcgaattggaggttcttctgagggtgaaagagaacgaactccaatatctcaagaaagaggttcagtgtctcagagacgagttgcagatgatgcagaaagataagaggttcacaagcggcaaatatcaggacgtctacgtagaattgtcccatatcaaaacccgttcagaaagggagattgagcagttgaaagagcatttgcgcctggcgatggcggctctgcaagaaaaagaatctatgcgaaattccctggcggagtag

SEQ ID NO: 169945 - DNA, 2324 bp, Artificial Sequence
  derived and/or modified sequence
gttttatgggcggatggaaggggccggggcagcgtcggggaaaggaagggccggaggcgcggcggcgggcggccgagaggggcggcggcggcggcggcggcggggttcccgcgccgcggagcccggcccgagagccgcgtccacgttcctgcctcctgctcccgccgccctggggcgccgccatgacgcccgatctgctcaacttcaagaagggatggatgtcgatcttggacgagcctggagagcctccctccccctcgctcaccaccacctctacttcgcagtggaagaaacattggtttgtgctgacagattcaagtctcaaatattacagagactccactgctgaggaggcagatgagctggatggtgagatcgacctgcgttcctgcacggatgtcactgagtacgcggtgcagcgcaactatggcttccagatccacaccaaggatgctgtctataccttgtcggccatgacctcaggcatccggcggaactggatcgaggctctgagaaagaccgtacgtccaacttcagccccagatgtcaccaagctctcggactctaacaaggagaacgcgctgcacagctacagcacccagaagggccccctgaaggcaggggagcagcgggcgggctctgaggtcatcagccggggtggccctcggaaggcggacgggcagcgtcaggccttggactacgtggagctctcgccgctgacccaggcttccccgcagcgggcccgcaccccagcccgcactcctgaccgcctggccaagcaggaggagctggagcgggacctggcccagcgctccgaggagcggcgcaagtggtttgaggccacagacagcaggaccccagaggtgcctgctggtgaggggccgcgccggggcctgggtgcccccctgactgaggaccagcaaaaccggcttagtgaggagatcgagaagaagtggcaggagctggagaagctgcccctgcgggagaataagcgggtgcccctcactgccctgctcaaccaaagccgcggagagcgccgagggcccccaagtgacggccacgaggcactggagaaggaggttcaggctcttcgggcccagctggaggcgtggcgtctccaaggggaggctcctcagagtgcactgagatcccaggaggatggccacatccccccgggctacatctcacaggaggcatgtgagcgcagcctggcagagatggagtcctcgcaccagcaggtgatggaggagctgcagcggcaccacgagcgggagctgcagcgcctgcagcaggagaaggagtggctcctggctgaggagacggcagccacggcctcagccattgaagccatgaagaaggcctaccaggaagagctgagccgagagctgagcaaaacacggagtctccagcagggcccggatggcctccggaagcagcaccagtcagatgtggaggcactgaagcgagagctgcaggtgctatcggagcagtactcgcagaagtgcctggagattggggcactcatgcggcaggctgaggagcgcgagcacacgctgcgccgctgccagcaggagggccaggagctgctgcgccacaaccaggagctgcatggccgcctgtcagaggagatagaccagctgcgcggcttcattgcctcgcagggcatgggcaatggctgcgggcgcagcaacgagcggagttcctgcgagctagaggtgctgcttcgcgtaaaagaaaacgaactccagtacctaaagaaggaggtgcagtgcctccgggacgagctccagatgatgcagaaggacaagcgcttcacctcgggaaagtaccaggacgtctatgtggagctgagccacatcaagacacggtctgagcgggagatcgagcagctgaaggagcacctgcgtcttgccatggccgccctccaggagaaggagtcgatgcgcaacagcctggctgagtagaggtcccgcccagctgcagaccctccaggctggaggaccagccgccctccttccctcctggatggaagtaaaaagccaagctttctccccaccctctgtgggccacacgtgcacttgcacccaccacacacacacacacacacacacacacacacacagacacacagacacatacgcacacacgtgcacacatgtacacacggatacacacacacacacacacactgcatatctgagcgcgcccctcgcactgggtctcaccttgcaccttcttcaggattttatatgtgaagagatttttatatagatttttttcctttttttccaaaacactttatactttaaaaaaaaaaaaaaaaa

SEQ ID NO: 169946 - protein, 184 aa, Artificial Sequence
  derived and/or modified sequence
MKSVLLLTTLLVPAHLVAAWSNNYAVDCPQHCDSSECKSSPRCKRTVLDDCGCCRVCAAGRGETCYRTVSGMDGMKCGPGLRCQPSNGEDPFGEEFGICKDCPYGTFGMDCRETCNCQSGICDRGTGKCLKFPFFQYSVTKSSNRFVSLTEHDMASGDGNIVREEVVKENAAGSPVMRKWLNPR

SEQ ID NO: 169947 - DNA, 555 bp, Artificial Sequence
  derived and/or modified sequence
atgaagtctgtgctcctactgaccaccttattggtgcctgctcacctggtggccgcatggtccaacaattacgctgtggactgccctcaacactgcgacagtagcgaatgtaaatctagtcccaggtgtaagagaacggttctggacgactgtggctgttgtagggtgtgcgcggcaggaaggggggagacctgttacagaaccgttagtggaatggacggcatgaaatgcggtcctggtctgagatgtcagcctagcaacggcgaggatccctttggagaggaattcggcatttgcaaggactgcccctacggtacttttggcatggactgccgagaaacatgcaactgtcaatctggaatttgcgacaggggaaccggcaagtgcctgaagttccccttttttcagtacagcgtcaccaagtcgagcaaccggttcgtctccctgacagaacatgacatggcctccggggacggaaacattgttagggaggaggtagtgaaggagaacgccgctggcagccctgtcatgcgcaagtggttgaaccctcgatag

SEQ ID NO: 169948 - DNA, 555 bp, Artificial Sequence
  derived and/or modified sequence
atgaaatcagtgctgctgctaaccacactgctggtgccagcacacttagtagccgcctggagcaataattatgctgtcgattgcccccaacactgtgacagcagtgagtgcaaatccagcccccggtgtaaacggactgtattggacgattgtggatgttgtagggtttgcgctgccggccgcggagagacatgttaccggacagtaagcggaatggatgggatgaaatgtgggcctggattacggtgtcagccctctaacggcgaagatcccttcggggaggaattcggcatctgcaaagattgcccttatggaacctttggcatggactgtcgggaaacatgtaactgccagtctggaatttgtgacagaggcactggtaaatgcttgaaatttccctttttccagtattctgtgactaaatcatcaaataggtttgtttcattaacagaacatgatatggcatctggtgacggtaacattgtgagagaggaggttgttaaagagaatgctgctggctcacccgtcatgcggaaatggctgaatccccgttag

SEQ ID NO: 169949 - DNA, 555 bp, Artificial Sequence
  derived and/or modified sequence
atgaagtctgtcctattgctaaccactttactggtgcctgcacatctggttgctgcatggtctaataactatgccgtggactgtcctcaacactgtgactcaagtgaatgcaaaagctcaccgaggtgcaaaaggactgtgcttgacgactgtggctgttgcagagtgtgcgctgctggtagaggagagacttgctatcgcaccgtttccgggatggacgggatgaagtgcggaccgggcttgagatgccagccttccaacggcgaggaccctttcggcgaagaatttggaatttgcaaggattgcccttatggtactttcggaatggactgcagagaaacttgtaattgccaaagcggaatctgcgaccgcgggactggaaagtgcctgaagttccccttcttccagtatagtgttaccaaatcctctaatcgctttgttagcttgactgaacacgacatggccagcggcgacggaaatatcgtcagagaagaggtcgtgaaggaaaacgcagctgggtctcctgtgatgagaaaatggctgaaccccagatag

SEQ ID NO: 169950 - DNA, 555 bp, Artificial Sequence
  derived and/or modified sequence
atgaagagcgtgctgctgctgaccaccctgctggtgcccgcccacctggtggccgcctggagcaacaactacgccgtggactgcccccagcactgcgacagcagcgagtgcaagagcagccccagatgcaagagaaccgtgctggacgactgcggctgctgcagagtgtgcgccgccggcagaggcgagacctgctacagaaccgtgagcggcatggacggcatgaagtgcggccccggcctgagatgccagcccagcaacggcgaggaccccttcggcgaggagttcggcatctgcaaggactgcccctacggcaccttcggcatggactgcagagagacctgcaactgccagagcggcatctgcgacagaggcaccggcaagtgcctgaagttccccttcttccagtacagcgtgaccaagagcagcaacagattcgtgagcctgaccgagcacgacatggccagcggcgacggcaacatcgtgagagaggaggtggtgaaggagaacgccgccggcagccccgtgatgagaaagtggctgaaccccagatag

SEQ ID NO: 169951 - DNA, 555 bp, Artificial Sequence
  derived and/or modified sequence
atgaagagtgtgctcctcctcactacactcctggtgcccgcgcatttggtcgccgcctggtccaacaactacgctgtggattgcccccaacactgtgatagctctgaatgtaagagctccccaagatgcaagaggaccgttctcgatgactgcggctgttgtagggtctgcgctgctggccgtggggaaacctgttatcggactgtctcagggatggacggaatgaaatgcgggccggggctaaggtgtcaaccctccaacggcgaagacccctttggggaagagtttggtatttgcaaagactgcccatatgggactttcgggatggattgcagggagacgtgcaattgtcagtccggcatatgcgaccgaggcacggggaagtgcttgaaattcccattcttccagtatagtgttactaaatcttccaatcgcttcgtgagcctgaccgagcatgatatggccagcggagatggaaatattgttcgggaagaggtagtgaaggaaaatgcggctgggtcacctgtcatgagaaagtggctgaacccccgctag

SEQ ID NO: 169952 - DNA, 555 bp, Artificial Sequence
  derived and/or modified sequence
atgaagtctgtgctgctgctgaccaccctgctggtgcctgcccacctggtggccgcctggagcaacaactatgctgtggactgcccccagcactgtgacagcagcgagtgcaagagcagcccccgctgcaagaggacagtgctggatgactgtggctgctgccgggtgtgtgccgccggccgcggggagacctgctacagaacagtgtctggcatggatggcatgaagtgtggccctggcctgcgctgccagcccagcaatggagaggacccctttggagaggagtttggcatctgcaaggactgcccctacggcaccttcggcatggactgccgggagacctgcaactgccagagcggcatctgtgaccggggcaccgggaagtgcctgaagttccccttcttccagtacagcgtgaccaagagcagcaacagatttgtgtccctgacagaacatgacatggccagcggagatggcaacatcgtgcgggaggaggtggtgaaggaaaatgctgctggcagccctgtgatgaggaagtggctgaaccccaggtag

SEQ ID NO: 169953 - DNA, 2169 bp, Artificial Sequence
  derived and/or modified sequence
ggaaattgatgacgggaaagcatgcgggcaacccagtgtataaaactcataaacgtgtaggcagaggctcagctaccagtttggacggctgcttcccaccagcaaagaccacgactggagagccgagccggaggcagctgggaaacatgaagagcgtcttgctgctgaccacgctcctcgtgcctgcacacctggtggccgcctggagcaataattatgcggtggactgccctcaacactgtgacagcagtgagtgcaaaagcagcccgcgctgcaagaggacagtgctcgacgactgtggctgctgccgagtgtgcgctgcagggcggggagaaacttgctaccgcacagtctcaggcatggatggcatgaagtgtggcccggggctgaggtgtcagccttctaatggggaggatccttttggtgaagagtttggtatctgcaaagactgtccctacggcaccttcgggatggattgcagagagacctgcaactgccagtcaggcatctgtgacagggggacgggaaaatgcctgaaattccccttcttccaatattcagtaaccaagtcttccaacagatttgtttctctcacggagcatgacatggcatctggagatggcaatattgtgagagaagaagttgtgaaagagaatgctgccgggtctcccgtaatgaggaaatggttaaatccacgctgatcccggctgtgatttctgagagaaggctctattttcgtgattgttcaacacacagccaacattttaggaactttctagattatagcataaggacatgtaatttttgaagaccaaatgtgatgcatggtggatccagaaaacaaaaagtaggatacttacaatccataacatccatatgactgaacacttgtatgtgtttgttaaatattcgaatgcatgtagatttgttaaatgtgtgtgtatagtaacactgaagaactaaaaatgcaatttaggtaatcttacgtggagacaggtcaaccaaagagggagctaggcaaagctgaagaccgcagtgagtcaaattagttctttgactttgatgtacattaatgttgggatatggaatgaagacttaagagcaggagaagatggggagggggtgggagtgggaaataaaatatttagcccttccttggtaggtagcttctctagaatttaattgtgcttttttttttttttttggctttgggaaaagtcaaaataaaacaaccagaaaacccctgaaggaagtaagatgtttgaagcttatggaaatttgagtaacaaacagctttgaactgagagcaatttcaaaaggctgctgatgtagttcccgggttacctgtatctgaaggacggttctggggcataggaaacacatacacttccataaatagctttaacgtatgccacctcagagataaatctaagaagtattttacccactggtggtttgtgtgtgtatgaaggtaaatatttatatatttttataaataaatgtgttagtgcaagtcatcttccctacccatatttatcatcctcttgaggaaagaaatctagtattatttgttgaaaatggttagaataaaactatgactctataaggttttcaaacatctgaggcatgataaatttattatccataattatagtaataataaccttaataagcataagaaaaacagagtcactctggatttcaaaaatgtcaaaaaatgagcaacagagggtccttatttaaacataagtgctgtgacttaggtgaattttcaatttaaggtagaaaataagtttttaggaggtttgtaaaagaagaatcaattttcagcagaaaacatgtcaactttaaaatatagtttattttcatatttttttcttttaaacttggttgataagtggaattaggagtatatttgaaagaatcttagcacaaacaggactgttgtactagatgttcttaggaaatatctcagaagtattttatttgaagtgaagaacttatttaagaattatttcagtatttacctgtattttattcttgaagttggccaacagagttgtgaatgtgtgtgggaaggcctttgaatgtaaagctgcataagctgttaggttttgttttaaaaggacatgtttattattgttcaataaaaaagaacaagatacagct

SEQ ID NO: 169954 - DNA, 555 bp, Artificial Sequence
  derived and/or modified sequence
atgaagagcgtgctgctgctgaccaccctgctggtgcccgcccacctcgttgccgcgtggtcaaacaactatgcagtagactgcccacagcattgtgatagttcggaatgtaaaagttctccacggtgcaagaggactgtgctggacgattgcggttgctgccgtgtgtgcgccgctggccgcggagagacctgttacaggaccgtttccggcatggatgggatgaagtgtggaccaggcctcaggtgtcagccttcgaatggggaagacccatttggtgaggagttcggcatctgcaaagactgcccttatggcacattcgggatggattgcagagagacttgcaactgccaatccgggatctgcgatagagggaccggcaaatgtctcaagttccctttcttccaatacagcgtaaccaagtcctcgaatcgcttcgtctccctgaccgaacacgatatggcttctggagatggaaatatcgtgcgcgaagaggtcgtcaaagagaacgcggcaggctccccggtgatgagaaaatggttgaaccctcgttag

SEQ ID NO: 169955 - RNA, 555 nt, Artificial Sequence
  derived and/or modified sequence
augaaaucagugcugcugcuaaccacacugcuggugccagcacacuuaguagccgccuggagcaauaauuaugcugucgauugcccccaacacugugacagcagugagugcaaauccagcccccgguguaaacggacuguauuggacgauuguggauguuguaggguuugcgcugccggccgcggagagacauguuaccggacaguaagcggaauggaugggaugaaaugugggccuggauuacggugucagcccucuaacggcgaagaucccuucggggaggaauucggcaucugcaaagauugcccuuauggaaccuuuggcauggacugucgggaaacauguaacugccagucuggaauuugugacagaggcacugguaaaugcuugaaauuucccuuuuuccaguauucugugacuaaaucaucaaauagguuuguuucauuaacagaacaugauauggcaucuggugacgguaacauugugagagaggagguuguuaaagagaaugcugcuggcucacccgucaugcggaaauggcugaauccccguuag

SEQ ID NO: 169956 - RNA, 555 nt, Artificial Sequence
  derived and/or modified sequence
augaagucuguccuauugcuaaccacuuuacuggugccugcacaucugguugcugcauggucuaauaacuaugccguggacuguccucaacacugugacucaagugaaugcaaaagcucaccgaggugcaaaaggacugugcuugacgacuguggcuguugcagagugugcgcugcugguagaggagagacuugcuaucgcaccguuuccgggauggacgggaugaagugcggaccgggcuugagaugccagccuuccaacggcgaggacccuuucggcgaagaauuuggaauuugcaaggauugcccuuaugguacuuucggaauggacugcagagaaacuuguaauugccaaagcggaaucugcgaccgcgggacuggaaagugccugaaguuccccuucuuccaguauaguguuaccaaauccucuaaucgcuuuguuagcuugacugaacacgacauggccagcggcgacggaaauaucgucagagaagaggucgugaaggaaaacgcagcugggucuccugugaugagaaaauggcugaaccccagauag

SEQ ID NO: 169957 - protein, 889 aa, Artificial Sequence
  derived and/or modified sequence
MLPAPAAPRWPPLLLLLLLLLPLARGAPARPAAGGQASELVVPTRLPGSAGELALHLSAFGKGFVLRLAPDDSFLAPEFKIERLGGSGRATGGERGLRGCFFSGTVNGEPESLAAVSLCRGLSGSFLLDGEEFTIQPQGAGGSLAQPHRLQRWGPAGARPLPRGPEWEVETGEGQRQERGDHQEDSEEESQEEEAEGASEPPPPLGATSRTKRFVSEARFVETLLVADASMAAFYGADLQNHILTLMSVAARIYKHPSIKNSINLMVVKVLIVEDEKWGPEVSDNGGLTLRNFCNWQRRFNQPSDRHPEHYDTAILLTRQNFCGQEGLCDTLGVADIGTICDPNKSCSVIEDEGLQAAHTLAHELGHVLSMPHDDSKPCTRLFGPMGKHHVMAPLFVHLNQTLPWSPCSAMYLTELLDGGHGDCLLDAPAAALPLPTGLPGRMALYQLDQQCRQIFGPDFRHCPNTSAQDVCAQLWCHTDGAEPLCHTKNGSLPWADGTPCGPGHLCSEGSCLPEEEVERPKPVADGGWAPWGPWGECSRTCGGGVQFSHRECKDPEPQNGGRYCLGRRAKYQSCHTEECPPDGKSFREQQCEKYNAYNYTDMDGNLLQWVPKYAGVSPRDRCKLFCRARGRSEFKVFEAKVIDGTLCGPETLAICVRGQCVKAGCDHVVDSPRKLDKCGVCGGKGNSCRKVSGSLTPTNYGYNDIVTIPAGATNIDVKQRSHPGVQNDGNYLALKTADGQYLLNGNLAISAIEQDILVKGTILKYSGSIATLERLQSFRPLPEPLTVQLLTVPGEVFPPKVKYTFFVPNDVDFSMQSSKERATTNIIQPLLHAQWVLGDWSECSSTCGAGWQRRTVECRDPSGQASATCNKALKPEDAKPCESQLCPL

SEQ ID NO: 169958 - protein, 918 aa, Artificial Sequence
  derived and/or modified sequence
AARARLGGGGAGGAGCASQRGRRGSAPAAGPRGPSRPCTRLIPLFLERAAGPRSGRQHLPAPGGLLPSPARSHRRSPHAPRPRRPPVASAPAAAAAAAAAGPRRPGPARSRGAGLGAGGAHAVARLRGCFFSGTVNGEPESLAAVSLCRGLSGSFLLDGEEFTIQPQGAGGSLAQPHRLQRWGPAGARPLPRGPEWEVETGEGQRQERGDHQEDSEEESQEEEAEGASEPPPPLGATSRTKRFVSEARFVETLLVADASMAAFYGADLQNHILTLMSVAARIYKHPSIKNSINLMVVKVLIVEDEKWGPEVSDNGGLTLRNFCNWQRRFNQPSDRHPEHYDTAILLTRQNFCGQEGLCDTLGVADIGTICDPNKSCSVIEDEGLQAAHTLAHELGHVLSMPHDDSKPCTRLFGPMGKHHVMAPLFVHLNQTLPWSPCSAMYLTELLDGGHGDCLLDAPAAALPLPTGLPGRMALYQLDQQCRQIFGPDFRHCPNTSAQDVCAQLWCHTDGAEPLCHTKNGSLPWADGTPCGPGHLCSEGSCLPEEEVERPKPVADGGWAPWGPWGECSRTCGGGVQFSHRECKDPEPQNGGRYCLGRRAKYQSCHTEECPPDGKSFREQQCEKYNAYNYTDMDGNLLQWVPKYAGVSPRDRCKLFCRARGRSEFKVFEAKVIDGTLCGPETLAICVRGQCVKAGCDHVVDSPRKLDKCGVCGGKGNSCRKVSGSLTPTNYGYNDIVTIPAGATNIDVKQRSHPGVQNDGNYLALKTADGQYLLNGNLAISAIEQDILVKGTILKYSGSIATLERLQSFRPLPEPLTVQLLTVPGEVFPPKVKYTFFVPNDVDFSMQSSKERATTNIIQPLLHAQWVLGDWSECSSTCGAGWQRRTVECRDPSGQASATCNKALKPEDAKPCESQLCPL

SEQ ID NO: 169959 - DNA, 4010 bp, Artificial Sequence
  derived and/or modified sequence
acagggtcgctgagaccagtgcacgagcctcttcggaagatgcatcctggactcttggccgcagaggagaaagcggttggggtctcccagggactctttctaaagggtcagtccagcatggtaggggttaacgtgggtccacgcgtagagggaaaggaaagaagttgtagttgacacttcaggggggcgggtggcggacgggtctcgctgcctgattggttttgcatttcatcccaatttttttttctccactctctctccctcttttcagtttctctctctgatcccaggggaggggaaacgggaatagtgagagatcaaaaataaacctcttatgtcaagccgggaaggaagtataaataagaagggctcggcagcccactcggtgcttcccggggtggggaggaggcaggaggcggctgcgcggggctggcgcgggcaggggcggaggacgggcgcacgcgggccggggccagctgctcgcgctcggctcgggggcggcggcgcgggaggagcgggctgcgccagccagaggggccgccgggggagcgctcccgccgccgggccccgcgggccgagtcggccttgcacccgattgattccgcttttcctggagagagcggccgggccgcgctcgggccgccagcacctgcccgcgcctggcgggcttcttccctctcctgcgcgcagccaccgccgcagcccccatgctccccgcccccgccgccccccggtggcctccgctcctgctgctgctgctgctgctgctgccgctggcccgcggcgccccggcccggcccgcagccggggggcaggcctcggagctggtggtgcccacgcggttgcccggcagcgcgggcgagctcgcgctccacctgtccgccttcggcaagggcttcgtgctgcgcctggcgcccgacgacagcttcctagcgcccgagttcaagatcgagcgcctcgggggctccggccgggcgaccgggggcgagcgggggctgcgcggctgcttcttctccggcaccgtgaatggggagcccgagtcgctggcggcggtcagcctgtgccgcgggctgagcggctccttcctgctggacggcgaggagttcaccatccagccgcagggcgcggggggctccctggctcagccgcaccgcctgcagcgctggggtcccgccggagcccgccccctcccgcgaggacccgagtgggaggtggagacgggagagggtcagaggcaggagagaggagaccaccaggaggacagcgaggaggagagccaagaagaggaggcagaaggcgctagcgagccgccaccgcccctgggggccacgagtaggaccaagcggtttgtgtctgaggcgcgcttcgtggagacgctgctggtggccgatgcgtccatggctgccttctacggggccgacctgcagaaccacatcctgacgttaatgtctgtggcagcccgaatctacaagcaccccagcatcaagaattccatcaacctgatggtggtaaaagtgctgatcgtagaagatgaaaaatggggcccagaggtgtccgacaatggggggcttacactgcgtaacttctgcaactggcagcggcgtttcaaccagcccagcgaccgccacccagagcactacgacacggccatcctgctcaccagacagaacttctgtgggcaggaggggctgtgtgacaccctgggtgtggcagacatcgggaccatttgtgaccccaacaaaagctgctccgtgatcgaggatgaggggctccaggcggcccacaccctggcccatgaactagggcacgtcctcagcatgccccacgacgactccaagccctgcacacggctcttcgggcccatgggcaagcaccacgtgatggcaccgctgttcgtccacctgaaccagacgctgccctggtccccctgcagcgccatgtatctcacagagcttctggacggcgggcacggagactgtctcctggatgcccctgctgcggccctgcccctccccacaggcctcccgggccgcatggccctgtaccagctggaccagcagtgcaggcagatctttgggccggatttccgccactgccccaacacctctgctcaggacgtctgcgcccagctttggtgccacactgatggggctgagcccctgtgccacacgaagaatggcagcctgccctgggctgacggcacgccgtgcgggcctgggcacctctgctcagaaggcagctgtctacctgaggaggaagtggagaggcccaagcccgtggcagatggaggctgggcaccgtggggaccctggggagaatgttctcggacctgtggaggaggagtacagttttcacaccgtgagtgcaaggaccccgagcctcagaatggaggaagatactgcctgggtcggagagccaagtaccagtcatgccacacggaggaatgcccccctgacgggaaaagcttcagggagcagcagtgtgagaagtataatgcctacaattacactgacatggacgggaatctcctgcagtgggtccccaagtatgctggggtgtccccccgggaccgctgcaagttgttctgccgagcccgggggaggagcgagttcaaagtgttcgaggccaaggtgattgatggcaccctgtgtgggccagaaacactggccatctgtgtccgtggccagtgtgtcaaggccggctgtgaccatgtggtggactcgcctcggaagctggacaaatgcggggtgtgtgggggcaaaggcaactcctgcaggaaggtctccgggtccctcacccccaccaattatggctacaatgacattgtcaccatcccagctggtgccactaatattgacgtgaagcagcggagccacccgggtgtgcagaacgatgggaactacctggcgctgaagacggctgatgggcagtacctgctcaacggcaacctggccatctctgccatagagcaggacatcttggtgaaggggaccatcctgaagtacagcggctccatcgccaccctggagcgcctgcagagcttccggcccttgccagagcctctgacagtgcagctcctgacagtccctggcgaggtcttccccccaaaagtcaaatacaccttctttgttcctaatgacgtggactttagcatgcagagcagcaaagagagagcaaccaccaacatcatccagccgctgctccacgcacagtgggtgctgggggactggtctgagtgctctagcacctgcggggccggctggcagaggcgaactgtagagtgcagggacccctccggccaggcctctgccacctgcaacaaggctctgaaacccgaggatgccaagccctgcgaaagccagctgtgccccctgtgattcaggggggcaggggccagtcttgtgctcctggacatgcggtactgaggtgcagacaagggtctccactgtggtgactgggtcccttggccatatcaaggcagcacggcccacccaggcctcccattgccgcaacccctccagtactgcacaaattcctaagggggaagaggagagggtatggggcggcagaccctatcatcaactgtccagtggactggaccttgctcgggttcaagtagagggcataggttaaaaggtaaaagtgcacttattgactcagacaggacactcagcgtcagtctgtttgcaaaggactagcaaacttaaatgaaaaaaaaaattctatctggtttccccgataaataatctacctcacaggggaaaaaattagtacaagagaggcgtggggcagggagtcaatggtgaatgtcaaagcaggctccaaagctggaccccaagctgtcttcaagaatgaccacgactgtcttcagtgttaaaatccatcacctaaagggccgcagcgtcgcagggtttggagagccacatgttctcaggctgccacctgcaggggtggatccatttcaagtatttatgcaaatgtgtctctgaactaaagtgtgatcttatgcc

SEQ ID NO: 169960 - DNA, 3390 bp, Artificial Sequence
  derived and/or modified sequence
gctgctcgcgctcggctcgggggcggcggcgcgggaggagcgggctgcgccagccagaggggccgccgggggagcgctcccgccgccgggccccgcgggccgagtcggccttgcacccgattgattccgcttttcctggagagagcggccgggccgcgctcgggccgccagcacctgcccgcgcctggcgggcttcttccctctcctgcgcgcagccaccgccgcagcccccatgctccccgcccccgccgccccccggtggcctccgctcctgctgctgctgctgctgctgctgccgctggcccgcggcgccccggcccggcccgcagccggggggcaggcctcggagctggtggtgcccacgcggttgcccggctgcgcggctgcttcttctccggcaccgtgaatggggagcccgagtcgctggcggcggtcagcctgtgccgcgggctgagcggctccttcctgctggacggcgaggagttcaccatccagccgcagggcgcggggggctccctggctcagccgcaccgcctgcagcgctggggtcccgccggagcccgccccctcccgcgaggacccgagtgggaggtggagacgggagagggtcagaggcaggagagaggagaccaccaggaggacagcgaggaggagagccaagaagaggaggcagaaggcgctagcgagccgccaccgcccctgggggccacgagtaggaccaagcggtttgtgtctgaggcgcgcttcgtggagacgctgctggtggccgatgcgtccatggctgccttctacggggccgacctgcagaaccacatcctgacgttaatgtctgtggcagcccgaatctacaagcaccccagcatcaagaattccatcaacctgatggtggtaaaagtgctgatcgtagaagatgaaaaatggggcccagaggtgtccgacaatggggggcttacactgcgtaacttctgcaactggcagcggcgtttcaaccagcccagcgaccgccacccagagcactacgacacggccatcctgctcaccagacagaacttctgtgggcaggaggggctgtgtgacaccctgggtgtggcagacatcgggaccatttgtgaccccaacaaaagctgctccgtgatcgaggatgaggggctccaggcggcccacaccctggcccatgaactagggcacgtcctcagcatgccccacgacgactccaagccctgcacacggctcttcgggcccatgggcaagcaccacgtgatggcaccgctgttcgtccacctgaaccagacgctgccctggtccccctgcagcgccatgtatctcacagagcttctggacggcgggcacggagactgtctcctggatgcccctgctgcggccctgcccctccccacaggcctcccgggccgcatggccctgtaccagctggaccagcagtgcaggcagatctttgggccggatttccgccactgccccaacacctctgctcaggacgtctgcgcccagctttggtgccacactgatggggctgagcccctgtgccacacgaagaatggcagcctgccctgggctgacggcacgccgtgcgggcctgggcacctctgctcagaaggcagctgtctacctgaggaggaagtggagaggcccaagcccgtggcagatggaggctgggcaccgtggggaccctggggagaatgttctcggacctgtggaggaggagtacagttttcacaccgtgagtgcaaggaccccgagcctcagaatggaggaagatactgcctgggtcggagagccaagtaccagtcatgccacacggaggaatgcccccctgacgggaaaagcttcagggagcagcagtgtgagaagtataatgcctacaattacactgacatggacgggaatctcctgcagtgggtccccaagtatgctggggtgtccccccgggaccgctgcaagttgttctgccgagcccgggggaggagcgagttcaaagtgttcgaggccaaggtgattgatggcaccctgtgtgggccagaaacactggccatctgtgtccgtggccagtgtgtcaaggccggctgtgaccatgtggtggactcgcctcggaagctggacaaatgcggggtgtgtgggggcaaaggcaactcctgcaggaaggtctccgggtccctcacccccaccaattatggctacaatgacattgtcaccatcccagctggtgccactaatattgacgtgaagcagcggagccacccgggtgtgcagaacgatgggaactacctggcgctgaagacggctgatgggcagtacctgctcaacggcaacctggccatctctgccatagagcaggacatcttggtgaaggggaccatcctgaagtacagcggctccatcgccaccctggagcgcctgcagagcttccggcccttgccagagcctctgacagtgcagctcctgacagtccctggcgaggtcttccccccaaaagtcaaatacaccttctttgttcctaatgacgtggactttagcatgcagagcagcaaagagagagcaaccaccaacatcatccagccgctgctccacgcacagtgggtgctgggggactggtctgagtgctctagcacctgcggggccggctggcagaggcgaactgtagagtgcagggacccctccggccaggcctctgccacctgcaacaaggctctgaaacccgaggatgccaagccctgcgaaagccagctgtgccccctgtgattcaggggggcaggggccagtcttgtgctcctggacatgcggtactgaggtgcagacaagggtctccactgtggtgactgggtcccttggccatatcaaggcagcacggcccacccaggcctcccattgccgcaacccctccagtactgcacaaattcctaagggggaagaggagagggtatggggcggcagaccctatcatcaactgtccagtggactggaccttgctcgggttcaagtagagggcataggttaaaaggtaaaagtgcacttattgactcagacaggacactcagcgtcagtctgtttgcaaaggactagcaaacttaaatgaaaaaaaaaattctatctggtttccccgataaataatctacctcacaggggaaaaaattagtacaagagaggcgtggggcagggagtcaatggtgaatgtcaaagcaggctccaaagctggaccccaagctgtcttcaagaatgaccacgactgtcttcagtgttaaaatccatcacctaaagggccgcagcgtcgcagggtttggagagccacatgttctcaggctgccacctgcaggggtggatccatttcaagtatttatgcaaatgtgtctctgaactaaagtgtgatcttatgcc

SEQ ID NO: 169961 - DNA, 2670 bp, Artificial Sequence
  derived and/or modified sequence
atgctcccggctcccgctgctccacgctggccacccctgctgctcttactgctattgttgctgcccctggcccgcggagctccagcaaggcccgccgcaggcgggcaagcttcagagctggttgttcccactcgacttcctggcagcgctggtgagcttgcgcttcatttgtcagcctttggcaagggcttcgtgctgaggttggctccagacgacagttttctcgccccagagtttaaaattgagcgactcggcgggtcaggaagagctacgggcggagagagaggtctgcgcgggtgctttttctcggggacggtcaacggggaacccgaatccctggctgccgtgagcctctgccgcggactcagcggatcctttctcctcgacggggaggagttcacaattcagccacagggggctggtggcagtttggcgcagccccataggctacagagatggggtcccgccggggccaggcctctccctagggggccagagtgggaggtggagactggggaagggcagagacaagagcggggagatcatcaagaggatagcgaagaggaatcccaagaggaggaagccgaaggagccagcgaacctccaccaccccttggagcgacgagccgtactaagaggttcgtctccgaagcacgctttgttgagactctgttagtggcagatgcatccatggcagccttttacggcgcggacctccagaaccacatcttaaccttgatgtccgtggccgccaggatctacaaacatccaagtattaagaacagcatcaatcttatggtcgtaaaagtcctgatcgtagaggacgagaagtggggaccggaagtttcagacaacggtggcctgaccctgcggaacttctgcaactggcagcgcagatttaatcaacccagtgaccggcaccccgaacattatgatacagccatcctcttgactagacagaatttttgtggacaggaaggtctgtgcgacactctgggagtggccgacattggaacgatatgcgatcccaacaaaagctgtagcgtgatcgaagacgaggggctgcaagctgctcacacactggctcatgagctcgggcacgtcctctctatgccccacgatgattccaagccttgcaccagactgtttgggccgatgggtaaacaccacgtgatggcaccactatttgtgcacttaaaccagacactgccctggtcgccctgctcagcaatgtacctgacggagctgctagacggcggccacggggactgcctgcttgacgctccagccgccgctcttcccctgcccacaggcctgccaggtcggatggctctgtatcaactggatcaacaatgccggcagatcttcggccctgatttcaggcattgtcctaataccagtgcacaggacgtgtgcgctcagctatggtgtcacactgatggcgctgagcctctgtgccataccaaaaatggctcgttaccttgggcagacggaactccttgtggacctgggcacctttgtagcgaagggtcctgcctgccggaagaggaggtggagagacccaagcctgttgctgacggaggctgggccccatggggcccatggggagagtgctcaaggacatgcggaggcggggtccagttttcccacagagagtgtaaggacccagagccacagaatggcggcaggtactgtctcggccgtcgggcgaaataccagagttgtcatacagaggagtgccctcccgatggcaagtctttcagagaacagcagtgcgaaaagtataatgcttataattacacagacatggacggcaatctgctccagtgggtcccgaagtacgcgggtgttagccctcgggatagatgcaaactgttctgccgcgctcggggaaggagtgaattcaaagtgttcgaggccaaagtgatcgatgggaccctttgtggacccgaaaccttggccatctgcgtaaggggacagtgtgtgaaagccgggtgtgatcatgtggtggactcgcccagaaagctcgataagtgtggcgtgtgtggaggaaaagggaactcttgtcgaaaggtgtcaggaagtctcactcccaccaactatggctacaatgatatcgtgactatacctgcgggtgccacgaacatcgatgtcaaacaacggagccaccctggagttcagaatgacggcaactaccttgccctcaagacggccgatggccaatatctcctcaatgggaacctggccatctccgctatagagcaggatatcttggtaaagggtaccatcctcaaatattcaggttcaattgcaacgctggagcggctccagtcctttcgacctctgcctgaaccactgaccgtgcagttgctgacagtgcccggcgaagtgttccctccaaaggtgaaatatactttcttcgttcctaatgatgtagatttttctatgcagagctcgaaagagcgggctacaaccaatataatccagcccctgttacatgcgcaatgggtactgggcgattggagtgagtgctctagcacatgtggtgccggatggcaaagacgtacggtcgagtgccgggatcccagtggccaggcatcggctacatgcaacaaagctctgaagcccgaggatgcgaagccctgtgagtcacagctgtgccccctatag

SEQ ID NO: 169962 - DNA, 2757 bp, Artificial Sequence
  derived and/or modified sequence
gctgccagagctaggctgggcgggggaggggccggtggagccggctgcgccagccaacgaggcagaagagggtctgcaccagcagctggcccccgcggccctagcagaccttgtactcggcttataccactttttctcgaacgtgcagcaggaccacgctccggcagacagcatctgcccgccccaggcgggctcctgccatctcctgcacgaagccacagacgaagcccacatgcgcccagacccaggagacccccagtggcctcagcaccggcggcagctgcagccgccgctgccgctggaccccggcgaccaggaccggcaaggagtagaggagccggcctgggtgcgggcggagcacacgccgtggcccggctcaggggctgcttcttttcaggcaccgttaacggggagcccgaatccctcgctgctgtgagcttatgccggggactcagtggtagcttcctgctcgacggcgaggagtttacaatccagcctcagggtgctggaggcagcttagcccagccccatcgattacagcgctggggcccggcgggcgcacgtccacttcctcgcgggccggaatgggaagtggaaacaggggaaggacagagacaagaaaggggcgaccatcaggaggactcagaagaggagtcacaagaagaggaggccgagggcgcctcagaaccgccccccccccttggagctacttccagaacaaaacgattcgtgagtgaagcaaggtttgtcgagaccctcttggtggccgatgcgtccatggctgccttctatggtgcagacctacagaatcacattctgaccctcatgtctgtggcagctagaatctataagcacccatccatcaagaacagcatcaaccttatggtggtaaaagttttaatagtggaggacgaaaaatgggggcctgaagtgagcgataacggggggctgaccctgcgcaatttttgtaattggcaaaggcgattcaatcagccatccgacagacatccagaacattatgatactgctatccttctcaccaggcagaatttttgtggacaggagggactgtgtgatacccttggagtcgctgacattgggactatatgtgaccccaacaaatcctgtagtgtcatcgaagatgaagggttgcaggccgcccacacgttggcccacgaactcgggcacgtgctctctatgccacacgatgattcaaaaccttgcacccggttgttcgggccgatgggcaaacaccacgtgatggcccccctgttcgttcacctgaatcagacgctaccttggtctccttgctccgcaatgtatctgacagagctgctagatgggggccatggtgattgtctcctcgatgccccggctgccgcattgcccctgcctactggcttgccaggtcgcatggccctgtaccaacttgaccaacaatgccgtcagatttttggcccagattttcggcactgtcccaatacctctgcgcaggacgtgtgcgcccagctctggtgccacacagacggagccgaacctctgtgtcacactaaaaatggcagcttaccttgggctgatggcactccttgtggccctggccacctgtgtagtgaggggagctgcctgcccgaagaagaagtggaaagaccgaaacccgttgcggatggaggctgggcaccttgggggccttggggggaatgttccagaacatgcgggggcggagtacaattcagccatagagaatgtaaagatcctgaaccacaaaatggaggccgttactgcctgggcagacgcgctaaatatcaatcatgtcacacagaggaatgcccgcccgatgggaagtcgttcagggaacagcagtgtgagaagtacaatgcatataactatacggatatggacggcaacctgctgcaatgggtgccaaaatacgccggagtctccccaagggaccggtgcaaactattctgtcgggccaggggtcgctctgagtttaaggtgttcgaagctaaggtgattgatggcactctgtgtgggcctgaaacactggcgatctgtgtaagggggcagtgtgtgaaagcgggatgtgaccacgtggtggactcacccaggaaacttgataaatgcggtgtgtgtgggggcaaggggaatagctgccgcaaagtgtcggggtctctgacaccaaccaattacggttacaatgacatagtaacgatcccagcgggcgccaccaacatcgatgtgaagcagagatcacatcccggagtacagaatgacgggaactatctggccctgaaaacagcagatggacagtacctgcttaacggtaacctggctatttctgcaatcgagcaggatattcttgttaagggcactatcctgaagtacagcgggtccatcgccacactggaaaggctccagagtttccgacccctgccagagccgctcactgtgcagctccttaccgtgcccggcgaagttttccctccaaaagtgaaatacactttcttcgtacctaatgacgtggatttctcaatgcagtcctctaaggagagggccaccacaaacattattcagcctctgctgcacgctcagtgggtgctcggcgattggagcgaatgctccagcacttgtggcgccgggtggcagcggcgcaccgtggaatgcagagatccctcagggcaggccagcgccacctgtaacaaggcactaaagccggaagatgcaaaaccatgtgaatcgcaactgtgtcccctatag

SEQ ID NO: 169963 - DNA, 2670 bp, Artificial Sequence
  derived and/or modified sequence
atgctgcctgccccagctgccccccgctggccacccctgctgctgctgctgctgctgctgctgcccctggcccggggggccccagcccggcctgctgctgggggccaggccagcgagctggtggtgcccacccggctgcccggcagcgctggggagctggccctgcacctgagcgccttcggcaagggctttgtgctgcggctggccccagatgacagcttcctggcccctgagttcaagattgagcggctgggcggcagcggccgggccactggaggagagcggggcctgcggggctgcttcttctctggaacagtgaatggagagcctgagagcctggccgctgtgtccctgtgccggggcctgagcggcagcttcctgctggatggagaggagttcaccatccagccccagggcgctgggggcagcctggcccagccccaccggctgcagcgctggggccctgctggggcccggcccctgccccggggccctgagtgggaggtggagactggagagggccagaggcaggagcggggggaccaccaggaggacagcgaggaggagagccaggaggaggaggccgagggcgccagcgagcccccaccacccctgggcgccaccagcaggaccaagagatttgtgtctgaggccaggtttgtggagaccctgctggtggctgatgcctccatggccgccttctatggagctgacctgcagaaccacatcctgaccctgatgtctgtggccgcccgcatctacaagcaccccagcatcaagaacagcatcaacctgatggtggtgaaggtgctgattgtggaggatgagaagtggggccctgaggtgtctgacaatggaggcctgaccctgaggaacttctgcaactggcagaggcgcttcaaccagcccagcgacagacaccctgagcactatgacacagccatcctgctgacccggcagaacttctgtggccaggagggcctgtgtgacaccctgggcgtggccgacatcggcaccatctgtgaccccaacaagagctgcagcgtgattgaagatgagggcctgcaggccgcccacaccctggcccacgagctgggccacgtgctgtccatgcctcatgatgacagcaagccctgcacccggctgtttggccccatgggcaagcaccacgtgatggcccccctgtttgtgcacctgaaccagaccctgccctggagcccctgcagcgccatgtacctgacagagctgctggatggcggccatggagactgcctgctggatgccccagctgctgccctgcccctgcccaccggcctgcccggccgcatggccctgtaccagctggaccagcagtgccggcagatcttcggccctgacttccgccactgccccaacaccagcgcccaggatgtgtgtgcccagctgtggtgccacacagatggagctgagcccctgtgccacaccaagaatggcagcctgccctgggcagatggcaccccctgtggccctggccacctgtgcagcgagggcagctgcctgcctgaggaggaggtggagcggcccaagcctgtggctgatggcggctgggccccctggggcccctggggagaatgttccaggacctgtggcggcggcgtgcagttcagccaccgggagtgcaaggaccctgagccccagaatggaggccgctactgcctgggccggcgggccaagtaccagagctgccacacagaagaatgtcctccagatggcaagagcttccgggagcagcagtgtgagaagtacaatgcctacaactacacagacatggatggcaacctgctgcagtgggtgcccaagtatgccggcgtgagcccccgggaccgctgcaagctgttctgccgggcccggggccgctctgagttcaaggtgtttgaggccaaggtgattgatggcaccctgtgtggccctgagaccctggccatctgtgtgcggggccagtgtgtgaaggccggctgtgaccacgtggtggacagccccaggaagctggacaagtgtggggtgtgtggcggcaaaggaaacagctgcaggaaggtgtctggcagcctgacccccaccaactacggctacaatgacatcgtgaccatcccagctggggccaccaacattgatgtgaagcagaggagccaccctggggtgcagaatgatggcaactacctggccctgaagacagcagatggccagtacctgctgaatggaaacctggccatcagcgccatcgagcaggacatcctggtgaagggcaccatcctgaagtacagcggcagcatcgccaccctggagcggctgcagagcttccggcccctgcctgagcccctgactgtgcagctgctgactgtgcctggagaggtgtttcctcccaaggtgaagtacaccttctttgtgcccaatgatgtggacttctccatgcagagcagcaaggagcgggccaccaccaacatcatccagcccctgctgcacgcccagtgggtgctgggggactggagcgaatgtagcagcacctgtggggccggctggcagaggagaacagtggagtgccgggaccccagcggccaggccagcgccacctgcaacaaggccctgaagccagaagatgccaagccctgtgagagccagctgtgccccctgtag

SEQ ID NO: 169964 - DNA, 2757 bp, Artificial Sequence
  derived and/or modified sequence
gctgcccgggcccggctgggcggcggcggggccggcggggccggctgtgccagccagaggggccggcggggcagcgccccagctgctggcccccggggccccagccggccctgcaccaggctcatccccctcttcctggagagagctgctggccccaggagcggccggcagcacctgcctgcccctgggggcctgctgcccagccctgcccggagccaccggcgcagcccccacgccccccggcccaggaggcctcctgtggccagcgccccagctgctgctgctgctgctgctgctgctggccccaggaggcctggccctgcccggagcagaggagctggcctgggcgccggcggggcccatgctgtggcccggctgcggggctgcttcttcagcggcaccgtgaatggagagcctgagagcctggccgctgtgtccctgtgccggggcctgagcggcagcttcctgctggatggagaggagttcaccatccagccccagggcgccggcggcagcctggcccagccccaccggctgcagcgctggggccctgctggggcccggcccctgccccggggccctgagtgggaggtggagaccggggagggccagaggcaggagcggggggaccaccaggaggacagcgaggaggagagccaggaggaggaggccgagggcgccagcgagcccccaccacccctgggcgccaccagcaggaccaagagatttgtgtctgaggccaggtttgtggagaccctgctggtggctgatgcctccatggccgccttctacggggctgacctgcagaaccacatcctgaccctgatgtctgtggccgcccgcatctacaagcaccccagcatcaagaacagcatcaacctgatggtggtgaaggtgctgattgtggaggatgagaagtggggccctgaggtgtctgacaatggaggcctgaccctgaggaacttctgcaactggcagaggcgcttcaaccagcccagcgacagacaccctgagcactatgacacagccatcctgctgacccggcagaacttctgtggccaggagggcctgtgtgacaccctgggcgtggccgacatcggcaccatctgtgaccccaacaagagctgcagcgtgattgaagatgagggcctgcaggccgcccacaccctggcccacgagctgggccacgtgctgtccatgcctcatgatgacagcaagccctgcacccggctgtttggccccatgggcaagcaccacgtgatggcccccctgtttgtgcacctgaaccagaccctgccctggagcccctgcagcgccatgtacctgacagagctgctggatggcggccacggggactgcctgctggatgccccagctgctgccctgcccctgcccaccggcctgcccggccgcatggccctgtaccagctggaccagcagtgccggcagatctttggaccagacttccgccactgccccaacaccagcgcccaggatgtgtgtgcccagctgtggtgccacacagatggagctgagcccctgtgccacaccaagaatggcagcctgccctgggcagatggcaccccctgtggccctggccacctgtgcagcgagggcagctgcctgcctgaggaggaggtggagcggcccaagcctgtggctgatggcggctgggccccctggggcccctggggcgagtgcagcaggacctgtggcggcggcgtgcagttcagccaccgggagtgcaaggaccctgagccccagaatggaggccgctactgcctgggcagaagagccaagtaccagagctgccacacagaggagtgccccccagatggcaagagcttccgggagcagcagtgtgagaagtacaatgcctacaactacacagacatggatggcaacctgctgcagtgggtgcccaagtatgctggggtgagcccccgggaccgctgcaagctgttctgccgggcccggggccgctctgagttcaaggtgtttgaggccaaggtgattgatggcaccctgtgtggccctgagaccctggccatctgtgtgcggggccagtgtgtgaaggccggctgtgaccacgtggtggacagccccaggaagctggacaagtgtggggtgtgtggcggcaagggcaacagctgcaggaaggtgtctggcagcctgacccccaccaactacggctacaatgacatcgtgaccatcccagctggggccaccaacattgatgtgaagcagaggagccaccctggggtgcagaatgatggcaactacctggccctgaagacagcagatggccagtacctgctgaatggaaacctggccatcagcgccatcgagcaggacatcctggtgaagggcaccatcctgaagtacagcggcagcatcgccaccctggagcggctgcagagcttccggcccctgcctgagcccctgactgtgcagctgctgactgtgcctggagaggtgttcccccccaaggtgaagtacaccttctttgtgcccaatgatgtggacttctccatgcagagcagcaaggagcgggccaccaccaacatcatccagcccctgctgcacgcccagtgggtgctgggggactggagcgagtgcagcagcacctgtggggccggctggcagaggagaacagtggagtgccgggaccccagcggccaggccagcgccacctgcaacaaggccctgaagccagaagatgccaagccctgtgagagccagctgtgccccctgtag

SEQ ID NO: 169965 - DNA, 2670 bp, Artificial Sequence
  derived and/or modified sequence
atgctgcccgcccccgccgccccccggtggccccccctgctgctgcttttgctcttgcttctgcctttggcacggggtgcccccgcgagaccggccgctgggggtcaagcgagtgaattagtggtgcccacccgattgcccggttctgcaggcgaactcgcactgcacctgagcgctttcggcaaggggttcgtgctgcgccttgcccctgacgacagtttccttgcaccagagttcaaaattgagagactgggcgggtctgggcgggcgaccgggggcgagaggggattgagggggtgctttttctccggcacagttaacggagaaccagagtctctcgccgccgtgtcactttgcaggggcctttctggctcgtttctactcgacggtgaagaattcaccatccagcctcaaggggcaggtgggtccttggctcaacctcaccgtctccagagatggggccccgccggggccaggccgctgcctcgcggcccagagtgggaggtggaaaccggcgaaggacagaggcaggagaggggggatcatcaggaggattctgaggaggaaagccaagaagaggaggcagaaggagcctctgaacccccccctcccctgggggccaccagtagaactaaacgatttgttagcgaggctaggttcgtggaaacactactggtcgcggatgcgtccatggccgcattctatggagctgatcttcaaaatcacatactgacacttatgtcggttgccgctaggatttacaaacacccgtctattaaaaactccatcaatctgatggtggtgaaggttcttatcgtagaggacgagaagtgggggcccgaggtgagcgacaacggaggcctgaccctgcgaaacttctgcaattggcagcgaagatttaatcagccctccgataggcatccagaacactacgacacagctatcttacttacacgacaaaatttttgcggtcaagagggcctgtgcgatacactcggtgtggcagatatcggcacaatctgcgatcctaacaaaagctgttctgtcattgaggatgaagggctgcaggccgctcacaccttagctcatgaactgggacatgtgctttccatgccacacgatgatagtaagccttgcacccgactcttcggaccaatgggcaagcatcatgtgatggcccctctgttcgtgcacttaaaccaaactctcccttggagcccatgttccgcaatgtatctcacagaactgttagatgggggccacggagactgtcttctggatgcgccggcagctgcactccccctacctaccggcctgcccggcagaatggctctgtaccaattagatcagcaatgcaggcagatctttggcccggacttcagacactgccctaataccagcgcacaggacgtgtgtgctcagctgtggtgtcacaccgacggcgccgaaccactgtgccataccaagaacggaagcctgccgtgggcagatggaaccccctgcggccccggccacttgtgctccgagggctcctgtttgccagaggaagaagtggaacgacctaagcccgtggctgacgggggatgggccccctggggaccatggggagaatgttcacgaacctgtggtggcggcgtccagttcagtcatcgtgagtgcaaagatcccgaacctcagaatgggggccgctactgtctagggagaagagcaaaatatcagtcatgccatacggaagagtgccctcccgacggcaaatctttcagagaacagcagtgcgagaagtacaacgcctacaactacaccgacatggacggcaacttgctccagtgggttcccaagtatgcaggtgtcagccccagagatcgatgcaagctgttctgccgcgccaggggacgttccgaatttaaggtgtttgaagccaaagtcattgacggtactctctgcgggccggagaccctggcgatttgtgtgcgaggccaatgtgtgaaagctggttgtgaccacgttgtggattctccccggaagcttgataagtgcggcgtgtgcgggggtaaaggaaatagctgtagaaaggtgagcggctcactcaccccaaccaattacgggtataacgatatagtcaccattccagctggcgccaccaatatcgatgtgaaacagagatcacaccccggtgttcagaatgatggtaactacctggctctgaaaactgcagatggacagtatctgttgaacgggaatctcgcgatttctgctatagaacaggatatactcgtgaaaggaactatcttgaagtacagcgggtcaattgccacattagagagactgcaaagcttccgccccctccctgagccactgaccgttcagctgctaaccgtccccggagaggtgtttccgcctaaagtgaaatatacattctttgtcccgaacgatgttgacttctctatgcaatcgtcaaaagaacgggcaacgaccaatatcatccaacctttacttcatgcccagtgggttttgggggactggagcgagtgttcttctacctgcggagcaggatggcagcgaaggaccgtggaatgtagagaccccagtggacaggctagtgcaacatgtaacaaggcattgaaaccggaagacgcaaagccatgcgagtctcaactatgtcccctgtag

SEQ ID NO: 169966 - DNA, 2757 bp, Artificial Sequence
  derived and/or modified sequence
gccgcccgggcccggctgggcggcggcggcgccggcggcgccggctgtgcatctcagagagggagaagaggtagtgctccagctgcaggcccccgtggcccaagcagaccctgcacacggctgatacccctcttcctcgagagagcagcagggccgaggtctgggagacagcacctgcctgccccaggcggtttactcccatcccccgcgaggtcacataggcggtctccacacgcccctaggccacgccggcctccagtggcctcagccccagcggccgcagctgccgcagcagcggctggaccccgtagaccagggcctgcacgaagccgtggagccgggctcggggccggaggggcacatgctgttgctagacttcgcggatgtttcttcagtggcacagtgaacggcgaacccgaatccttagccgccgtaagtctgtgtcggggactttcaggttcgttcctgctggacggtgaggagtttaccatacagccacagggcgctggtggttctctcgcccagccccaccggttacagcggtggggtcctgccggcgccagacctctgcctcgaggacctgagtgggaggtggagaccggagaggggcaacgccaggaacgaggcgaccaccaggaggactcagaagaagaaagccaggaggaagaggctgaaggtgcctccgaacccccaccacctctaggggccacgtcacggaccaaaaggtttgtcagtgaagcgcgcttcgttgagacattgttggtggccgacgcctctatggcagcattttatggtgccgatttgcaaaaccacatcttgacccttatgtcggtagccgctagaatttataagcacccctcaatcaagaattcgatcaacttgatggtcgtgaaggtcctcattgtggaggatgagaagtgggggccagaagtgagcgacaatgggggattaaccttgcgcaacttttgcaactggcagcggaggttcaaccagccttctgacaggcatcctgagcactatgacacggccatcctcctgacccgacagaatttttgcggtcaagagggactgtgtgatacgttaggggtggccgatattggcaccatatgcgatccaaataagtcttgttccgtcattgaggatgagggccttcaagcagctcatacactcgctcatgaacttggacacgtgttatccatgcctcatgatgactccaagccttgcactagactgttcggtccaatgggcaagcaccatgtaatggccccactgtttgtccacctgaaccagacccttccctggtccccatgttccgccatgtacctgactgaactgctggacggcggacatggagattgtctgctcgacgccccagcggcagcactacccttacctactggactgcctgggcggatggccctctaccagcttgaccagcagtgtaggcagatattcggccccgacttcaggcattgtcccaatacaagcgcacaggacgtgtgcgcccaactgtggtgccatacagatggagccgagcccttatgtcacaccaaaaatggttcgctcccatgggcagacggcaccccttgcggccctggccacctatgttcagaggggtcatgccttccagaggaggaagtcgagcgccctaagccagtagccgacggcggatgggccccgtggggcccctggggcgaatgtagtcgcacttgcggcgggggcgttcagtttagccacagggaatgtaaggacccagaacctcagaatggcgggagatattgcctgggaaggcgtgctaagtaccagtcatgtcacaccgaagaatgcccaccagatgggaaatccttccgcgagcagcagtgcgagaagtataacgcctataattatactgatatggacggaaatctcctccagtgggttcccaaatatgccggagtatcgccacgggatcgctgtaagctcttctgccgggcgcgcggacggtcggaattcaaagtctttgaggctaaggttatagatggaactctttgtggtcccgagaccttagccatctgtgtgagagggcaatgcgtcaaagctggctgtgaccacgtagtagacagtccccggaagctcgacaagtgtggagtgtgcggtggtaaaggcaactcttgtcgaaaggttagcgggagcttaacgccaacaaactacggatataacgacatcgtgaccattccggccggggctaccaacattgacgtgaaacagcggtcacaccctggggtgcagaatgatgggaattatttggctctcaaaacagcggatggacaatacctccttaatggtaatttggccataagtgctatcgagcaggatatcctggtgaagggaacaatcctgaagtattccggcagtattgccactctggaaagactgcagtcattccgccccctacccgagcctttgacagtccaattattgactgttcctggcgaggtttttccccccaaagtgaagtataccttctttgttccaaacgatgtcgatttttctatgcaatccagcaaggaaagagccacaacaaacataatccagccccttctgcatgcacagtgggtgctgggggattggagcgaatgcagcagtacctgtggagccgggtggcagcgacgtacagtcgagtgccgcgacccaagcgggcaggctagcgcaacatgcaacaaggccctaaagccggaggatgcaaaaccttgtgaaagccagctgtgccccctttag

SEQ ID NO: 169967 - DNA, 2670 bp, Artificial Sequence
  derived and/or modified sequence
atgctgccagctcctgcggcacctcgatggcctcctctcctgcttttactgcttctactgttgccgctggcaagaggtgctccagctaggcccgcagctggcggtcaggcttccgagctcgtcgtgccaaccaggctccccggaagcgccggagaactggcgctgcacctcagtgcctttggcaaggggtttgtgcttaggttggcacctgacgattcattcctggccccagagtttaaaatagagcggctgggaggatctggccgagcaactggcggtgagagagggcttagaggatgtttcttttccggcactgtgaatggggagcccgaaagtctcgcagcagtgtctctgtgcagggggctctcaggaagtttcctgcttgatggagaggagtttacaatccagcctcaaggtgctggaggttcactggcgcagccccacagattgcagagatggggccctgccggtgccagacccctgcccagaggcccagagtgggaggtggagaccggagagggtcagcgccaggagcgcggagatcatcaggaggattctgaggaagagtcacaggaggaggaagctgagggcgcatcggaaccccctccccctttaggcgctactagccggaccaagaggtttgttagtgaagccaggttcgttgagacactcctggtggctgatgcttcaatggcagctttttacggcgctgacctgcaaaaccatatcttaactttgatgtcggttgcggctagaatttacaagcacccttcaattaaaaattctatcaatctgatggtcgtcaaggttctgatagtggaggacgaaaaatgggggccagaggtgagcgacaacggtggcctgactctgcgcaacttctgcaattggcagagaagatttaaccaaccctccgatcggcacccggagcattacgatactgctatattgctcaccaggcagaacttctgtgggcaggaaggcctgtgtgatacactgggcgtggccgatatcggtacaatttgcgatcctaacaaatcttgcagcgtcattgaggatgagggcctgcaagcggctcacacacttgctcacgaactcgggcatgtgctgtccatgccgcacgacgatagcaagccatgcacacgcctgttcggcccaatggggaagcaccatgtgatggctccgttatttgtccacctgaatcagaccctcccctggtccccttgttctgcaatgtatttgacagaacttctggacggtggccatggagactgtctgctcgatgccccagcggctgccctcccccttccaacaggccttcccggacgcatggctttgtaccagctagaccaacagtgtcgccagattttcgggcctgactttaggcattgccctaacacatcagcgcaggatgtctgtgcccagctgtggtgccacactgatggggctgagcccctctgtcacaccaagaacggatccctgccgtgggcggacggcactccgtgcgggcctggtcacctgtgttctgaaggcagctgccttcccgaagaagaagtggagagaccaaaaccagtggcagacggtgggtgggcaccgtgggggccttggggagaatgttcgcggacatgtggcggtggagtgcagtttagccacagggagtgcaaagatcccgagcctcaaaacgggggacgttactgtctcggtaggagagcaaagtaccagagctgtcatactgaggaatgtccccctgatggtaagagtttcagagagcagcagtgcgaaaaatataacgcctacaactatacggatatggacggcaatctcctgcaatgggtgcccaagtacgccggtgtgtccccacgggatcggtgcaagcttttctgtagggcacgcggaaggagtgaatttaaagtgttcgaagcgaaagtgatcgacggaacgctgtgtgggccagagactctggcgatttgtgttagaggtcaatgtgtgaaagctggatgcgaccatgtggtggattcccccagaaagctggataagtgtggagtctgtggcggtaaaggaaacagttgccgcaaagtttccggctccctgaccccaaccaactacgggtacaacgacattgtgaccattccggcaggagctaccaacatagacgtgaagcaaaggtcacatcctggcgtgcagaatgatggcaactacttggctctgaagacggccgatggccagtatctcttgaatggtaatctggctatcagtgccatcgaacaggacatcttagtcaaaggtaccattctgaagtactctggaagcatcgccaccttggaaaggctccagagttttcgtcctctccccgagcccctcacggtgcaattgctgaccgtccccggagaggttttccctcccaaggtaaagtatacatttttcgtgccgaacgacgtggatttttctatgcagagtagcaaggaaagggccaccaccaatattatccagcccctcctccatgcccagtgggtgttaggtgattggagcgaatgttcatcaacttgcggggctgggtggcagcgacgaaccgtcgaatgcagggacccaagcgggcaggcaagcgcgacatgcaacaaagcgttaaaacctgaagacgccaaaccttgcgaatcccagctatgtcctttgtag

SEQ ID NO: 169968 - DNA, 2757 bp, Artificial Sequence
  derived and/or modified sequence
gccgctagagctcgtctgggaggcggtggcgctggcggagccggatgtgctagtcagagaggcagacgcggaagcgctcccgcagctggcccacgaggcccatccagaccctgtaccagattgattcctttatttctggaacgggctgccggaccacgctcaggaaggcagcaccttcctgcccctgggggattgctgccaagcccggcacgcagccatcgacgatcacctcacgcgcctcgcccacggcgacctcctgtggcctccgcacccgcagctgcggcagccgctgccgcagccggtcctcggaggccaggacctgcccgtagccgcggagccggactgggagctggcggagcccacgctgttgccaggctgcggggttgcttcttctccggcaccgtgaatggggaaccagaatccttagcggctgtaagcctatgtaggggattatccggcagcttccttctagatggggaagagttcaccatccagccacaaggcgcaggcggtagtctcgctcagccccatcgtctgcaaaggtggggtccagcaggcgctaggccactgcccagaggccctgaatgggaggttgagactggtgagggccagagacaggagcggggtgatcatcaggaggatagcgaggaggagtcccaggaggaagaagccgagggggctagcgagcctcctcccccattgggggcaacctcacggaccaagaggttcgtatccgaagctcgctttgttgagaccctgctcgtggccgacgcaagcatggctgccttctacggcgctgacctgcagaatcacattctcactctgatgtccgttgcagccagaatctataaacatccttctataaagaattccattaacttaatggtcgtgaaagttctgatcgtggaagacgagaaatggggcccagaggtcagtgacaacggcggactgacactgaggaatttctgtaattggcagcgaaggttcaatcagccgagcgatcggcaccccgagcattacgacacagcgatcctgctcacgaggcagaatttttgcggacaggagggtttgtgtgatacattgggagtggccgatattggcacaatctgcgatcccaacaaatcctgcagcgtgattgaggacgagggcttgcaggccgcacataccctggcacacgagctgggtcacgtcctgtcaatgccacacgacgactctaagccttgcacaaggctctttggtccgatgggtaagcaccacgtcatggcacccctatttgtacacttaaatcagaccctgccctggtccccctgttccgccatgtacctcaccgagctattggacggaggccacggtgactgcctgttggatgctccggctgcggctctcccactccccactggactccccggtcggatggctctctaccagctggatcagcagtgtcgtcaaatttttggccctgacttcaggcactgccctaacacatcagcacaggacgtttgcgcacagctttggtgtcacactgatggggcagagcctctgtgtcacacaaagaacggctcccttccatgggccgatgggacaccatgcgggcctggccacttatgtagtgaaggctcctgcctacccgaagaagaggtggagaggcccaagccagtggctgatggtggttgggcaccgtgggggccatggggcgagtgttcaaggacttgtgggggaggggtccagttcagccaccgggaatgcaaagatccagagccccagaacgggggtcgatattgcctcggtaggcgcgctaagtatcagtcttgtcacactgaggaatgtcctcccgacggcaaatcatttcgagaacaacagtgcgagaaatacaacgcgtataactatacagacatggatggcaatctgctacaatgggtgcccaagtacgccggtgtgtctcccagggatcgctgtaaacttttctgcagggctagagggagaagtgaattcaaagtgtttgaggccaaggtcatcgacgggactctgtgcggcccagaaacacttgcaatatgtgtcaggggccaatgcgtgaaggccggatgtgatcatgtggtggattcacctaggaagctcgataagtgcggggtctgcggcggaaagggcaactcctgcaggaaagtgagtgggtcgttgactcccaccaactatggctacaatgatatcgttaccatcccagccggtgccacgaacattgacgtgaaacagcgctcacaccctggcgtgcagaacgacggcaattatctggctctgaaaactgccgacggccaatacctgctgaatggcaatcttgccatctccgctattgagcaggatatccttgtgaaaggaaccatcctgaagtattccggctcgattgctacactcgagaggctccagtccttcaggccgctccccgagccactgaccgttcaactgctcacagtacctggagaagtgttcccgcctaaggttaagtacaccttcttcgtgcccaacgatgtagacttttccatgcagtctagtaaagaaagagcaactactaacatcatacagcctctattgcacgctcaatgggtcctgggagactggagcgaatgttcatctacatgtggcgcaggatggcagcgtcgtacggtagaatgccgcgacccatccggacaagcttctgctacatgcaacaaggccctcaaaccggaggatgctaagccgtgtgaatctcagttgtgccctctctag

SEQ ID NO: 169969 - DNA, 2670 bp, Artificial Sequence
  derived and/or modified sequence
atgctgcccgcccccgccgcccccagatggccccccctgctgctgctgctgctgctgctgctgcccctggccagaggcgcccccgccagacccgccgccggcggccaggccagcgagctggtggtgcccaccagactgcccggcagcgccggcgagctggccctgcacctgagcgccttcggcaagggcttcgtgctgagactggcccccgacgacagcttcctggcccccgagttcaagatcgagagactgggcggcagcggcagagccaccggcggcgagagaggcctgagaggctgcttcttcagcggcaccgtgaacggcgagcccgagagcctggccgccgtgagcctgtgcagaggcctgagcggcagcttcctgctggacggcgaggagttcaccatccagccccagggcgccggcggcagcctggcccagccccacagactgcagagatggggccccgccggcgccagacccctgcccagaggccccgagtgggaggtggagaccggcgagggccagagacaggagagaggcgaccaccaggaggacagcgaggaggagagccaggaggaggaggccgagggcgccagcgagccccccccccccctgggcgccaccagcagaaccaagagattcgtgagcgaggccagattcgtggagaccctgctggtggccgacgccagcatggccgccttctacggcgccgacctgcagaaccacatcctgaccctgatgagcgtggccgccagaatctacaagcaccccagcatcaagaacagcatcaacctgatggtggtgaaggtgctgatcgtggaggacgagaagtggggccccgaggtgagcgacaacggcggcctgaccctgagaaacttctgcaactggcagagaagattcaaccagcccagcgacagacaccccgagcactacgacaccgccatcctgctgaccagacagaacttctgcggccaggagggcctgtgcgacaccctgggcgtggccgacatcggcaccatctgcgaccccaacaagagctgcagcgtgatcgaggacgagggcctgcaggccgcccacaccctggcccacgagctgggccacgtgctgagcatgccccacgacgacagcaagccctgcaccagactgttcggccccatgggcaagcaccacgtgatggcccccctgttcgtgcacctgaaccagaccctgccctggagcccctgcagcgccatgtacctgaccgagctgctggacggcggccacggcgactgcctgctggacgcccccgccgccgccctgcccctgcccaccggcctgcccggcagaatggccctgtaccagctggaccagcagtgcagacagatcttcggccccgacttcagacactgccccaacaccagcgcccaggacgtgtgcgcccagctgtggtgccacaccgacggcgccgagcccctgtgccacaccaagaacggcagcctgccctgggccgacggcaccccctgcggccccggccacctgtgcagcgagggcagctgcctgcccgaggaggaggtggagagacccaagcccgtggccgacggcggctgggccccctggggcccctggggcgagtgcagcagaacctgcggcggcggcgtgcagttcagccacagagagtgcaaggaccccgagccccagaacggcggcagatactgcctgggcagaagagccaagtaccagagctgccacaccgaggagtgcccccccgacggcaagagcttcagagagcagcagtgcgagaagtacaacgcctacaactacaccgacatggacggcaacctgctgcagtgggtgcccaagtacgccggcgtgagccccagagacagatgcaagctgttctgcagagccagaggcagaagcgagttcaaggtgttcgaggccaaggtgatcgacggcaccctgtgcggccccgagaccctggccatctgcgtgagaggccagtgcgtgaaggccggctgcgaccacgtggtggacagccccagaaagctggacaagtgcggcgtgtgcggcggcaagggcaacagctgcagaaaggtgagcggcagcctgacccccaccaactacggctacaacgacatcgtgaccatccccgccggcgccaccaacatcgacgtgaagcagagaagccaccccggcgtgcagaacgacggcaactacctggccctgaagaccgccgacggccagtacctgctgaacggcaacctggccatcagcgccatcgagcaggacatcctggtgaagggcaccatcctgaagtacagcggcagcatcgccaccctggagagactgcagagcttcagacccctgcccgagcccctgaccgtgcagctgctgaccgtgcccggcgaggtgttcccccccaaggtgaagtacaccttcttcgtgcccaacgacgtggacttcagcatgcagagcagcaaggagagagccaccaccaacatcatccagcccctgctgcacgcccagtgggtgctgggcgactggagcgagtgcagcagcacctgcggcgccggctggcagagaagaaccgtggagtgcagagaccccagcggccaggccagcgccacctgcaacaaggccctgaagcccgaggacgccaagccctgcgagagccagctgtgccccctgtag

SEQ ID NO: 169970 - DNA, 2757 bp, Artificial Sequence
  derived and/or modified sequence
gccgccagagccagactgggcggcggcggcgccggcggcgccggctgcgccagccagagaggcagaagaggcagcgcccccgccgccggccccagaggccccagcagaccctgcaccagactgatccccctgttcctggagagagccgccggccccagaagcggcagacagcacctgcccgcccccggcggcctgctgcccagccccgccagaagccacagaagaagcccccacgcccccagacccagaagaccccccgtggccagcgcccccgccgccgccgccgccgccgccgccgccggccccagaagacccggccccgccagaagcagaggcgccggcctgggcgccggcggcgcccacgccgtggccagactgagaggctgcttcttcagcggcaccgtgaacggcgagcccgagagcctggccgccgtgagcctgtgcagaggcctgagcggcagcttcctgctggacggcgaggagttcaccatccagccccagggcgccggcggcagcctggcccagccccacagactgcagagatggggccccgccggcgccagacccctgcccagaggccccgagtgggaggtggagaccggcgagggccagagacaggagagaggcgaccaccaggaggacagcgaggaggagagccaggaggaggaggccgagggcgccagcgagccccccccccccctgggcgccaccagcagaaccaagagattcgtgagcgaggccagattcgtggagaccctgctggtggccgacgccagcatggccgccttctacggcgccgacctgcagaaccacatcctgaccctgatgagcgtggccgccagaatctacaagcaccccagcatcaagaacagcatcaacctgatggtggtgaaggtgctgatcgtggaggacgagaagtggggccccgaggtgagcgacaacggcggcctgaccctgagaaacttctgcaactggcagagaagattcaaccagcccagcgacagacaccccgagcactacgacaccgccatcctgctgaccagacagaacttctgcggccaggagggcctgtgcgacaccctgggcgtggccgacatcggcaccatctgcgaccccaacaagagctgcagcgtgatcgaggacgagggcctgcaggccgcccacaccctggcccacgagctgggccacgtgctgagcatgccccacgacgacagcaagccctgcaccagactgttcggccccatgggcaagcaccacgtgatggcccccctgttcgtgcacctgaaccagaccctgccctggagcccctgcagcgccatgtacctgaccgagctgctggacggcggccacggcgactgcctgctggacgcccccgccgccgccctgcccctgcccaccggcctgcccggcagaatggccctgtaccagctggaccagcagtgcagacagatcttcggccccgacttcagacactgccccaacaccagcgcccaggacgtgtgcgcccagctgtggtgccacaccgacggcgccgagcccctgtgccacaccaagaacggcagcctgccctgggccgacggcaccccctgcggccccggccacctgtgcagcgagggcagctgcctgcccgaggaggaggtggagagacccaagcccgtggccgacggcggctgggccccctggggcccctggggcgagtgcagcagaacctgcggcggcggcgtgcagttcagccacagagagtgcaaggaccccgagccccagaacggcggcagatactgcctgggcagaagagccaagtaccagagctgccacaccgaggagtgcccccccgacggcaagagcttcagagagcagcagtgcgagaagtacaacgcctacaactacaccgacatggacggcaacctgctgcagtgggtgcccaagtacgccggcgtgagccccagagacagatgcaagctgttctgcagagccagaggcagaagcgagttcaaggtgttcgaggccaaggtgatcgacggcaccctgtgcggccccgagaccctggccatctgcgtgagaggccagtgcgtgaaggccggctgcgaccacgtggtggacagccccagaaagctggacaagtgcggcgtgtgcggcggcaagggcaacagctgcagaaaggtgagcggcagcctgacccccaccaactacggctacaacgacatcgtgaccatccccgccggcgccaccaacatcgacgtgaagcagagaagccaccccggcgtgcagaacgacggcaactacctggccctgaagaccgccgacggccagtacctgctgaacggcaacctggccatcagcgccatcgagcaggacatcctggtgaagggcaccatcctgaagtacagcggcagcatcgccaccctggagagactgcagagcttcagacccctgcccgagcccctgaccgtgcagctgctgaccgtgcccggcgaggtgttcccccccaaggtgaagtacaccttcttcgtgcccaacgacgtggacttcagcatgcagagcagcaaggagagagccaccaccaacatcatccagcccctgctgcacgcccagtgggtgctgggcgactggagcgagtgcagcagcacctgcggcgccggctggcagagaagaaccgtggagtgcagagaccccagcggccaggccagcgccacctgcaacaaggccctgaagcccgaggacgccaagccctgcgagagccagctgtgccccctgtag

SEQ ID NO: 169971 - protein, 930 aa, Artificial Sequence
  derived and/or modified sequence
MLLGWASLLLCAFRLPLAAVGPAATPAQDKAGQPPTAAAAAQPRRRQGEEVQERAEPPGHPHPLAQRRRSKGLVQNIDQLYSGGGKVGYLVYAGGRRFLLDLERDGSVGIAGFVPAGGGTSAPWRHRSHCFYRGTVDGSPRSLAVFDLCGGLDGFFAVKHARYTLKPLLRGPWAEEEKGRVYGDGSARILHVYTREGFSFEALPPRASCETPASTPEAHEHAPAHSNPSGRAALASQLLDQSALSPAGGSGPQTWWRRRRRSISRARQVELLLVADASMARLYGRGLQHYLLTLASIANRLYSHASIENHIRLAVVKVVVLGDKDKSLEVSKNAATTLKNFCKWQHQHNQLGDDHEEHYDAAILFTREDLCGHHSCDTLGMADVGTICSPERSCAVIEDDGLHAAFTVAHEIGHLLGLSHDDSKFCEETFGSTEDKRLMSSILTSIDASKPWSKCTSATITEFLDDGHGNCLLDLPRKQILGPEELPGQTYDATQQCNLTFGPEYSVCPGMDVCARLWCAVVRQGQMVCLTKKLPAVEGTPCGKGRICLQGKCVDKTKKKYYSTSSHGNWGSWGSWGQCSRSCGGGVQFAYRHCNNPAPRNNGRYCTGKRAIYRSCSLMPCPPNGKSFRHEQCEAKNGYQSDAKGVKTFVEWVPKYAGVLPADVCKLTCRAKGTGYYVVFSPKVTDGTECRLYSNSVCVRGKCVRTGCDGIIGSKLQYDKCGVCGGDNSSCTKIVGTFNKKSKGYTDVVRIPEGATHIKVRQFKAKDQTRFTAYLALKKKNGEYLINGKYMISTSETIIDINGTVMNYSGWSHRDDFLHGMGYSATKEILIVQILATDPTKPLDVRYSFFVPKKSTPKVNSVTSHGSNKVGSHTSQPQWVTGPWLACSRTCDTGWHTRTVQCQDGNRKLAKGCPLSQRPSAFKQCLLKKC

SEQ ID NO: 169972 - DNA, 9056 bp, Artificial Sequence
  derived and/or modified sequence
cttgactcaatcctgcaagcaagtgtgtgtgtgtccccatcccccgccccgttaacttcatagcaaataacaaatacccataaagtcccagtcgcgcagcccctccccgcgggcagcgcactatgctgctcgggtgggcgtccctgctgctgtgcgcgttccgcctgcccctggccgcggtcggccccgccgcgacacctgcccaggataaagccgggcagcctccgactgctgcagcagccgcccagccccgccggcggcagggggaggaggtgcaggagcgagccgagcctcccggccacccgcaccccctggcgcagcggcgcaggagcaaggggctggtgcagaacatcgaccaactctactccggcggcggcaaggtgggctacctcgtctacgcgggcggccggaggttcctcttggacctggagcgagatggttcggtgggcattgctggcttcgtgcccgcaggaggcgggacgagtgcgccctggcgccaccggagccactgcttctatcggggcacagtggacggtagtccccgctctctggctgtctttgacctctgtgggggtctcgacggcttcttcgcggtcaagcacgcgcgctacaccctaaagccactgctgcgcggaccctgggcggaggaagaaaaggggcgcgtgtacggggatgggtccgcacggatcctgcacgtctacacccgcgagggcttcagcttcgaggccctgccgccgcgcgccagctgcgaaacccccgcgtccacaccggaggcccacgagcatgctccggcgcacagcaacccgagcggacgcgcagcactggcctcgcagctcttggaccagtccgctctctcgcccgctgggggctcaggaccgcagacgtggtggcggcggcggcgccgctccatctcccgggcccgccaggtggagctgcttctggtggctgacgcgtccatggcgcggttgtatggccggggcctgcagcattacctgctgaccctggcctccatcgccaataggctgtacagccatgctagcatcgagaaccacatccgcctggccgtggtgaaggtggtggtgctaggcgacaaggacaagagcctggaagtgagcaagaacgctgccaccacactcaagaacttttgcaagtggcagcaccaacacaaccagctgggagatgaccatgaggagcactacgatgcagctatcctgtttactcgggaggatttatgtgggcatcattcatgtgacaccctgggaatggcagacgttgggaccatatgttctccagagcgcagctgtgctgtgattgaagacgatggcctccacgcagccttcactgtggctcacgaaatcggacatttacttggcctctcccatgacgattccaaattctgtgaagagacctttggttccacagaagataagcgcttaatgtcttccatccttaccagcattgatgcatctaagccctggtccaaatgcacttcagccaccatcacagaattcctggatgatggccatggtaactgtttgctggacctaccacgaaagcagatcctgggccccgaagaactcccaggacagacctacgatgccacccagcagtgcaacctgacattcgggcctgagtactccgtgtgtcccggcatggatgtctgtgctcgcctgtggtgtgctgtggtacgccagggccagatggtctgtctgaccaagaagctgcctgcggtggaagggacgccttgtggaaaggggagaatctgcctgcagggcaaatgtgtggacaaaaccaagaaaaaatattattcaacgtcaagccatggcaactggggatcttggggatcctggggccagtgttctcgctcatgtggaggaggagtgcagtttgcctatcgtcactgtaataaccctgctcccagaaacaacggacgctactgcacagggaagagggccatctaccgctcctgcagtctcatgccctgcccacccaatggtaaatcatttcgtcatgaacagtgtgaggccaaaaatggctatcagtctgatgcaaaaggagtcaaaacttttgtggaatgggttcccaaatatgcaggtgtcctgccagcggatgtgtgcaagctgacctgcagagccaagggcactggctactatgtggtattttctccaaaggtgaccgatggcactgaatgtaggctgtacagtaattccgtctgcgtccgggggaagtgtgtgagaactggctgtgacggcatcattggctcaaagctgcagtatgacaagtgcggagtatgtggaggagacaactccagctgtacaaagattgttggaacctttaataagaaaagtaagggttacactgacgtggtgaggattcctgaaggggcaacccacataaaagttcgacagttcaaagccaaagaccagactagattcactgcctatttagccctgaaaaagaaaaacggtgagtaccttatcaatggaaagtacatgatctccacttcagagactatcattgacatcaatggaacagtcatgaactatagcggttggagccacagggatgacttcctgcatggcatgggctactctgccacgaaggaaattctaatagtgcagattcttgcaacagaccccactaaaccattagatgtccgttatagcttttttgttcccaagaagtccactccaaaagtaaactctgtcactagtcatggcagcaataaagtgggatcacacacttcgcagccgcagtgggtcacgggcccatggctcgcctgctctaggacctgtgacacaggttggcacaccagaacggtgcagtgccaggatggaaaccggaagttagcaaaaggatgtcctctctcccaaaggccttctgcgtttaagcaatgcttgttgaagaaatgttagcctgtggttatgatcttatgcacaaagataactggaggattcagcactgatgcagtcgtggtgaacaggaggtctacctaacgcacagaaagtcatgcttcagtgacattgtcaacaggagtccaattatgggcagaatctgctctctgtgaccaaaagaggatgtgcactgcttcacgtgacagtggtgaccttgcaatatagaaaaacttgggagttattgaacatcccctgggcttacaagaaacactgatgaatgtaaaatcaggggacatttgaagatggcagaactgtctcccccttgtcacctacctctgatagaatgtctttaatggtatcataatcattttcacccataatacacagtagcttcttcttactgtttgtaaatacattctcccttggtatgtcactttatatcccctggttctattaaaatatccatatatatttctataaaaaaagtgtttgaccaaagtaggtctgcagctatttcaacttccttccgtttccagaaagagctgtggatattttactggaaattaagaacttgctgctgttttaataagatgtagtatattttctgactacaggagataaaatttcagtcaaaaaaccattttgacagcaagtatcttctgagaaattttgaaaagtaaatagatctcagtgtatctagtcacttaaatacatacacgggttcatttacttaaacctttgactgcctgtatttttttcaggtagctagccaaattaatgcataatttcagatgtagaagtagggtttgcgtgtgtgtgtgtgatcatactcaagagtctaaaaactagtttccttgtgttggaaatttaaaaggaaaaaaatcgtatttcactgtgttttcaatttatattttcacaactactttctctctccagagctttcatctgatatctcacaatgtatgatatacgtacaaaacacacagcaagttttctatcatgtccaacacattcaacactggtatacctcctaccagcaagcctttaaaatgcatttgtgtttgcttatttgttttgttcaagggttcagtaagacctacaatgttttgtatttcttgacttattttattagaaacattaaagatcacttggtagttagccacattgagaagtggttatcattgttaatgtggttaatgccaaaaagtggttaatattaataagactgtttccacaccataggcaataatttcttaatttaaaaaatctaagtatattcctattgtactaaatatttttcccaactggaaagcacttgattgtacccgtaagtgtttgagtgatgacatgtgatgattttcagaaagttgttgtttttgtttccatagcctgtttaagtaggttgtaagtttgaatagttagacatggaaattattttataagcacacacctaaagatatctttttagatgataaaatgtacacccccccatcaccaacctcacaacttagaaaatctaagttgtttgatttctttgggatttcttttgttgtgaaacactgcaaagccaatttttctttataaaaattcatagtaatcctgccaaatgtgcctattgttaaagatttgcatgtgaagatcttagggaaccactgtttgagttctacaagctcatgagagtttatttttattataagatgtttttaatataaaagaattatgtaactgatcactatattacatcatttcagtgggccaggaaaatagatgtcttgctgttttcagtattttcttaagaaattgcttttaaaacaaataattgttttacaaaaccaataattatcctttgaattttcatagactgactttgcttttgacgtagaaattttttttctcaataaattatcactttgagaaatgaggcctgtacaaggctgataacctatatgtgatggagatcacccaatgccaagggcagaaagcaaacctagttaaataggtgagaaaaaaaataataatcccagtgccatttgtctgtgcaaagagaattaggagagaggttaatgttacttttttccattttggaaataattttaatcaagtaactcaaatgtgacaaaatttatttttattttttgtggttatattcccaacaacattaaaaaatactcgaggcataaatgtagttgtctcctactctgcttctcttactatactcatacatttttaatatggtttatcaatgattcatgtttccctcaaatagtgatggtttacacctgtcatggaaacaatcctagagagctcagagcaattaaaccactattccatgcttttaagtagttttctccacctttttcttatgagtctcactagattgactgaggaatgtatgtctaaattcctggagaagatgatatggattggaaactgaaattcagagaaatggagtgttcaatagataccacgaattgtgaacaaagggaaaattctatacaactcaatctaagtcagtccactttgacttcgtactgtctttcacctttccattgttgcatcttgaattttttaaaatgtctagaattcaggatgctaggggctacttctttaaaaaaaaaaaaaaaaaagaattcgtctgaaaatgctcaggtttgtaagaatctaatctcacttacataactaagcactccataataagttttattaagtacaaagggagccagaaaaaatgacatttatttcttctagatcagaaaaatttaaattaagccctgccttgctgtttagaaatatgtgggcattgttataatttattcaataaatttatgttcctttgccttcctgtggaaacagttttatcccactaaactaggaattaggggataaatcacaaacaaaaaaaaagttgcagcactgaaaaaaagtaatttattgtttttgcaactggtatgtgaatttgtgtgataaaattatttattcttatttaacaaaaatatgttcaaatttttctatatttaaaatgttttgctgttgtcctactttttaatttatgcttcatgtttgtgtataaagtacacttttacactttgtgagtttacataatatacagcactggttgcttttgtatttttttacagaaagctttctgtgtgaagcaggtgtatatgtatatattcctcatgtattcttattctgatactatcatttttctttccaaggaaattttaatctgtcatgaccaatagtgttcattacttgtgcctatgataataggttttttacatcacattaacactattttttccaagtcacaaataagaaaaacacttattcaatgaaacaaggtgcaagttttaaatttgggtacacaaatagcctagaagcttcctacagacgctaagacacagccaataatcagatcctttcacttcatcgagaaacttggacaagtcgatattgatgtattagatgaaagttgtctacacacaacttctgagggatacaaacgataataaaaccaaatgttgtctgtttctcctttagaaacacctcctaaaattaatatcatttagtctctagtgtctgtaggattctacagatgagcacaaatagattgggtttgtataacaaatgctaatagtcataactgtttctacaaatatggggtgtccattaagagaatgtgatgttttcctactgctgttgaatcccatggggtgattataggacttgaaataggcagagtcacctctgatgacatcagcttgcctctgtgatttcacagtctgatcctggcaacaagacaaagcacccttggacacacagccaatctctggttgtgatatttccccattgattccttccttgttaacaaggtcattttaatggttcaggtgaggacagcagccagattcaaagtccagaatttgtgctgttacatagagttcacactgtcaaataacattgaatttaataatgatcaaatttttctagtagtctttggcagagtgtataatctcattggcatgattggtgaatattactaatctctttataatgaaagatgctttacaaataccttatatttgctaacatttcaaaactactaaataaatgaaatagccatgtgtacagaaatggtcatttaaagctttaatagaaccaaattcaagacaatgtatcatttagacacacagaaaaggaacttgtatgttttccctattatttttctcatttgccaacaatctatagttttaggttatcaaacagatagatcaacttaactggctagtacattgaaaaatcttcctaagaatcctttgttagcataatctatagagataatttctcaaattatatcatcatgatgcatataaactctataatgtataattgtgtttcatttatttaatgtatgagaacatattgaaatacaaaaccatgcattagccaaaaaattggaatacaggtagtgttcagatcagcaaaacattcagtctggtaaatgcctgcctggggctatgatatcattctcaatgcaggttttatggaaaaactaaaagaatatgttgttagatgatgttggttttgaaaaaaaaaagacattaacatacacattagttagcccagttaattgcattctactaatatagttgcacattagcaataattttgctgtctctggtctttattttgtggcttcaactaactggaccatgtggactgtaaaggtcaaatggaaaaaacgagcagtggcccctcatcctgtaaggtactgctacatcagagtgacctaaaagtctaacactgtgaggaaaactgtgatttgtaggaaaaaaaaaaaaaacaaataaaaaacagggcatgctttttaatttttttccactttcctttggcacacccaatgaacaattctaatttttattgaggtgctaacatctttcgtgaccgactgtcaaatgtggtatttttgagttactatttttctacatgattttacagtttgcaagaaagacctctaagctttgtgtcacggtagggcacaacttgatactcaaaatttgaaaaataagcacatccaatgattgttttgaccaacagtggtcagtgacgtaaactgcatgtgcatctgaggacatttaaggggtcattaaaatttgaggagcatcaggccggagtagcagacttttagatgagtcatatttcagcattcactaagtcctcagcattccattcaaactgtcgtgtatatttggcctgattttttttcaagctttgcaataatttatgttattggtaaacacttggtgactatatctcagccttttctttaacaactcacaatatattagaaacacgtctacctatactgagagtatatttacaatagaagaacatactgtatgtgactttgtaaagctagacttttgattaagaaatatataatctctggatgctatttttgcattatacactcaggcacaacgtaaaccttgatggctcatcttgctacaattacgagttgaaaaacactacttacgtatttgtatgacctattagtcagaggaaatcatacatatgctttgtaaatagactttgcagataactaaatagactgaagaaatatgttgcatttgatagaagcaattgcataaatatttggtttctatattagagtctgtgagtaaagtcaagtaataaacctaagtaggtataacagatttttaaaccttgaaacttgctttgatggtagagaaaatcattgaagatttacatactgtatataagatgtaaaatgtacgctgcttattaccctcaattttccagaagcaatggtatataatgcagttgaaaaaccaaaaatcttggaaaactaagacgggtcttgtttaaaatgtctctcagctttggcaaccttcaaatcttaatcaactatttaaagcattactgtgtcttgtagcctgcattccacaacagctctgttattcaggtaaaagacttgaactgagccgtttgggacctatactgtaatattttcattgaggaacaatatcctattttgtaaagcatttccctatgtgtgactttaaactgtaaaattaaacactgcttttgtgggttcagtgggcataataaatataaattgtaaactaggttaaagta

SEQ ID NO: 169973 - DNA, 2793 bp, Artificial Sequence
  derived and/or modified sequence
atgctgctggggtgggcctccttactgctgtgcgctttcagactgcctctcgctgccgtcgggccagctgccacccccgcccaagacaaagccggacagcctcctacagcagcggccgccgcacagccgcgtcggcgacagggcgaagaggttcaagagagggctgaaccaccaggacatccccacccacttgctcagcgtcgtcggtctaaaggactagtccagaatatcgatcagctgtactctgggggtggcaaagtggggtatctcgtatatgccggaggacgcaggtttctgttggacttagagagggacggcagtgtggggattgccggcttcgtccccgccggtggtggcaccagcgctccgtggcgacaccgcagccactgtttttaccgagggacagttgacgggagcccacggtccctcgcagtattcgatctctgtggcgggttggacggcttcttcgcagtgaagcacgcccgctacaccttgaagcctctgctgcgcggcccttgggcagaggaggagaaaggacgagtctatggagatgggtcagcaaggatcttgcatgtgtacacacgggaggggttcagctttgaggcactgcctcctagagcgtcttgcgaaactccagctagtacaccggaggctcatgaacatgcgcccgctcacagtaacccttccgggagggccgctctcgccagtcaacttctggaccagagtgcacttagccctgccggcggctcagggccacagacatggtggcgaaggcggaggagatcaatcagcagagcgcgccaggtcgagctattgttagtggcggacgcatctatggctcgactatatgggcgtggcctccagcattatctactgaccctggcatccatagctaatagattgtacagccatgcctcaatagaaaaccacattcggttagccgtagtcaaggtagttgttttaggtgataaagacaagagcttggaagtgtctaagaacgcagcaaccaccctcaagaacttctgtaagtggcaacatcagcataaccaactgggcgacgaccacgaagaacactacgatgctgccatcttgttcacacgggaagacttatgtggacatcattcatgcgatacactgggcatggctgacgttggcacgatatgttctccagagcggagctgcgccgtcatcgaggatgacgggctccacgctgcatttacagtggctcacgaaattgggcatctgttgggactgagccacgacgactctaaattctgcgaggaaacttttggcagcaccgaggacaagaggctcatgtccagcatcctgaccagtatcgacgcctccaaaccctggagcaagtgcacatccgcaacaatcactgaatttctggacgacgggcacggcaactgtttactcgacttaccaagaaaacagattcttggccccgaagagttgccaggccagacctatgatgcaacgcagcagtgcaacctcactttcgggcccgagtatagtgtttgtcccggaatggacgtatgcgcccgactgtggtgcgcagtcgtgcgtcagggccagatggtgtgcctgaccaagaaactgcccgcagttgagggaacaccttgtgggaaaggtaggatttgtctgcagggtaaatgcgtcgacaagactaagaaaaagtattattctacttcatcccacggcaactgggggtcgtgggggtcgtggggtcagtgctcgaggtcgtgtggcgggggcgtgcagttcgcttaccgtcattgcaacaatcctgctcctaggaacaacgggcgctactgtacgggcaaaagggcaatctaccgtagctgctccctcatgccgtgccctccaaatggcaaatctttccgccatgaacagtgcgaggctaagaacgggtatcagtccgacgctaagggtgtcaagacatttgtggagtgggtaccaaagtatgcaggcgtccttcccgctgatgtctgtaaacttacctgtcgggccaaaggtaccgggtattacgtggtgttctcccccaaagtcaccgatggaaccgaatgtcgcctttatagcaattcagtctgcgtccggggaaagtgcgtgcggaccgggtgcgatggaataataggtagcaagctccagtacgacaagtgcggcgtgtgtgggggggacaatagtagttgtaccaaaattgtgggcacttttaacaaaaaatccaagggctacactgacgtggtcagaattcctgaaggggctacacacataaaggtccgccagtttaaggccaaagaccagaccagatttacagcataccttgcccttaagaagaaaaacggcgagtatctgattaacggcaagtacatgatctctaccagtgaaacaataattgatatcaatggtaccgtaatgaattacagcggttggtcgcacagggatgacttcctccatggaatgggctatagcgcaacgaaggagatcttgatcgttcagatactggccactgatcctactaaaccgctggatgtgcgctactctttttttgtgccgaagaaatcaacaccaaaagtgaattccgtgacctcgcacggctctaacaaggtaggcagccacacctcgcagcctcaatgggttaccggcccatggttggcgtgcagcagaacttgtgacacaggatggcatactcgtacggtgcagtgccaagatggcaacaggaaacttgctaagggttgtccactgtcacagaggccatctgccttcaagcagtgtctcctgaaaaagtgttag

SEQ ID NO: 169974 - DNA, 2793 bp, Artificial Sequence
  derived and/or modified sequence
atgctgctgggctgggccagcctgctgctgtgtgccttccggctgcccctggccgctgtgggccctgctgccaccccagcccaggacaaggccggccagcccccaacagctgctgctgctgcccagccccggcggcggcagggcgaggaggtgcaggagagagctgagcccccaggccacccccaccccctggcccagaggcggcgcagcaagggcctggtgcagaacatcgaccagctgtacagcggcggcggcaaggtgggctacctggtgtatgccggcggccgccgcttcctgctggacctggagagagatggctctgtgggcattgctggctttgtgcctgctgggggcggcaccagcgccccctggaggcacaggagccactgcttctaccggggcaccgtggatggcagccccaggagcctggccgtgtttgacctgtgtggcggcctggatggcttctttgctgtgaagcacgcccgctacaccctgaagcccctgctgcggggcccctgggccgaggaggagaagggccgggtgtatggagatggcagcgcccgcatcctgcacgtgtacacccgggagggcttctcctttgaggccctgcccccccgggccagctgtgagaccccagccagcaccccagaggcccatgaacatgccccagcccacagcaaccccagcggccgggccgccctggccagccagctgctggaccagagcgccctgagccctgctgggggcagcggcccccagacctggtggaggagaagaagaagaagcatcagccgggcccggcaggtggagctgctgctggtggctgatgcctccatggcccggctgtatggccggggcctgcagcactacctgctgaccctggccagcatcgccaacagactctacagccacgccagcattgagaaccacatccggctggccgtggtgaaggtggtggtgctgggggacaaggacaagagcctggaggtgtccaagaatgctgccaccaccctgaagaacttctgcaagtggcagcaccagcacaaccagctgggagatgaccacgaggagcactatgatgctgccatcctcttcacccgggaggacctgtgtggccaccacagctgtgacaccctgggcatggctgatgtgggcaccatctgcagccctgagaggagctgtgctgtgattgaagatgatggcctgcacgccgccttcaccgtggcccacgagatcggccacctgctgggcctgagccatgatgacagcaagttctgtgaggagaccttcggcagcacagaggacaagaggctgatgagcagcatcctgaccagcattgatgccagcaagccctggagcaagtgcaccagcgccaccatcacagagttcctggatgatggccacggcaactgcctgctggacctgcccaggaagcagatcctgggccctgaggagctgcccggccagacctatgatgccacccagcagtgcaacctgacctttggacctgagtacagcgtgtgccccggcatggatgtgtgtgcccggctgtggtgtgctgtggtgcggcagggccagatggtgtgcctgaccaagaagctgcctgctgtggagggcaccccctgtgggaagggccgcatctgcctgcagggcaaatgtgtggacaagaccaagaagaagtactacagcaccagcagccacggcaactggggctcctggggctcctggggccagtgcagccgcagctgtggcggcggcgtgcagtttgcctaccgccactgcaacaacccagcccccaggaacaacggccgctactgcaccgggaagagggccatctaccgcagctgcagcctgatgccctgcccccccaacgggaagagcttcagacatgagcagtgtgaggccaagaatggctaccagagtgatgccaagggcgtgaagacctttgtggagtgggtgcccaagtatgccggcgtgctgcctgcagatgtgtgcaagctgacctgccgggccaagggcaccggctactacgtggtgttcagccccaaggtgacagatggaacagaatgtcggctgtacagcaacagcgtgtgtgtgcggggcaaatgtgtgaggacaggctgtgatggcatcatcggcagcaagctgcagtatgacaagtgtggggtgtgtggcggggacaacagcagctgcaccaagatcgtgggcaccttcaacaagaagagcaagggctacacagatgtggtgcgcatccctgagggcgccacccacatcaaggtgcggcagttcaaggccaaggaccagacccgcttcaccgcctacctggccctgaagaagaagaatggagagtacctgatcaatggcaagtacatgatcagcaccagcgagaccatcatcgacatcaatggcaccgtgatgaactacagcggctggagccacagagatgacttcctgcacggcatgggctacagcgccaccaaggagatcctgattgtgcagatcctggccacagaccccaccaagcccctggatgtgcgctacagcttctttgtgcccaagaagagcacccccaaggtgaacagcgtgaccagccacggcagcaacaaggtgggcagccacaccagccagccccagtgggtgacaggcccctggctggcctgcagcaggacctgtgacaccggctggcacaccaggacagtgcagtgccaggacggcaacaggaagctggccaagggctgccccctgagccagaggcccagcgccttcaagcagtgcctgctgaagaagtgctag

SEQ ID NO: 169975 - DNA, 2793 bp, Artificial Sequence
  derived and/or modified sequence
atgctgctgggctgggccagcctgctgctgtgcgccttccggctgcccctggccgccgttggccctgccgccactcccgctcaggataaggccggtcagccacccaccgccgcagcagcagcgcaacccaggagacgccaaggcgaagaagttcaggaaagggctgaacctcctggccatccccatccactcgcgcagagacgccggagcaagggtctcgtccaaaacattgatcaactgtattccggaggagggaaggttgggtacttggtgtacgccgggggtcggcgcttcttgctggatcttgaaagagatggttctgtcggcatcgctggattcgtacctgccgggggtgggacgagtgccccctggaggcaccgaagccactgcttttacagagggacggtggatggctctccacgatctcttgccgtctttgatctttgcggcggactggacgggttctttgcggtgaaacatgctcggtacacactcaagcccttattgcgtggcccatgggcagaagaagaaaagggaagagtgtatggggatgggtccgctcgcatccttcacgtgtatacccgcgaaggcttctcctttgaggctctcccgcccagagcctcatgcgagacacccgcttccacccccgaggcccacgagcacgcacctgcacattccaatccctccggccgtgccgcccttgccagtcagctacttgaccaatctgcactgtcccctgccggtggctcaggtcctcaaacctggtggcgcaggcggcggcgatccatctcacgggctcgccaggtcgaactcctgctagtggcggatgcgtctatggcccgcctgtatgggaggggcctgcagcactacctactgaccctggcctccattgctaaccgactgtacagtcacgctagtatcgagaatcatatccggctggcagtcgtaaaagtggtcgtgctaggtgacaaagataaatctctggaagtgtccaagaacgccgctaccacccttaaaaacttctgcaaatggcagcatcagcataatcagctcggagacgatcatgaggagcactacgatgctgcgattctctttaccagggaagatctgtgcggccatcactcttgcgatacacttgggatggctgatgtcggaaccatctgttcgcccgaacgctcatgcgccgtcatcgaagatgatggcctgcacgccgcttttacagttgcccacgagatcggtcacctcctgggactgagccacgacgacagtaagttctgtgaggagacgttcggtagcacagaggacaaaagattgatgagctctatactgacaagcatcgatgcttcaaagccctggtccaaatgtacctccgccacaatcactgagttcctggatgacggccatggtaattgtctgctcgatcttccaagaaaacaaattctagggcctgaggaacttccgggccagacctacgatgctactcaacagtgcaacctaacgttcggaccagaatatagcgtctgtccagggatggatgtctgcgcgcggctgtggtgtgccgtcgtgaggcagggtcaaatggtatgcctgactaaaaaactccctgccgttgaaggaaccccctgcggtaagggccgcatttgccttcagggtaagtgcgttgacaagacgaagaaaaaatactacagtactagttcacatggcaactggggaagttggggcagctggggtcagtgctccagaagctgtggcggaggcgtccagtttgcctacagacactgtaacaaccctgcaccccgcaataacgggcgctactgcaccggtaagcgtgcaatctaccgtagctgttccctgatgccttgtccaccaaatggtaaaagttttcgccacgagcagtgtgaagctaagaacggttaccagtctgatgcaaagggggtgaaaactttcgttgagtgggtcccaaagtacgccggagtgctgcccgcagatgtctgtaaactcacatgccgggccaagggtaccggctattatgtggtgtttagcccaaaggtgaccgacggaaccgagtgccggctgtactctaattcagtctgcgtgcgaggaaagtgcgttcggaccggatgtgatgggataattgggagcaaactccaatatgataagtgtggggtttgtggtggagataactcctcctgtaccaagattgtcgggacatttaacaaaaagagtaaagggtatacagatgtggtgaggatccccgagggcgccacccatattaaggtgcgtcaattcaaggccaaggatcagacacggtttacggcgtacctcgcgttgaaaaaaaagaatggcgagtatttgattaatggaaaatacatgattagcacctcagagacaatcatcgacattaacggcactgtgatgaactatagcggatggagtcaccgggacgattttctccacggaatgggttactccgctactaaagagatcctgatagtccaaattttggctactgatcctactaagcctcttgacgtgcgatattcttttttcgtgcctaagaagtccacccctaaagttaacagtgttacaagccatggaagcaacaaagtaggcagccatacctcccaacctcagtgggtcactggaccttggttggcgtgcagtaggacttgcgacaccgggtggcacactaggacagtgcagtgccaagacggaaaccgaaaactagctaaaggctgccccctgagtcaacgcccgtctgcatttaagcagtgcttgttgaagaagtgttag

SEQ ID NO: 169976 - DNA, 2793 bp, Artificial Sequence
  derived and/or modified sequence
atgttattaggatgggcctcactcctgctgtgcgcctttcggcttccattggctgccgtgggccctgcagccaccccagcacaagacaaagctgggcagcctcctactgccgctgcagcagcccagcctaggcggagacagggggaggaagttcaggagcgtgctgagcctccgggtcacccccaccccctggcccagaggagacgctccaaggggctcgttcaaaatattgaccagctctactcaggcggaggcaaagtagggtatttggtgtacgccggaggacgccgatttctgctggacctggaacgggacggttctgtgggtattgctggtttcgtaccagctggaggtggaacatccgcaccatggaggcacaggagtcactgtttctacaggggtaccgttgacgggagtcctaggtccttggccgtctttgatttatgcggcggtcttgacggctttttcgcagtaaagcacgctcggtataccctgaagccgctcctaaggggcccttgggccgaggaggaaaaaggtcgagtttacggggatggatccgctagaattcttcacgtgtacaccagggaaggattcagtttcgaagccttgcccccaagagccagttgtgaaactcccgcttccacaccagaagcacacgaacacgccccagctcactcaaatccttctggtagagccgctttggcctcccagttgttggatcagtctgctctttcacctgccggaggttcaggaccacaaacctggtggaggagacgaaggagatccataagcagggcgcgacaggtagaactgctccttgttgctgacgccagtatggcacggctgtacggtcggggtctgcagcattaccttctgacccttgcatccattgcgaatcggctgtatagccacgcgagtattgagaaccacattaggcttgcggtggttaaggtggtcgtgctcggcgataaggacaagagcttggaggtgagcaagaatgctgctaccaccctgaaaaatttttgtaaatggcagcatcagcacaatcaactcggcgacgaccatgaagagcactacgacgccgcaattctctttactcgggaggacctgtgtgggcaccactcatgcgacactttgggaatggctgatgtgggaactatctgctccccagaacgctcttgcgccgtgattgaggacgatggactgcacgccgctttcacagtagcacatgagattggacacctgctggggctgtcacacgacgactctaagttctgtgaggagacctttgggagtacagaggataagaggctgatgtcctcaattttaacaagcatcgacgcctcgaagccttggtccaagtgcaccagcgcgacaatcaccgagtttcttgatgacggtcacggaaactgtctgttagatctgcccagaaagcagatcctgggcccagaagagctgcctggccagacctacgatgccacccaacaatgtaatttgaccttcggccctgagtactctgtgtgtccaggcatggatgtctgcgccagactgtggtgcgccgtcgtacgacaggggcagatggtttgtcttacaaaaaaattgccagcagtggaggggaccccctgcggcaaaggaagaatttgtttacagggtaaatgcgtagacaaaaccaaaaagaagtactactctacctcctcccatgggaactgggggtcctggggcagttggggccaatgcagcagaagttgcggaggcggagtgcagtttgcctatcgtcactgtaacaatccagccccaaggaacaatggtaggtactgtactgggaagcgggctatatatcgatcctgcagcctgatgccatgcccacctaacggcaaatcttttagacacgaacagtgcgaggccaagaacgggtaccagtctgatgctaagggggtgaaaacctttgtcgagtgggtgcctaagtacgcaggggttctgcctgcagacgtgtgtaaactcacatgccgcgctaagggaactgggtattatgttgtcttctcccctaaagtgactgacggaaccgaatgcagactttattctaacagtgtctgcgtgcgaggaaaatgcgtgcgtaccgggtgcgacggcatcatcggctctaagcttcaatacgacaaatgtggcgtgtgcggaggcgataactcttcttgtactaagatcgtgggtacctttaacaaaaaaagcaagggttataccgatgtggtgcggataccagagggtgccacgcacattaaggtaagacagttcaaggcaaaggatcagaccaggtttaccgcgtacctggcgctcaaaaagaagaacggcgagtacttaattaacggcaagtacatgatctcaaccagtgagacgatcatagacataaatggcacggtgatgaactattcagggtggtcccacagggacgactttttgcacggtatgggttacagcgcaactaaggaaattttgattgtgcagatactagctactgatcccacgaagcccctggacgtgagatattccttctttgtgcccaaaaaaagtactcctaaggtcaactcagtgacttcacatggcagtaacaaggttgggtcacacacatcccaaccacagtgggtaactgggccttggctggcctgctctcgcacatgcgacacgggctggcacactcgtaccgtccaatgtcaagacggtaaccggaaactggcgaagggatgtcctctgtcacagcgtccaagcgcttttaagcagtgcctcctgaaaaaatgttag

SEQ ID NO: 169977 - DNA, 2793 bp, Artificial Sequence
  derived and/or modified sequence
atgctgctgggctgggccagcctgctgctgtgcgccttcagactgcccctggccgccgtgggccccgccgccacccccgcccaggacaaggccggccagccccccaccgccgccgccgccgcccagcccagaagaagacagggcgaggaggtgcaggagagagccgagccccccggccacccccaccccctggcccagagaagaagaagcaagggcctggtgcagaacatcgaccagctgtacagcggcggcggcaaggtgggctacctggtgtacgccggcggcagaagattcctgctggacctggagagagacggcagcgtgggcatcgccggcttcgtgcccgccggcggcggcaccagcgccccctggagacacagaagccactgcttctacagaggcaccgtggacggcagccccagaagcctggccgtgttcgacctgtgcggcggcctggacggcttcttcgccgtgaagcacgccagatacaccctgaagcccctgctgagaggcccctgggccgaggaggagaagggcagagtgtacggcgacggcagcgccagaatcctgcacgtgtacaccagagagggcttcagcttcgaggccctgccccccagagccagctgcgagacccccgccagcacccccgaggcccacgagcacgcccccgcccacagcaaccccagcggcagagccgccctggccagccagctgctggaccagagcgccctgagccccgccggcggcagcggcccccagacctggtggagaagaagaagaagaagcatcagcagagccagacaggtggagctgctgctggtggccgacgccagcatggccagactgtacggcagaggcctgcagcactacctgctgaccctggccagcatcgccaacagactgtacagccacgccagcatcgagaaccacatcagactggccgtggtgaaggtggtggtgctgggcgacaaggacaagagcctggaggtgagcaagaacgccgccaccaccctgaagaacttctgcaagtggcagcaccagcacaaccagctgggcgacgaccacgaggagcactacgacgccgccatcctgttcaccagagaggacctgtgcggccaccacagctgcgacaccctgggcatggccgacgtgggcaccatctgcagccccgagagaagctgcgccgtgatcgaggacgacggcctgcacgccgccttcaccgtggcccacgagatcggccacctgctgggcctgagccacgacgacagcaagttctgcgaggagaccttcggcagcaccgaggacaagagactgatgagcagcatcctgaccagcatcgacgccagcaagccctggagcaagtgcaccagcgccaccatcaccgagttcctggacgacggccacggcaactgcctgctggacctgcccagaaagcagatcctgggccccgaggagctgcccggccagacctacgacgccacccagcagtgcaacctgaccttcggccccgagtacagcgtgtgccccggcatggacgtgtgcgccagactgtggtgcgccgtggtgagacagggccagatggtgtgcctgaccaagaagctgcccgccgtggagggcaccccctgcggcaagggcagaatctgcctgcagggcaagtgcgtggacaagaccaagaagaagtactacagcaccagcagccacggcaactggggcagctggggcagctggggccagtgcagcagaagctgcggcggcggcgtgcagttcgcctacagacactgcaacaaccccgcccccagaaacaacggcagatactgcaccggcaagagagccatctacagaagctgcagcctgatgccctgcccccccaacggcaagagcttcagacacgagcagtgcgaggccaagaacggctaccagagcgacgccaagggcgtgaagaccttcgtggagtgggtgcccaagtacgccggcgtgctgcccgccgacgtgtgcaagctgacctgcagagccaagggcaccggctactacgtggtgttcagccccaaggtgaccgacggcaccgagtgcagactgtacagcaacagcgtgtgcgtgagaggcaagtgcgtgagaaccggctgcgacggcatcatcggcagcaagctgcagtacgacaagtgcggcgtgtgcggcggcgacaacagcagctgcaccaagatcgtgggcaccttcaacaagaagagcaagggctacaccgacgtggtgagaatccccgagggcgccacccacatcaaggtgagacagttcaaggccaaggaccagaccagattcaccgcctacctggccctgaagaagaagaacggcgagtacctgatcaacggcaagtacatgatcagcaccagcgagaccatcatcgacatcaacggcaccgtgatgaactacagcggctggagccacagagacgacttcctgcacggcatgggctacagcgccaccaaggagatcctgatcgtgcagatcctggccaccgaccccaccaagcccctggacgtgagatacagcttcttcgtgcccaagaagagcacccccaaggtgaacagcgtgaccagccacggcagcaacaaggtgggcagccacaccagccagccccagtgggtgaccggcccctggctggcctgcagcagaacctgcgacaccggctggcacaccagaaccgtgcagtgccaggacggcaacagaaagctggccaagggctgccccctgagccagagacccagcgccttcaagcagtgcctgctgaagaagtgctag

SEQ ID NO: 169978 - protein, 756 aa, Artificial Sequence
  derived and/or modified sequence
MDNITRQNQFYDTQVIKQENESGYERRPLEMEQQQAYRPEMKTEMKQGAPTSFLPPEASQLKPDRQQFQSRKRPYEENRGRGYFEHREDRRGRSPQPPAEEDEDDFDDTLVAIDTYNCDLHFKVARDRSSGYPLTIEGFAYLWSGARASYGVRRGRVCFEMKINEEISVKHLPSTEPDPHVVRIGWSLDSCSTQLGEEPFSYGYGGTGKKSTNSRFENYGDKFAENDVIGCFADFECGNDVELSFTKNGKWMGIAFRIQKEALGGQALYPHVLVKNCAVEFNFGQRAEPYCSVLPGFTFIQHLPLSERIRGTVGPKSKAECEILMMVGLPAAGKTTWAIKHAASNPSKKYNILGTNAIMDKMRVMGLRRQRNYAGRWDVLIQQATQCLNRLIQIAARKKRNYILDQTNVYGSAQRRKMRPFEGFQRKAIVICPTDEDLKDRTIKRTDEEGKDVPDHAVLEMKANFTLPDVGDFLDEVLFIELQREEADKLVRQYNEEGRKAGPPPEKRFDNRGGGGFRGRGGGGGFQRYENRGPPGGNRGGFQNRGGGSGGGGNYRGGFNRSGGGGYSQNRWGNNNRDNNNSNNRGSYNRAPQQQPPPQQPPPPQPPPQQPPPPPSYSPARNPPGASTYNKNSNIPGSSANTSTPTVSSYSPPQPSYSQPPYNQGGYSQGYTAPPPPPPPPPAYNYGSYGGYNPAPYTPPPPPTAQTYPQPSYNQYQQYAQQWNQYYQNQGQWPPYYGNYDYGSYSGNTQGGTSTQ

SEQ ID NO: 169979 - protein, 856 aa, Artificial Sequence
  derived and/or modified sequence
MDVRRLKVNELREELQRRGLDTRGLKAELAERLQAALEAEEPDDERELDADDEPGRPGHINEEVETEGGSELEGTAQPPPPGLQPHAEPGGYSGPDGHYAMDNITRQNQFYDTQVIKQENESGYERRPLEMEQQQAYRPEMKTEMKQGAPTSFLPPEASQLKPDRQQFQSRKRPYEENRGRGYFEHREDRRGRSPQPPAEEDEDDFDDTLVAIDTYNCDLHFKVARDRSSGYPLTIEGFAYLWSGARASYGVRRGRVCFEMKINEEISVKHLPSTEPDPHVVRIGWSLDSCSTQLGEEPFSYGYGGTGKKSTNSRFENYGDKFAENDVIGCFADFECGNDVELSFTKNGKWMGIAFRIQKEALGGQALYPHVLVKNCAVEFNFGQRAEPYCSVLPGFTFIQHLPLSERIRGTVGPKSKAECEILMMVGLPAAGKTTWAIKHAASNPSKKYNILGTNAIMDKMRVMGLRRQRNYAGRWDVLIQQATQCLNRLIQIAARKKRNYILDQTNVYGSAQRRKMRPFEGFQRKAIVICPTDEDLKDRTIKRTDEEGKDVPDHAVLEMKANFTLPDVGDFLDEVLFIELQREEADKLVRQYNEEGRKAGPPPEKRFDNRGGGGFRGRGGGGGFQRYENRGPPGGNRGGFQNRGGGSGGGGNYRGGFNRSGGGGYSQNRWGNNNRDNNNSNNRGSYNRAPQQQPPPQQPPPPQPPPQQPPPPPSYSPARNPPGASTYNKNSNIPGSSANTSTPTVSSYSPPQPSYSQPPYNQGGYSQGYTAPPPPPPPPPAYNYGSYGGYNPAPYTPPPPPTAQTYPQPSYNQYQQYAQQWNQYYQNQGQWPPYYGNYDYGSYSGNTQGGTSTQ

SEQ ID NO: 169980 - protein, 518 aa, Artificial Sequence
  derived and/or modified sequence
MAFWAGGSPSVVDYFPSEDFYRCGYCKNESGSRSNGMWAHSMTVQDYQDLIDRGWRRSGKYVYKPVMNQTCCPQYTIRCRPLQFQPSKSHKKVLKKMLKFLAKGEVPKGSCEDEPMDSTMDDAVAGDFALINKLDIQCDLKTLSDDIKESLESEGKNSKKEEPQELLQSQDFVGEKLGSGEPSHSVKVHTVPKPGKGADLSKPPCRKAKEIRKERKRLKLMQQNPAGELEGFQAQGHPPSLFPPKAKSNQPKSLEDLIFESLPENASHKLEVRLVPVSFEDPEFKSSFSQSFSLYVKYQVAIHQDPPDECGKTEFTRFLCSSPLEAETPPNGPDCGYGSFHQQYWLDGKIIAVGVIDILPNCVSSVYLYYDPDYSFLSLGVYSALREIAFTRQLHEKTSQLSYYYMGFYIHSCPKMKYKGQYRPSDLLCPETYVWVPIEQCLPSLENSKYCRFNQDPEAVDEDRSTEPDRLQVFHKRAIMPYGVYKKQQKDPSEEAAVLQYASLVGQKCSERMLLFRN

SEQ ID NO: 169981 - DNA, 1557 bp, Artificial Sequence
  derived and/or modified sequence
atggccttctgggccggcggcagccccagcgtggtggactacttccccagcgaggacttctacagatgcggctactgcaagaacgagagcggcagcagaagcaacggcatgtgggcccacagcatgaccgtgcaggactaccaggacctgatcgacagaggctggagaagaagcggcaagtacgtgtacaagcccgtgatgaaccagacctgctgcccccagtacaccatcagatgcagacccctgcagttccagcccagcaagagccacaagaaggtgctgaagaagatgctgaagttcctggccaagggcgaggtgcccaagggcagctgcgaggacgagcccatggacagcaccatggacgacgccgtggccggcgacttcgccctgatcaacaagctggacatccagtgcgacctgaagaccctgagcgacgacatcaaggagagcctggagagcgagggcaagaacagcaagaaggaggagccccaggagctgctgcagagccaggacttcgtgggcgagaagctgggcagcggcgagcccagccacagcgtgaaggtgcacaccgtgcccaagcccggcaagggcgccgacctgagcaagcccccctgcagaaaggccaaggagatcagaaaggagagaaagagactgaagctgatgcagcagaaccccgccggcgagctggagggcttccaggcccagggccacccccccagcctgttcccccccaaggccaagagcaaccagcccaagagcctggaggacctgatcttcgagagcctgcccgagaacgccagccacaagctggaggtgagactggtgcccgtgagcttcgaggaccccgagttcaagagcagcttcagccagagcttcagcctgtacgtgaagtaccaggtggccatccaccaggacccccccgacgagtgcggcaagaccgagttcaccagattcctgtgcagcagccccctggaggccgagaccccccccaacggccccgactgcggctacggcagcttccaccagcagtactggctggacggcaagatcatcgccgtgggcgtgatcgacatcctgcccaactgcgtgagcagcgtgtacctgtactacgaccccgactacagcttcctgagcctgggcgtgtacagcgccctgagagagatcgccttcaccagacagctgcacgagaagaccagccagctgagctactactacatgggcttctacatccacagctgccccaagatgaagtacaagggccagtacagacccagcgacctgctgtgccccgagacctacgtgtgggtgcccatcgagcagtgcctgcccagcctggagaacagcaagtactgcagattcaaccaggaccccgaggccgtggacgaggacagaagcaccgagcccgacagactgcaggtgttccacaagagagccatcatgccctacggcgtgtacaagaagcagcagaaggaccccagcgaggaggccgccgtgctgcagtacgccagcctggtgggccagaagtgcagcgagagaatgctgctgttcagaaactag

SEQ ID NO: 169982 - DNA, 1557 bp, Artificial Sequence
  derived and/or modified sequence
atggccttctgggcgggcggttccccatcagtcgtggattacttcccctcggaggacttttaccgttgtggttactgcaaaaatgaatcaggatcgaggtcaaacggcatgtgggctcactctatgaccgtgcaggattaccaggatcttatcgaccgcggctggcggaggtctgggaaatacgtttataagccagtaatgaaccagacctgctgcccccaatacacaataaggtgtcggcctttgcagtttcagcccagtaagagtcacaaaaaagtgttaaaaaaaatgctgaagttccttgccaaaggggaagttcccaaaggatcgtgtgaagatgagccaatggactcaacaatggatgacgctgtggccggtgattttgccctgatcaataaacttgatattcagtgcgacctaaagaccttgagtgacgatattaaggaaagtctggagagtgaggggaagaacagtaagaaagaggaaccacaagaactgctacagtcccaagattttgtgggcgaaaaacttggatcaggcgagccctcccactccgtgaaagtccacaccgtgcctaagcctggaaaaggggctgacctctcgaagcctccttgcaggaaagcgaaggaaatacgcaaagagaggaagcggctcaagctgatgcagcagaatcctgcaggagaactggaaggtttccaggctcagggacatccgccctccctttttcctcctaaagcgaaatcaaaccagcccaaatccctcgaggatcttatattcgagagcttgcccgagaacgcctcacacaagctagaggtgaggctagttccagtatcttttgaagatccagaatttaagtcctccttttctcaaagtttctcattgtatgtgaaatatcaggtggcaatccaccaggacccacctgacgaatgcgggaagaccgagttcacgcggttcctctgtagctctcctttggaagccgaaacgcctcccaacggaccagactgtggatacggatcttttcaccagcagtactggctcgatggaaaaataatcgccgtcggcgttatcgatatcttacctaattgcgtgtctagcgtgtatctctactacgatcccgattactcattcctttctctgggggtctacagcgccctccgagaaatcgcattcacacgccaactgcacgaaaaaacctcccagctatcctattattatatgggcttttacatacattcttgtccaaagatgaagtataagggccaataccggcccagcgatttgttgtgtcctgaaacttacgtgtgggtacctatcgagcagtgcctcccctccctcgagaattccaagtactgcagattcaatcaggaccccgaagcagtcgatgaagatcgaagtacagaacctgatcggctgcaggtgtttcacaagcgagccatcatgccctacggagtgtacaaaaaacagcagaaggatcctagcgaggaagccgcagttctacaatacgcgagcctggtgggtcaaaagtgttccgaacgcatgctacttttccgcaactag

SEQ ID NO: 169983 - DNA, 4900 bp, Artificial Sequence
  derived and/or modified sequence
cgggcggcgcgctgcattgtggggtggcggcggcggccgcgctagcgacgcggggccgggcggctgagcgttcgcggggccgaggccatggctttctgggcggggggttcgcccagcgtcgtggactatttccctagcgaggacttctaccgctgcggctactgcaagaacgagtcgggcagccgctccaatggcatgtgggcacattccatgacagtacaggattatcaggatctcatagaccgaggatggcgaagaagtggaaaatatgtgtacaaacctgtcatgaatcaaacatgttgtcctcagtacacaataaggtgccgacctttacaatttcagccttcaaaatctcacaagaaggttttgaaaaaaatgttgaaatttctagctaaaggggaggttcccaaaggaagttgtgaggatgagcccatggattccacaatggatgatgctgttgcgggtgactttgcattgataaataaactggatatacagtgtgatcttaaaacactcagtgatgacatcaaagagagtttagagagtgaaggaaaaaattcaaagaaagaagaacctcaggaattacttcagtcacaagatttcgtaggagagaagttgggctctggtgaaccgtcacattcagttaaagttcacacagttcctaagccaggcaaaggggctgatttgagtaagcctccatgtcgaaaagcaaaggaaatccggaaagaaaggaaaaggttaaaactaatgcagcagaacccagctggagaacttgagggtttccaggctcaaggtcacccaccatctttgtttccaccaaaggctaaatccaaccagccaaaatcactcgaagatttaatttttgagtctttaccagagaatgcatcacacaagttagaggtgaggttagtacctgtctcctttgaggacccagagttcaagtcgtctttcagccagtccttttctttgtatgtcaagtatcaagtggccatacaccaggatccacccgatgaatgtgggaagactgagttcacaagattcctttgcagttcacccttggaggcagagactccccctaatgggccagattgtggctatggctcctttcaccagcagtactggcttgacggaaagatcattgctgtgggggtgattgacatcctcccaaactgtgtatcatctgtgtatttgtactacgatcctgattattcgtttttgtctttgggcgtctactctgcactacgagaaattgcttttactaggcagcttcatgagaaaacttctcaactcagctattattatatgggtttctacattcattcatgtcccaagatgaaatataagggtcagtatagaccttctgatttgctgtgccctgagacatatgtttgggtacccattgagcaatgcctgccttcacttgaaaactccaagtactgccgtttcaaccaggacccagaagcagtggatgaggatcgcagtacggaacctgaccgattgcaggtgtttcacaagagagccatcatgccttacggtgtttataagaaacagcagaaagacccaagtgaggaggctgctgttctgcagtacgccagcctggtggggcagaagtgctccgagcggatgctgctgttcagaaactgacctgttcacctctgccgggaagttcctgtgttgtgctgatgatttgtgccaggatacatattcagtacctgtggggaaataactgtcaccacccacaaattagacattttttattttgactatctatggcttttaaaaaatattttgtggcaatgtatctgtgagaatctcatagttaatataaagattttaaaactgcattatgacctagcccccataattgggatttatcattttggaggattctttctagagcaagatacgctcaaattctcctgtttgtattttgtaaaatgaagaagtgaatctaagtaacttaatcacagttgtgcattttttttggttctgttagagaaattaaaacagactgtttcctcaggcccattttaaactgaacttatgctaggaaaccttaagtatggggaaggtagaaagttcatttcatcacttagaaaatatgtcttctcaagaacaaaactgtgctgttacaactcagtgttcaatgtgaaattgctgccaaatgttatgtagtttaatagagaacttgaaaaaataaaacattaaaatggagcttgtgttagcatcaggtatccatttgttcaggacagtcctgttcatgtctgttgtcttggcatagttttttcccctagaatatagtactcccttttactctaaaaaatatcccagtttggacaataaaatacataattactctagttatattatttgctttacttctaaaaatgtaagaaattgaatttttttaaagaaaaatgttggttcctgccttgatctaagtctcatccaaaggaaataaatagtcactagttttttatcttacaactcaggacatttgtctttggttattaatggaaattagtatgtgattactttcatagttatgccacaaatcacattgaagaaggaatcattccgacctctgttccaggacaagagctagaacaatccatttcttgtcctttgatttgagagtcacagtcagggtggcttctgccacccttagtaactcagagcagaggccagccccctccttccctcactttcttttgctgagtcctttgcccacctgtcaaggtggcaggcactgtgctgggtacaggaggacagtcagacatgtcccttcttagctatagtcgagctgtctgggaaacaggatgaaaaacaggagggttattttcttgtgccctctttgtcagctgatcccctcttctgctaccagctatttggccagcaagccgtttttagtccccactttgcccatttttctgttttggttcatcgtttcttaaaagccatgttataaaacatggtagtttgaatcctgttgctaattttaaactttcctctaaaatgtactgaattttgacaaaaatttgaaaatatcctcagctaactagaataaaaaggatcataaaacaatgattttaaaactgaaatctctagaaactcaacatccaagtcagccgcatttcttcattcagagtgtgtgtgtcacacctgccaaggtgctgcgtactctgctaaccgagctagagtagtgagcaaagccattttctctgatcacaagattttacatttttctgggattttgacctgcaaagtagtctcgtaagagcatttgagagacttacttggaactgccttcagaatctatagagccttttttctctttttcctctaaaatgaaaagagcttcattttatgattataacaaaagtgacactgtaagcagttagaacattaagaagtataaataaaaagtaaaaatcatctacaaccctaccatactcagaaggagaaaagaactgtcatgtatgtatacacacatacctatgtaattttaatataaatagaattatgttctacatgctgttttatttcctcaacagtaaattatggacatgtctgaaatgtgaaataaatttcaaaataaggcttcagaaagtgtagtaagtaatctctgcattattaaaaataagcagggtagggctggtacttggctcgcttagcatttgaatgtccaacttggtgttatcactgtatcttccctccatttgtctttgtgattagcatgtaaaatggtattcataaagatcacaacccttgaatatcagatgaagagaaaacttgactccaacatcttaccacaactctggtttcttcctgcagaattcattttcagaggaaaatgatgaatcatccctgtctgtgaaccactgtgctttccttgagggtggcattgtaggttgacaccagcaaagactcagagtgacttgagcattggagatccttctacttggctgctgtattcatgcattatgttggtttgagaatagctagtgtattgatccaagtagtcaaagtgtcttaaaaggacacctatttgtccttttgagccccagctgagtgaatactgatagtggactagaaaagcatagtcaagaaaagtgacccaccttgttacttgaccagcagtctagctgagagatctgattttatgttcgtaactttctgtaaagaaagacacaaggacttttcaaagacagtttatatctttccaaggcaggaagctttgcatttgcaatcttagtgttgtgtccctttctgattttcaaatacatcacacctgccttcctgttttgggagcaaagatgtaatttcaattccccttgctaccgtccttatttaaattatttccattctaagagatttttgttatttttttaaatgtaatctgagcacttttttgtattctaaaagatagatgatatcagataaatatgttgtacatttgattaaaattatttagataaatattactatgttgacttttaaatagctttatcctatttttcattcattttgcaaatatttgttgtgtgtagtttcttaacgtgtcagaatctattatgtaaaagaacctttccagatttctgaacagtatatgctttgattttataggctttatattatttcagtatgaataaagataaggaatatgaaacagttaactaaaatgtatctgtcgttgctaacttgaaaaatgaagtagaaacagttggaaaatgtttgaattagaagttattcaagtgcacactcttttctaaaagaaagccaatgactataaggcaaaagaagtttgactgcatgtggtattttttgctcttgtatatgctttttgaacaagctatttgataaagcctgaatggaaaaaataaagctgtttctatctgca

SEQ ID NO: 169984 - DNA, 1557 bp, Artificial Sequence
  derived and/or modified sequence
atggccttctgggccggcggcagccccagcgtggtggactacttccccagcgaggacttctaccgctgtggctactgcaagaatgaaagtggcagccgcagcaatggcatgtgggcccacagcatgacagtgcaggactaccaggacctgattgaccggggctggaggagaagtggcaagtatgtgtacaagcctgtgatgaaccagacctgctgcccccagtacaccatccgctgccggcccctgcagttccagcccagcaagagccacaagaaggtgctgaagaagatgctgaagttcctggccaagggggaggtgcccaagggcagctgtgaagatgagcccatggacagcaccatggatgatgctgtggccggggactttgccctgatcaacaagctggacatccagtgtgacctgaagaccctgagtgatgacatcaaggagagcctggagagcgagggcaagaacagcaagaaggaggagccccaggagctgctgcagagccaggactttgtgggggagaagctgggcagcggggagcccagccacagcgtgaaggtgcacacagtgcccaagccaggaaaaggagctgacctgagcaagccaccctgcaggaaggccaaggagatcaggaaggagaggaagaggctgaagctgatgcagcagaacccagctggggagctggagggcttccaggcccagggccacccccccagcctcttcccccccaaggccaagagcaaccagcccaagagcctggaggacctgatctttgagagcctgcctgaaaatgccagccacaagctggaggtgcggctggtgcctgtgtcctttgaggaccctgagttcaagagcagcttcagccagagcttcagcctgtatgtgaagtaccaggtggccatccaccaggaccccccagatgaatgtgggaagacagagttcacccgcttcctgtgcagcagccccctggaggccgagaccccaccaaatggaccagactgtggctacggcagcttccaccagcagtactggctggatggcaagatcatcgctgtgggcgtcatcgacatcctgcccaactgtgtgtcctctgtgtacctgtactatgaccctgactacagcttcctgagcctgggcgtgtacagcgccctgcgggagatcgccttcacccggcagctgcacgagaagaccagccagctgagctactactacatgggcttctacatccacagctgccccaagatgaagtacaagggccagtaccggcccagcgacctgctgtgcccagagacctacgtgtgggtgcccatcgagcagtgcctgcccagcctggagaacagcaagtactgccgcttcaaccaggaccctgaggccgtggatgaggacaggagcacagagccagaccggctgcaggtgttccacaagagggccatcatgccctacggcgtgtacaagaagcagcagaaggaccccagcgaggaggccgctgtgctgcagtatgccagcctggtgggccagaagtgcagcgagaggatgctgctcttcagaaattag

SEQ ID NO: 169985 - DNA, 1557 bp, Artificial Sequence
  derived and/or modified sequence
atggccttctgggccggcggcagccccagcgtggtggactacttccccagcgaggacttctacaggtgtgggtactgtaagaatgaaagcggttcgcggtccaacggcatgtgggcacacagcatgactgttcaggattatcaggatctcatcgataggggctggcgcagaagtgggaagtacgtatacaagccagtgatgaatcagacttgctgcccgcagtacactatccgatgccggcctctccagtttcagcctagtaagagccacaagaaggtgttgaagaagatgttgaagtttctcgcaaagggtgaagtgccgaaaggttcttgcgaagatgaacctatggattccactatggatgacgccgtggctggcgattttgcccttataaacaaacttgatattcaatgtgacttaaagaccttgtccgacgacatcaaggagtccctggagagtgagggcaagaatagcaaaaaggaggaacctcaggagttgctacagtcacaggattttgtcggggagaaacttggcagtggggagccctcccattcagttaaagtccacaccgtccccaagccggggaagggtgccgacctgagtaaaccaccctgcaggaaagctaaagagattcgcaaggaacgcaaaagactcaaactcatgcagcagaatcccgctggtgaactggaggggttccaggctcaagggcatcctccctccctgtttccaccaaaagccaagtcaaaccagcccaagtctctggaggatcttatatttgagtccctgccggagaacgctagccacaaattggaggtgcgcctcgtcccagtgagctttgaagatcccgagttcaaaagttcattttctcagagcttctcactgtacgtgaagtaccaggttgccattcaccaggatccacccgacgagtgtgggaaaactgagtttacgcgctttctgtgttccagtccactcgaagcggaaacaccacctaacggccccgactgcgggtacggaagctttcatcagcagtattggttggacggaaagattattgctgtgggcgtgatcgacatattacccaactgtgttagttctgtttatctgtactacgaccccgattatagctttctaagccttggcgtgtactccgccctgagggagatagccttcactaggcagctacacgagaaaacctcacagctgagctactactatatggggttttacattcactcctgccccaaaatgaaatataaggggcagtacagacccagcgatctgctttgcccggagacatatgtctgggttccaattgaacagtgcttaccatcactagagaactccaagtactgtagattcaaccaggatccagaggctgtcgatgaggatcggagtacggagcctgaccggctccaggtatttcataagcgggctatcatgccatacggcgtatacaaaaagcagcagaaggacccctccgaggaagccgctgtactgcagtacgctagcctcgtgggacagaaatgctcagaaaggatgctgctgtttcggaactag

SEQ ID NO: 169986 - DNA, 1557 bp, Artificial Sequence
  derived and/or modified sequence
atggccttctgggcaggagggtcccctagtgtggttgattacttcccatctgaggacttttatcgatgtggttattgcaaaaacgagtcaggttcacgctctaacggcatgtgggcccattccatgaccgtgcaagattatcaggacctcatcgaccgcggatggcggagaagcggtaagtacgtatataaaccagtaatgaaccagacttgctgcccccagtacacgattcggtgccggcctctgcaatttcaacctagtaagtcccacaagaaagttttaaaaaagatgttaaaattccttgccaaaggagaagtgcccaaaggttcatgtgaagacgaacctatggatagcactatggatgacgccgtcgccggtgattttgctctcattaataagctcgatattcaatgtgatctgaaaacactctccgatgacataaaggaaagtttggagagcgaggggaagaattcgaagaaggaggagccccaggagctgctgcaatcccaggattttgtaggagagaaactgggctccggggagccatcccattcagttaaagtgcataccgtgcctaagccaggcaaaggagccgacctgtcaaagcccccttgtcgcaaggcgaaggaaataagaaaagagcggaagagactgaagttgatgcagcaaaacccggctggagagctggaagggtttcaagcacaaggtcaccctccaagcctttttcctcccaaagctaaaagcaatcagcctaagtctctggaggacctaatcttcgagagcctgccggaaaacgcctcacataaactcgaagtccgactggtacccgtctcatttgaagaccctgaattcaagtcctcattctcccaatccttcagtctctacgtcaaatatcaagtggctattcatcaggacccgcctgatgagtgcggcaaaacagaattcactagatttttgtgtagctcccccttggaagccgaaactccccctaatggacccgattgtggctatggcagctttcaccagcaatactggctcgatggaaaaattatcgctgttggcgtgatcgacatactgccaaattgtgtgtcctctgtgtacctctattacgatccagactacagctttctgtctcttggcgtgtacagcgctttgcgcgagatcgcgttcacacgccagctgcacgagaagacttcgcagcttagctattactatatgggtttttatatccatagctgccctaagatgaagtacaagggacagtataggcccagcgacctgctctgcccggagacgtatgtgtgggtgccgatcgagcagtgcttaccatctctcgagaatagcaagtactgtcggttcaaccaagatcctgaagccgtggatgaggatcggagcacagaacctgaccggctgcaagtgtttcataaacgggctatcatgccatacggcgtgtataaaaagcagcagaaggatcccagcgaggaggccgcagtgttgcagtacgcaagcttagtgggccagaagtgtagtgaaagaatgctcctgttccgtaactag

SEQ ID NO: 169987 - protein, 399 aa, Artificial Sequence
  derived and/or modified sequence
MAATAAAVVAEEDTELRDLLVQTLENSGVLNRIKAELRAAVFLALEEQEKVENKTPLVNESLKKFLNTKDGRLVASLVAEFLQFFNLDFTLAVFQPETSTLQGLEGRENLARDLGIIEAEGTVGGPLLLEVIRRCQQKEKGPTTGEGALDLSDVHSPPKSPEGKTSAQTTPSKIPRYKGQGKKKTSGQKAGDKKANDEANQSDTSVSLSEPKSKSSLHLLSHETKIGSFLSNRTLDGKDKAGLCPDEDDMEGDSFFDDPIPKPEKTYGLRKEPRKQAGSLASLSDAPPLKSGLSSLAGAPSLKDSESKRGNTVLKDLKLISDKIGSLGLGTGEDDDYVDDFNSTSHRSEKSEISIGEEIEEDLSVEIDDINTSDKLDDLTQDLTVSQLSDVADYLEDVA

SEQ ID NO: 169988 - DNA, 3871 bp, Artificial Sequence
  derived and/or modified sequence
cgccgaccctaagtttcggcgctcagtggtccggcgctccccaaggctcggtgtccagcgtcaaccccgaggtctctatgccccgcctcccgacgccagggggcagggccagcgcgctgcgcgtcggggcggggctttggctgcgtcggccgcgtagcccgcgcgcggagcgtaccctgctgcggccgttggccgttagcgcggcttcggcggttgtcttggagaagcaagatggcggcgacggcggccgcagtggtggccgaggaggacacggagctgcgggacctgctggtgcagacgctggagaacagcggggtcctgaaccgcatcaaggctgaactccgagcagctgtgtttttagcactagaggagcaagaaaaagtagagaacaaaactcctttagttaatgagagcctgaaaaagtttttaaataccaaagacggtcgtttagtggctagtcttgttgcagaatttcttcagttttttaaccttgactttactttggctgtttttcaacctgaaactagcacactgcaaggtctcgaaggtcgagagaatttagcccgagatttaggtataattgaagcagaaggtactgtgggtggacccttattattagaagtgatcaggcgctgtcaacagaaagaaaaagggccaaccactggggaaggtgcacttgatctatctgatgtacattctccaccaaagtcaccagagggaaaaacaagtgcacagacaacaccaagtaagataccaaggtataaaggacaaggtaagaagaagacaagcgggcagaaggctggtgacaagaaggccaatgatgaggccaatcagagtgatacaagtgtctccttgtcagaacccaagagcaaaagcagccttcacttactgtcccatgaaacaaaaattggatcttttctaagcaacagaactttagatggcaaagacaaagctggcctttgtccagatgaagatgatatggaaggagattctttctttgatgatcccattcctaagccagagaaaacttacggtttgaggaaggaacctaggaagcaagcaggaagtctggcctcgctctcggatgcaccccccttaaaaagtggactcagctccctggcgggagccccttctttaaaagactctgagagtaaaaggggaaatacagttttgaaagatctgaaattgatcagtgataaaattggatcacttggattaggaactggagaagatgatgactatgttgatgattttaatagtaccagccatcgctcagagaaaagtgagataagtattggtgaagagatagaagaagacctttctgtggaaatagatgacatcaataccagtgataagcttgatgacctcacacaagatctgactgtatcccagctcagtgatgttgcggattatctggaagatgttgcatagacacgaagaaggaagtattctaattaacaaggacagaggactgaccggttccattttttttttttccagacaatcactcagctggaatgtctgctctctattggtgccttgcatttcaaaaacactgcagatattttttaaaagtaattttcattttactaaacaaaatacttcctatttgagcccatgtgtggaagatttaatattcttaatttaactgtacatttctttatggaaattgattatctacactcagtttcattacagggaaggaacccatgaaaacatcagtgttaagagcatgatgaaaggtgtcaataaagccgtaggatcgcgcaaccctttgtgtgtgtggctgctggtacgtgtgatctttgaaaaccttggctttagccctctggaatcagagcttacccaccatagtatattttgatattaggtggttctacacatagttggcaaaatgacttggtaaatttgtaatgctgaagtatattagtataagttaaatttgatgtgtcaactttattttgtatttccttccatttggaaggtttgttagaccattaaggttatattaaagtactcttgtgtgtgctatttagttttgcttgttttaaagaaatctagaagtggttatgagttttaattcatagaattgtcaataacataacatttgcaatcgtcattcctcctgttatccatgtaagcagctttagtcgtaggttctcttcattataatttattatctgtaaagattccttgaaacttaaatgcatctgaaaccattaagcagtgcttttatttcagatctgtaagttaattgtattaaaatccaaattggaatgaaatagtagtaatggcctaagaccatgttcagtttgacaagctttatatactgtacataatttcattgtaacccttaaaaatagagccaataatagaatttccacagtctcatttatacggttaaagcattattgctattatgtaggtcacggatgtttataatactaaagtattttaaaatgtgcaagtagaaaaaacagtagaaagtgatgcatgcatatttatatataagtaaagcaggattgtgctgtttttgcactttataatttcaattaagttgcggctttttactacaagttaactttattagtaaaaggagcaaattagacctaattcattgatctcggttaagtgagcagactgcatgacttgtgtaatgccagtttctcatttcatattagcctaaatattacagaaattactccttgggctctaaaatgtagaggaaatgaaaatgtaaggattaaggctgtgtaacagaatctggctttttaaaatttaagtgaaactaagctgtaaacatcaagaggaagtaggacataaactgggccggtacagcctgggagccctgtgtatttctgccctccgtctgtgagctgctatctcagtctccttcagctcttcatgtcttagtaaacagcaccacgtgcagatgtaatcttgttgcagtcccccagtgtggttgttataaaatgcatttctttgtaagtcatctctgtaaacagtcactttctaaaagcactatagttctggtcccctggaatctggatcacatgtatgatttatttttaatatttgataggaactaggtttcagtgaaatgatttgaaagcatagcaggatgtggctttttaaatttatgaaactttcgaacagtagcaactgaaatttgtcacttttctgttacgcagagaatcagaccttttgataatatttgggagggtaaaagaaatatgccaaatatgaaacttttttgtcagcactacatacatcttttttttgcggggggcgggggggacagagtctcactgtgtcactcagactggagtacagtgatgcgatctcggctcactgcaacctccgcctcctgggttcaagcgattctcctgcttcagcctcctgagtagctgggattacaggtgcacaccaccacgcccggctaatttttgtatttttagtagagatggggtttcaccatgttggtcaggctggtcttgaactcctgacctcgttcctgccttagcctcctaaagtgccgggattacaggcgtgaaccaccgcacctggccagtactacatccattttattgaatgattttgaatgacttaaagttcaactatgaaaaagctttcttttcacatgtactttttgattaggtattatcaacttatgaaacttgaagatgtgaagtgacaggttttgcatgtgatgagtgttttctgttaaaaaataaatattgaaatattaacccattaaatacatttttatggtaacctatgttttacagtggagttttaaaaatgctaggtctttctttcattttattgataactacaaatgaataaaaagcatttattctctttgttgata

SEQ ID NO: 169989 - DNA, 1200 bp, Artificial Sequence
  derived and/or modified sequence
atggcagccacagctgccgccgtcgtagctgaggaggataccgaactgcgggacctcctcgttcagactctggaaaactctggcgttctgaacaggattaaagccgagttacgggccgcagtcttcttagcactggaggaacaggagaaggttgaaaacaagactccactagttaacgagtcgttgaaaaagtttctgaataccaaagacggaaggctcgtggcttctttggtggcagagttcttgcagttctttaacctggacttcactctcgctgtgtttcagccggaaacctctactctgcaaggtcttgagggacgagaaaacctggcccgagacctcggaattattgaagccgaaggcaccgtgggggggccattgctgcttgaagtgatcagacgttgtcagcagaaagaaaagggccctactaccggcgaaggagcactggacctgagtgatgtccattccccccccaagtctcctgaagggaagactagcgcgcagaccactcctagtaagattcctagatacaagggacaagggaagaagaagacttccggacagaaggctggtgacaaaaaggcaaacgatgaagcgaatcagtccgatacgagcgtaagtctgtctgaaccgaagtctaagtcatccttgcatctactgtcccacgagacaaaaattggcagcttcctgagtaataggacactggacggaaaggataaagctggtctgtgccccgatgaggatgatatggaaggagacagctttttcgacgaccctattcctaagcccgaaaaaacatatggcttgcgaaaagaacctaggaagcaggccgggtcgttagcctctctcagtgacgcacctcccttgaaaagcggactcagcagcctcgccggggcaccaagcctcaaggacagtgagagtaagagaggcaacacagtcttaaaagatctcaaactaatttcggataagattgggtccctcgggctcggcacgggtgaagacgacgattatgttgacgattttaattctacgagtcatcgcagcgagaagagcgagatttccatcggtgaggagatcgaggaggacctctccgtggaaatcgatgacatcaacacttccgacaaactggacgatctgactcaggacctcaccgtttcacaactcagcgacgtagcagactatttagaggatgtagcttag

SEQ ID NO: 169990 - DNA, 1200 bp, Artificial Sequence
  derived and/or modified sequence
atggccgccacagctgctgctgtggtggccgaggaggacacagagctgcgggacctgctggtgcagaccctggagaacagcggcgtgctgaaccgcatcaaggccgagctgcgggctgctgtgttcctggccctggaggagcaggagaaggtggagaacaagacccccctggtgaatgaaagcctgaagaagttcctgaacaccaaggatggccgcctggtggccagcctggtggccgagttcctgcagttcttcaacctggacttcaccctggccgtgttccagcctgagaccagcaccctgcagggcctggagggccgggagaacctggcccgggacctgggcatcattgaagctgagggcaccgtgggcggccccctgctgctggaggtgatccgccgctgccagcagaaggagaagggccccaccaccggggagggcgccctggacctgagtgatgtgcacagcccccccaagagccctgagggcaagaccagcgcccagaccacccccagcaagatcccccgctacaagggccagggcaagaagaagaccagcggccagaaggccggggacaagaaggccaatgatgaggccaaccagagcgacacctctgtgtccctgtctgagcccaagagcaagagcagcctgcacctgctgagccatgagaccaagattggcagcttcctgagcaacagaaccctggatggcaaggacaaggccggcctgtgcccagatgaagatgacatggagggggacagcttctttgatgaccccatccccaagccagagaagacctacggcctgaggaaggagcccaggaagcaggccggcagcctggccagcctgagtgatgccccacccctgaagagcggcctgagcagcctggccggggcccccagcctgaaggacagcgagagcaagaggggcaacacagtgctgaaggacctgaagctgatcagtgacaagattggcagcctgggcctgggcactggagaagatgatgattatgtggatgacttcaacagcaccagccacaggtctgagaagtctgagatcagcattggagaggagattgaggaggacctgtctgtggagattgatgacatcaacaccagtgacaagctggatgacctgacccaggacctgactgtgtcccagctgagtgatgtggccgactacctggaggatgtggcctag

SEQ ID NO: 169991 - DNA, 1200 bp, Artificial Sequence
  derived and/or modified sequence
atggccgccaccgccgccgccgtggtggccgaggaggacaccgagctgagggatctgttggtgcagacactcgaaaactccggggtgctgaacagaatcaaggccgagctccgcgcagctgtgtttctggctctagaggagcaggaaaaggtagaaaataaaaccccccttgtgaacgagtctctcaaaaagttcctgaatacaaaggacggacgcctcgtcgccagtctggtcgcagagtttctgcagtttttcaatctggactttaccctggctgtttttcagcccgagactagcacacttcagggcctggaaggtcgggagaatcttgctcgagacctgggcatcatagaggcagagggcacagttggtggtcccctgctgctggaggtgatccggaggtgccagcagaaagagaagggaccgactaccggcgaaggcgctctggatctgtctgatgtgcactcccctcccaaatctcctgagggcaagacctctgctcagacaacccccagcaagattccccggtacaagggacaggggaaaaaaaaaacatccggtcagaaagccggggataaaaaggccaatgatgaagctaaccagtctgatacgagcgtgtctctgtcagaacctaagtctaaatcatccctgcacctactatctcacgagacaaaaattggctccttcctaagcaataggactcttgatggtaaggataaggccggcttgtgccctgacgaggacgacatggaaggtgactcattctttgacgacccaatccccaaacctgaaaaaacatatgggctccgcaaggaaccaagaaagcaggcggggtcgctggcaagcctgagtgacgctccccccctgaaatccggactgtctagccttgcaggagcccctagcttgaaggactccgagtcaaagcggggcaacacagtcctcaaagacttgaaattaatcagtgataagatcggaagtctggggctgggaaccggagaggatgatgattatgtggatgatttcaacagtacctctcacaggtctgagaaatcagaaataagtattggcgaggaaatagaggaggacctgtcagtagaaatcgatgacattaatacttccgacaagttggacgatctaacccaggacttgaccgtctcccagctgtctgacgtggcagactatctggaagatgttgcatag

SEQ ID NO: 169992 - DNA, 1200 bp, Artificial Sequence
  derived and/or modified sequence
atggcagccacggctgccgcagttgtggccgaagaggatactgaactgcgggatctgctggtgcagaccctggagaattctggcgtgttgaaccggatcaaggccgagttgcgggctgccgtgttcctggctcttgaggagcaagaaaaagtggagaacaagacgcctctggtaaatgagtcgttgaagaagttcctgaataccaaggacggacgcctcgtggcctctctggtcgccgagtttcttcagttcttcaacctcgacttcacgctggcagtgttccaacctgaaacttctaccctgcagggtttagaagggagggagaacctggccagagatctgggtatcatcgaagctgaaggtaccgtgggcggacccctacttctcgaagtgattaggcgttgtcagcagaaggagaaaggccctacgacaggagaaggcgctttagatctcagcgacgtccattcacccccaaagtccccagaggggaagacttcagctcagaccaccccctcgaagattcccaggtacaagggacagggtaaaaagaagacatctggacagaaggctggggataaaaaggcgaacgacgaagcaaaccaatcagacaccagcgtctccctgtctgagccaaaaagtaagtccagtttgcatttgttgtctcatgagaccaagataggttcatttctgtctaatcggaccctggacggaaaagacaaggctggactctgccccgatgaagacgatatggaaggagactctttctttgacgaccccatacctaaacctgaaaagacatatggattacgtaaagagccacgtaagcaggccggatccctcgcgagtctgtccgatgctcctcctttaaagtctggactctcctcattggcgggagctccttcattgaaggattccgaatctaagcgtggcaacactgtgctcaaggatctgaaattgattagcgacaaaattggcagtctgggcctggggacaggggaagacgacgactatgtggacgactttaattctacatcgcatcggtcagagaagagcgagatctccatcggcgaagaaatcgaggaggatctgtcagtggagattgatgacattaatacttccgataagctcgacgacttaacacaggatctgactgtgagtcagctgtctgacgtggccgactacctagaggacgtggcatag

SEQ ID NO: 169993 - DNA, 1200 bp, Artificial Sequence
  derived and/or modified sequence
atggccgccaccgccgccgccgtggtggccgaggaggacaccgagctgagagacctgctggtgcagaccctggagaacagcggcgtgctgaacagaatcaaggccgagctgagagccgccgtgttcctggccctggaggagcaggagaaggtggagaacaagacccccctggtgaacgagagcctgaagaagttcctgaacaccaaggacggcagactggtggccagcctggtggccgagttcctgcagttcttcaacctggacttcaccctggccgtgttccagcccgagaccagcaccctgcagggcctggagggcagagagaacctggccagagacctgggcatcatcgaggccgagggcaccgtgggcggccccctgctgctggaggtgatcagaagatgccagcagaaggagaagggccccaccaccggcgagggcgccctggacctgagcgacgtgcacagcccccccaagagccccgagggcaagaccagcgcccagaccacccccagcaagatccccagatacaagggccagggcaagaagaagaccagcggccagaaggccggcgacaagaaggccaacgacgaggccaaccagagcgacaccagcgtgagcctgagcgagcccaagagcaagagcagcctgcacctgctgagccacgagaccaagatcggcagcttcctgagcaacagaaccctggacggcaaggacaaggccggcctgtgccccgacgaggacgacatggagggcgacagcttcttcgacgaccccatccccaagcccgagaagacctacggcctgagaaaggagcccagaaagcaggccggcagcctggccagcctgagcgacgccccccccctgaagagcggcctgagcagcctggccggcgcccccagcctgaaggacagcgagagcaagagaggcaacaccgtgctgaaggacctgaagctgatcagcgacaagatcggcagcctgggcctgggcaccggcgaggacgacgactacgtggacgacttcaacagcaccagccacagaagcgagaagagcgagatcagcatcggcgaggagatcgaggaggacctgagcgtggagatcgacgacatcaacaccagcgacaagctggacgacctgacccaggacctgaccgtgagccagctgagcgacgtggccgactacctggaggacgtggcctag

SEQ ID NO: 169994 - protein, 1016 aa, Artificial Sequence [sequence omitted]

SEQ ID NO: 169995 - protein, 347 aa, Artificial Sequence
  derived and/or modified sequence
MADLGATKDRIISEINRLQQEATEHATESEERFRGLEEGQAQAGQCPSLEGRLGRLEGVCERLDTVAGGLQGLREGLSRHVAGLWAGLRETNTTSQMQAALLEKLVGGQAGLGRRLGALNSSLQLLEDRLHQLSLKDLTGEGTKGPAGEAGPPGPPGLQGPPGPAGPPGSPGKDGQEGPIGPPGPQGEQGVEGAPAAPVPQVAFSAALSLPRSEPGTVPFDRVLLNDGGYYDPETGVFTAPLAGRYLLSAVLTGHRHEKVEAVLSRSNQGVARVDSGGYEPEGLENKPVAESQPSPGTLGVFSLILPLQAGDTVCVDLVMGQLAHSEEPLTIFSGALLYGDPELEHA

SEQ ID NO: 169996 - DNA, 3051 bp, Artificial Sequence
  derived and/or modified sequence
atggccccgaggacgctgtggtcctgttacctgtgttgtctgctgaccgctgcggctggcgctgcatcctatccgccccgcggattcagcctatataccggaagctcaggcgccttgtccccaggagggcctcaggcacagatagcaccgcggcccgctagcaggcaccgcaactggtgtgcatacgtggtcacgcggaccgtctcttgcgtgctggaggacggggtggagacttacgtcaagtaccaaccgtgtgcttggggacaaccccagtgcccacagtctatcatgtaccggcgatttctgcgacctcggtatagagtggcctacaaaacagttacagatatggaatggcggtgttgtcagggctatgggggggacgactgtgcagagagccccgccccagccttgggtcccgcttctagcactccacggcctctggcccaacccgccaggcccaatctgagcgggagttcagcaggtagcccgttgtcggggctaggtggggagggacccggagagagcgaaaaggtgcaacagctggaggagcaagtgcagtctctgacgaaggaactccagggtctgaggggggttctgcaggggctgtctgggagactggctgaggacgtgcagcgggcggtggaaacagcgtttaacggacgacagcagccggccgatgccgccgctcgtcctggtgtgcacgaaaccttaaacgagattcaacaccagctgcagttgctcgacactcgagtatcaacccacgatcaggagctgggccatctgaacaaccatcatggtggatcctccagcagcggcggtagtcgagcacctgctcctgcttccgccccaccaggccccagtgaagaactgctgcggcagttggagcaacgattgcaggaatcttgctccgtgtgcctagctggactcgatggatttcgcaggcagcagcaggaagatagggaacgtctgcgggcgatggagaagctactagccagcgtcgaggagaggcaaagacatctcgccggccttgctgtgggaagacgtcctccacaggagtgctgttccccagaactgggccggaggttggccgagctcgagcgaagattagacgtggttgctgggtctgtgaccgtactatccggtcgacgaggtactgagctaggcggcgcggcagggcaaggaggacacccacccggatatacgtcacttgcctctcgcctttctcgattggaggatcggttcaattccacgctgggaccatctgaagaacaagaggagagctggcctggcgcccctggaggcttgtcacattggctcccggccgctcgtggccgcctggaacaactgggcggcctgcttgcaaacgtcagcggggaacttggagggcgactggacctgttggaagagcaggttgctggcgcaatgcaggcttgtgggcagctgtgctccggggcccccggagaacaggattcccaggtgagtgaaattctttctgccctggaaagacgggtgcttgactctgaggggcagcttcgcctggtcgggtcaggtttgcatacagtggaggcagccggagaggctaggcaggctactctagaaggtcttcaagaggtcgtggggcggctgcaagaccgggtggatgcccaagacgagactgccgccgaattcacactccgcctcaatctaactgccgcacggttaggacagctggaggggttgcttcaggcccatggagatgagggctgcggcgcctgcggcggtgtgcaggaggagttggggcggcttagggacggggtggaacgatgcagctgccccctgctgccaccaagaggcccgggcgcaggtcctggtgtgggtggtccttcgcgtggccccctggatgggttcagcgtcttcggagggagtagcggcagcgctctgcaggctctgcagggagaactgagcgaggtcatcctttcattctcgtctttaaatgacagtttgaatgagctgcaaaccactgtggagggccagggagcagacctcgcagacctgggtgccaccaaagatcgcattatcagcgaaataaaccgcctccaacaagaggcaacagagcacgccacagagagcgaggagagatttagaggactggaggagggccaggcccaggcaggccaatgccccagcctggaaggcaggttgggtcgcttagagggggtgtgcgaaaggctggataccgtggcaggcggcctccagggtctccgcgaaggactgagccggcatgtcgccggcctgtgggctggcttgcgagaaacgaatacaactagtcagatgcaggcagccctcttggagaaactagtaggaggtcaggccggacttggaagaaggctgggcgcccttaactcctccttgcagttgctggaagaccgtttacatcaactgtccttaaaagacctaactgggcccgctggcgaagctggtcctccaggcccaccagggctccaaggcccacccggcccagccggcccccccgggtcccctggcaaggacggacaggagggccctattggcccaccgggccctcagggcgaacagggggtagagggggcccctgcagcgcccgtgcctcaggtggcattttctgccgccctgtcactgcccagatctgaacccggtactgtccccttcgatcgagtgttgctgaacgatggcggatactacgaccccgagaccggcgtctttacagcgccgttagctggacgctacttgctcagcgctgttctgaccggccaccggcacgaaaaagtggaggctgtcctcagccgctctaatcagggagtagctagagtggactccggaggatatgaacctgagggcctggaaaataaacccgtggccgagtctcagccatcccccggaacccttggcgtcttcagccttatcctgccactgcaggccggggatacagtctgcgttgatctagtcatgggccagctggcccattcagaagagcccctgactattttctcaggtgctctgctgtacggagacccagaactcgagcacgcctag

SEQ ID NO: 169997 - DNA, 1044 bp, Artificial Sequence
  derived and/or modified sequence
atggccgacttgggggccacaaaagatcggattatctcagagattaaccgtttgcagcaggaagccacagagcacgccacagaaagtgaagagcggttcagaggcctggaagagggacaagcacaggccgggcaatgccctagcctcgagggaaggttggggcggctggaaggggtctgcgaaagattggatacagtggctggagggcttcagggtctccgtgagggtctaagcagacacgtcgcaggcctttgggccggattgagagagacaaatactacaagccagatgcaggcagccttactggaaaagctcgtggggggccaagcgggccttgggagacggctgggcgctctaaattcatctctgcaattactcgaagacaggctgcaccaactgtccctcaaggacctcacaggtgaaggaacaaaagggccagccggcgaggccggccctccgggtccacctggattgcagggcccccccgggcccgcaggccctccgggaagccccggtaaagatggacaggagggacccatcggaccgcccggccctcagggagagcagggtgtggagggagcgcctgccgcgccagttccacaggtagccttctcagccgcactgtcccttcccaggagcgaaccaggcacagtacctttcgaccgggtcctgttaaacgacggagggtactacgatccagagactggagtcttcaccgcacccttggcgggcaggtatcttttgagcgccgttctcactggacatcgtcacgagaaggtcgaggctgtgctgagtcgtagtaatcagggtgttgctcgggtggactctggtggatacgagccagaagggctggagaacaagcccgtcgccgagtcccaaccctctcctggtacactgggggtatttagccttatcttgcccctccaagctggtgatacagtttgtgtcgatttagtgatgggccagctagcccattctgaggagccactcacgatctttagtggcgccctgctgtacggcgaccccgagcttgaacatgcctag

SEQ ID NO: 169998 - DNA, 3051 bp, Artificial Sequence
  derived and/or modified sequence
atggcccccaggaccctgtggagctgctacctgtgctgcctgctgacagctgctgctggagctgccagctacccaccccggggcttcagcctgtacacaggcagcagcggggccctgagccctgggggcccccaggcccagatcgcccccaggcctgccagccgccacaggaactggtgtgcctacgtggtgaccaggacagtgtcctgtgtgctggaggatggagtggagacctacgtgaagtaccagccctgtgcctggggccagccccagtgcccccagagcatcatgtaccgccgcttcctgcggccccgctacagagtggcctacaagacagtgacagacatggagtggcgctgctgccagggctatggaggagatgactgtgccgagagccctgccccagccctgggccctgccagcagcaccccccggcccctggcccagcctgcccggcccaacctgagcggcagcagcgctggcagccccctgagcggcctgggcggggagggccctggagagagcgagaaggtgcagcagctggaggagcaggtgcagagcctgaccaaggagctgcagggcctgcggggcgtgctgcagggcctgagcggccgcctggccgaggatgtgcagagagctgtggagacagccttcaacggccggcagcagcctgcagatgctgctgcccggcctggggtgcatgagaccctgaatgagatccagcaccagctgcagctgctggacaccagggtgtccacccatgaccaggagctgggccacctgaacaaccaccacggcggcagcagcagcagcggcggcagccgggccccagccccagccagcgcccctcctggccccagcgaggagctgctgcggcagctggagcagaggctgcaggagagctgcagcgtgtgcctggccggcctggatggcttccggcggcagcagcaggaggaccgggagcggctgcgggccatggagaagctgctggcctctgtggaggagcggcagaggcacctggccggcctggccgtgggcagaagaccaccccaggagtgctgcagccctgagctgggccggcggctggccgagctggagcggcggctggatgtggtggccggctctgtgacagtgctgagcggccggcggggcacagagctgggcggcgctgctggccagggcggccaccccccaggctacaccagcctggccagccggctgagccggctggaggaccgcttcaacagcaccctgggccccagcgaggagcaggaggagagctggccaggggcccctgggggcctgagccactggctgcctgctgcccggggccgcctggagcagctgggcggcctgctggccaacgtgtctggagagctgggcggccgcctggacctgctggaggagcaggtggccggggccatgcaggcctgtggccagctgtgcagcggggcccctggagagcaggacagccaggtgtctgagatcctgagcgccctggagcggcgggtgctggacagcgagggccagctgcggctggtgggcagcggcctgcacacagtggaggccgccggggaggcccggcaggccaccctggagggcctgcaggaggtggtgggccgcctgcaggacagagtggatgcccaggatgaaacagctgctgagttcaccctgcggctgaacctgacagctgcccggctgggccagctggagggcctgctgcaggcccatggagatgagggctgtggggcctgtggcggcgtgcaggaggagctgggccgcctgagagatggagtggagcgctgcagctgccccctgctgcccccccggggccctggggccggccctggggtgggcggccccagccggggccccctggatggcttctctgtgtttggaggcagcagcggcagcgccctgcaggccctgcagggcgagctgtctgaggtgatcctgtccttcagcagcctgaatgacagcctgaatgagctgcagaccaccgtggagggccagggcgctgacctggccgacctgggcgccaccaaggaccgcatcatcagcgagatcaaccggctgcagcaggaggccacagaacatgccacagaaagtgaggagcgcttccggggcctggaggagggccaggcccaggccggccagtgccccagcctggagggccgcctgggccgcctggagggcgtgtgtgagcggctggacacagtggccggcggcctgcagggcctgcgggagggcctgagccgccacgtggccggcctgtgggccggcctgcgggagaccaacaccaccagccagatgcaggccgccctgctggagaagctggtgggcggccaggccggcctgggccggcggctgggcgccctgaacagcagcctgcagctgctggaggaccggctgcaccagctgagcctgaaggacctgactggacctgctggggaggccggccccccaggccccccaggcctgcagggccccccaggccctgctggccccccaggcagccctgggaaggatggccaggagggccccatcggccccccaggcccccagggcgagcagggcgtggagggcgccccagctgcccctgtgccccaggtggccttctctgctgccctgagcctgcccaggtctgagcccggcaccgtgccctttgacagagtgctgctgaatgatggcggctactatgaccctgagaccggggtcttcaccgcccccctggccggccgctacctgctgtctgctgtgctgaccggccacagacatgagaaggtggaggccgtgctgagccgcagcaaccagggcgtggcccgggtggacagcggcggctatgagcctgagggcctggagaacaagcctgtggccgagagccagcccagccctggcaccctgggcgtcttcagcctcatcctgcccctgcaggccggggacacagtgtgtgtggacctggtgatgggccagctggcccacagcgaggagcccctgaccatcttcagcggggccctgctgtatggagaccctgagctggagcacgcctag

SEQ ID NO: 169999 - DNA, 1044 bp, Artificial Sequence
  derived and/or modified sequence
atggctgacctgggcgccaccaaggaccgcatcatcagcgagatcaaccggctgcagcaggaggccacagaacatgccacagaaagtgaggagcgcttccggggcctggaggagggccaggcccaggccggccagtgccccagcctggagggccgcctgggccgcctggagggcgtgtgtgagcggctggacacagtggccggcggcctgcagggcctgcgggagggcctgagccgccacgtggccggcctgtgggccggcctgcgggagaccaacaccaccagccagatgcaggccgccctgctggagaagctggtgggcggccaggccggcctgggccggcggctgggcgccctgaacagcagcctgcagctgctggaggaccggctgcaccagctgagcctgaaggacctgactggagagggcaccaagggccctgctggggaggccggccccccaggccccccaggcctgcagggccccccaggccctgctggccccccaggcagccctgggaaggatggccaggagggccccatcggccccccaggcccccagggcgagcagggcgtggagggcgccccagctgcccctgtgccccaggtggccttctctgctgccctgagcctgcccaggtctgagcccggcaccgtgccctttgacagagtgctgctgaatgatggcggctactatgaccctgagactggagtcttcaccgcccccctggccggccgctacctgctgtctgctgtgctgaccggccacagacatgagaaggtggaggccgtgctgagccgcagcaaccagggcgtggcccgggtggacagcggcggctatgagcctgagggcctggagaacaagcctgtggccgagagccagcccagccctggcaccctgggcgtcttcagcctcatcctgcccctgcaggccggggacacagtgtgtgtggacctggtgatgggccagctggcccacagcgaggagcccctgaccatcttcagcggggccctgctgtatggagaccctgagctggagcacgcctag

SEQ ID NO: 170000 - DNA, 3051 bp, Artificial Sequence
  derived and/or modified sequence
atggccccccggaccctgtggagctgctacctgtgctgcctgctgaccgctgcagctggcgccgccagctatcccccgcgaggcttcagtctgtatacagggagtagcggagcactgagtccggggggccctcaggctcagattgccccacggcctgcatcgaggcacaggaactggtgcgcctatgttgtaacgcggaccgtgtcatgtgtgttggaggacggggttgaaacatatgttaagtaccagccttgtgcctggggccaaccacagtgcccccagtccatcatgtaccgccgttttctgcggccccgataccgggtggcttataaaacagtcactgacatggagtggaggtgttgtcaaggctatgggggcgatgattgcgctgaatcaccggccccagcgctaggtcctgcttcctcaacgcccaggcccctggctcagcccgcccggcccaacctcagcggaagttcggcgggttccccacttagcggcttgggtggggagggcccgggagaaagcgagaaagttcagcagttagaggagcaagtgcaatcactaacgaaagagttgcaggggctccggggcgtccttcaggggctgagtggccggttagctgaggatgtgcagcgcgctgtcgaaacagcctttaacgggcgccaacagcctgctgacgcagcggcccgccctggggtacacgagactcttaatgagatccagcaccagctgcagcttttggatacgcgtgtgtcgacccacgatcaggagctcggacatttgaacaatcatcacggtggttcctcttccagcggtggctcccgagcacctgcaccagcctccgcaccgcccgggccatccgaggaattattgcggcagctggagcagagattgcaggaaagttgctcagtgtgcttagcgggcctcgacgggttccgccggcagcagcaggaggaccgcgagcgcctgcgcgccatggaaaaactgctggcttcagtcgaggagaggcagagacatctcgctgggctggctgtaggacgaagacccccacaggagtgttgcagccccgaacttggtcgcagacttgcagagctcgaacgcagactcgacgtggtggcgggttctgtaacggttctgtccggacgcaggggtaccgagctcggcggggccgccggtcagggggggcaccctcccggctacactagtctggcatccagactctcccgtcttgaggatcggttcaattccactcttggcccatcagaggagcaggaagaaagttggcccggcgctccgggaggactctctcactggttacccgcagcgcgtgggaggttggagcaactaggcggcctcctggcgaacgtcagcggcgagctgggcggcaggctcgatctgctggaagagcaagtcgccggggctatgcaggcctgcggccaactttgttccggcgcacccggggagcaggacagtcaggtgagcgaaatcctgtcggcgcttgagcggcgggtcctagattctgagggacaattgcgcctcgtgggcagtggcctgcacacggtggaggctgcgggggaggcccggcaagccacactcgaggggctgcaagaggtggtgggaaggctgcaggacagggtggacgcccaggacgagaccgccgcagagtttacactgcggctcaaccttaccgcagcacggcttggccaactcgagggcctgctgcaggcccacggcgacgaaggctgcggggcatgcggaggagtacaagaagagctcggccgcctgcgcgacggggtcgaacgctgttcatgcccccttctccccccaagggggcctggcgcgggaccgggagtgggtggcccgagccgcgggcccttggacggattctctgtgttcggcggatcatcaggtagtgccctccaggctctccagggagaactctccgaagtcatcctgtcatttagttccctgaatgattctttgaatgaactccaaaccactgtggagggacaaggagctgatctcgcggatcttggggccaccaaggatcgcataatttcggagattaatagactgcagcaggaggccacggagcatgccaccgagagtgaagaacgattcagaggactagaggaagggcaagcccaggcaggacaatgtccttccttggagggacgtctgggccgcctcgaaggagtgtgcgaacgtctggacaccgtcgctggtggcctccagggcctgcgggaaggcctcagccggcatgttgccggtttatgggctgggctccgcgagaccaacacaacgagtcaaatgcaagcagcgctcctggagaagctggtcggcggacaggccgggttggggcgcaggctaggggccttgaactcgtccctgcagctcctagaggacagacttcaccagctttccctaaaggatcttactggaccagccggtgaggccggtcctccagggcccccgggcctgcagggcccgcccggcccagcaggccccccagggagccctggaaaggacggacaggagggtccaattggcccccctggtccgcaaggagagcagggtgtggaaggagcccccgctgcacctgtaccacaagtggcgttttcagccgccctgagtcttccacggagcgaaccgggaaccgtgcctttcgatcgagttcttctaaatgacggcggatattatgacccagaaaccggagttttcaccgcacccctggcaggacgctaccttctgagcgccgttctaacgggacacaggcacgagaaggtggaggcggtcctgagccggagtaaccagggggtagcaagggtcgactctggaggctatgagccagaaggcctggagaacaaaccagttgctgaatcccagccaagccccgggaccctcggtgtattttcgttgatcctgccattgcaggcaggcgacacggtgtgcgtggacctcgttatggggcagctagcccactccgaggaacccttgactattttttctggcgctctcttgtacggcgacccagagcttgaacatgcctag

SEQ ID NO: 170001 - DNA, 1044 bp, Artificial Sequence
  derived and/or modified sequence
atggccgacctgggcgccaccaaggaccggatcatcagcgagatcaatcgactgcagcaggaggccaccgaacacgccacggaaagtgaagaaaggtttcgcggactggaggaaggccaggcccaggccggccaatgccccagccttgaaggccgcctgggacgactggaaggggtgtgtgagcgccttgacactgttgctggcggcctgcaaggcctgcgcgaaggtctttccaggcatgttgctgggctgtgggctgggctgcgcgaaactaataccacttcgcagatgcaagcagccctcctggaaaagttggtaggtggtcaagcaggtctcggacggcggctgggagcccttaactcctcactgcaacttttagaggaccgtctccatcagctgagtttgaaagacttgaccggcgagggcacgaaggggccagctggcgaagcgggacccccaggtccccctggcttacaaggtccccccggcccagccggaccgcccggcagcccaggtaaggacggtcaagaaggccctataggccccccaggcccccaaggtgaacagggggtggaaggagcgccggcggctcctgtgccccaggttgcatttagcgccgcactgagtctgccgcggtccgagcccgggaccgtaccttttgatcgagtcctgctaaacgatggaggttactatgatcctgaaacaggcgtctttacggctcctttggctgggcggtacctccttagcgctgtgctgacaggacaccggcatgagaaagtggaggcagtactctcccggtctaaccagggcgttgcccgagttgattccgggggttacgaacctgaaggcttagagaacaagcccgtggcagaatcacagcccagtcctggaacacttggcgtcttctctctgatccttccccttcaggccggagatacagtatgcgtggatttggtcatgggacagctggcacactcagaagaaccgttaacaatcttctctggcgccttactttacggagacccagaactcgagcatgcttag

SEQ ID NO: 170002 - DNA, 3051 bp, Artificial Sequence
  derived and/or modified sequence
atggcacctcgtacattatggtcatgttacctatgctgtttgctgaccgccgcagcaggagccgcatcatacccccctcgagggttcagtctatatacaggttcctctggcgctctctcccccggtggtcctcaggctcaaatcgccccaaggcctgccagtagacatagaaattggtgtgcgtacgtcgtcacacggaccgtgtcctgcgtgttggaagacggcgtggagacgtatgtcaaatatcagccttgcgcgtggggccagcctcaatgcccccagtcaatcatgtataggaggtttttgaggccccgatacagagtagcctataaaacagtgacagatatggagtggcgctgctgtcaggggtatggcggagacgactgtgccgaatcccccgctccagccttagggcctgcttcctcaacgcccagaccattggcccaacctgcacgccctaaccttagcgggtcctctgccggatccccgctctccggtttagggggtgaaggcccaggcgaatcggagaaagtgcagcaattggaggagcaagtccaaagtctcacaaaagagctgcaggggttgcgtggcgtcctgcaaggcttgagtggaaggctggctgaagacgtgcaacgcgcagttgagaccgccttcaatggcaggcagcaaccggctgatgccgcagccaggccaggtgtgcacgagacactgaacgaaattcagcaccagttgcagcttctggatactcgggtaagcacccacgatcaggaactggggcacttaaataaccaccatggtggctccagcagctctggcggttcaagagctcctgcccctgcctctgcaccacctgggccatcagaggaactattacgccaactggaacaacgcttacaggagagttgttcggtgtgcctggccggtcttgatggatttcggcgtcagcagcaagaagatcgggagcgcttacgggcaatggaaaaacttctggcctccgtagaggaaaggcagcgacacttggcagggctggccgtgggtagaagacccccacaggaatgctgtagccccgagcttggcaggcgacttgctgaactggagagacgcctggatgtggtcgccggttcagtcacagtgctgagcggtcgcaggggaactgaactcgggggtgccgctgggcagggcggacatcctcctggttatacttcactcgccagcaggctctctcgcctagaggaccgcttcaactcaaccttagggccatccgaagagcaggaggaatcttggccaggggcacctggcggtctgtctcattggctgcctgctgctcggggtcgcctggagcagcttgggggactcctggccaatgtgtcaggtgagctgggcggacgtctggacttgttagaagagcaagtggcaggcgcaatgcaggcgtgcggtcagctctgcagcggggctcccggagaacaggactcacaggtctcagaaatcctgtctgccctcgagaggcgcgtgctggacagcgaaggtcagctccggctggtcggatctggattgcacaccgtcgaggctgcaggagaagccagacaagccactttagagggcctgcaggaagtcgtgggtagactccaggatcgggtggacgctcaggatgaaacggccgcagagttcaccttaagactcaacttgaccgccgctcgactaggacagctcgaaggcctactgcaggcccacggcgatgaggggtgcggcgcatgcgggggtgtgcaagaggaactgggcagattgcgtgatggtgttgagcgctgtagttgccctctgctccctccgaggggaccgggtgccggaccaggcgtaggcggaccgtctcggggacccctcgatggcttctcagtgttcggcggatccagcggaagtgcgctacaggcattacagggagagttatccgaagtgattttaagtttcagtagtcttaacgactcccttaatgaattgcagacgaccgtggaaggacagggggctgacctggctgatctcggagcgacgaaggatcggatcatttccgagattaatagacttcagcaagaggctaccgagcatgctaccgaaagcgaggaaaggttccgcggactggaggagggacaggctcaggccggacagtgtcccagtctagagggcagactcggccgacttgagggagtttgcgaacgcctggacactgtcgctgggggactacagggcttgcgcgagggactctccaggcatgtcgctggtctttgggccggattgagagagaccaataccacatcgcagatgcaggccgctctgctcgaaaagctggtcggtggacaggccggacttgggagacgtctcggggctctgaacagcagtctccaacttctggaagaccggttgcatcagttgtccctgaaagatctgactggacctgcgggagaggctggcccacctggcccacccggactgcaagggccacccggacccgctggaccgccaggaagcccagggaaagacgggcaggagggaccaattggaccgccaggaccgcagggcgagcagggggtcgaaggagccccagctgccccagttccccaggtagcatttagcgctgctctatctttgcccagatcagagcccggaacagttcccttcgacagagtgctcctgaacgatggcggatactacgatcctgaaacgggagtcttcacggccccactcgcaggtcggtacctgttatctgcagtgctgaccggccatagacatgaaaaagtggaggctgtattgtcaaggagtaaccagggagtcgcaagggttgattcaggtggctacgagccagaaggcctggagaacaaacctgtggctgagtctcagccgagcccaggtactctgggcgtgtttagcctaatccttcctcttcaggcaggtgatactgtctgcgtggatttagttatgggacagctcgcacattccgaagagcctctgacgattttttcaggggctctgctatatggagatccggagctggaacacgcttag

SEQ ID NO: 170003 - DNA, 1044 bp, Artificial Sequence
  derived and/or modified sequence
atggccgatctgggtgccactaaggacaggatcatcagcgaaattaatcgtttacagcaggaggcaaccgaacacgcgactgagagcgaagaaagattccggggactggaagagggacaggcccaggcgggacagtgcccatctcttgaagggagattggggcgattggagggcgtgtgcgagcgcctcgacacagtcgccggaggacttcagggcctgcgtgaggggctatctaggcacgtggcgggtctatgggcgggtctccgggaaactaacacgacttctcagatgcaggccgcactgctggagaaactggtggggggacaggccggattgggcaggcgcctgggtgccttgaatagctccctccagttactggaggatagactgcaccagttgtctttaaaggaccttaccggcgaaggcacaaaggggcctgccggagaagctggtccgcctggaccaccagggctgcagggtccgccaggaccagcaggcccaccagggtcacccggaaaggacggccaggaaggcccaatcggccctcctggtcctcaaggagaacagggggttgaaggcgcacccgctgctccagtccctcaagtggcatttagcgctgccctgagcttacctaggtccgaaccagggacagtcccattcgaccgagtgctgttaaatgatgggggatactacgaccccgaaaccggagtgttcaccgccccactcgcgggacgctatctcctgtccgcagtgctcaccggtcaccggcatgagaaagtggaggccgttcttagtcggtcaaaccagggggttgcgagggttgactctgggggatacgaacccgaagggctcgagaataagccagtagctgagagtcagcctagtcccggtacacttggtgtgttctcactgatactgcccttgcaggctggcgatactgtctgcgtggatctagtgatgggacaacttgcacatagcgaggaaccactgacgatctttagcggtgcacttttatacggagatccagaattggagcacgcttag

SEQ ID NO: 170004 - DNA, 3051 bp, Artificial Sequence
  derived and/or modified sequence
atggcccccagaaccctgtggagctgctacctgtgctgcctgctgaccgccgccgccggcgccgccagctacccccccagaggcttcagcctgtacaccggcagcagcggcgccctgagccccggcggcccccaggcccagatcgcccccagacccgccagcagacacagaaactggtgcgcctacgtggtgaccagaaccgtgagctgcgtgctggaggacggcgtggagacctacgtgaagtaccagccctgcgcctggggccagccccagtgcccccagagcatcatgtacagaagattcctgagacccagatacagagtggcctacaagaccgtgaccgacatggagtggagatgctgccagggctacggcggcgacgactgcgccgagagccccgcccccgccctgggccccgccagcagcacccccagacccctggcccagcccgccagacccaacctgagcggcagcagcgccggcagccccctgagcggcctgggcggcgagggccccggcgagagcgagaaggtgcagcagctggaggagcaggtgcagagcctgaccaaggagctgcagggcctgagaggcgtgctgcagggcctgagcggcagactggccgaggacgtgcagagagccgtggagaccgccttcaacggcagacagcagcccgccgacgccgccgccagacccggcgtgcacgagaccctgaacgagatccagcaccagctgcagctgctggacaccagagtgagcacccacgaccaggagctgggccacctgaacaaccaccacggcggcagcagcagcagcggcggcagcagagcccccgcccccgccagcgccccccccggccccagcgaggagctgctgagacagctggagcagagactgcaggagagctgcagcgtgtgcctggccggcctggacggcttcagaagacagcagcaggaggacagagagagactgagagccatggagaagctgctggccagcgtggaggagagacagagacacctggccggcctggccgtgggcagaagacccccccaggagtgctgcagccccgagctgggcagaagactggccgagctggagagaagactggacgtggtggccggcagcgtgaccgtgctgagcggcagaagaggcaccgagctgggcggcgccgccggccagggcggccacccccccggctacaccagcctggccagcagactgagcagactggaggacagattcaacagcaccctgggccccagcgaggagcaggaggagagctggcccggcgcccccggcggcctgagccactggctgcccgccgccagaggcagactggagcagctgggcggcctgctggccaacgtgagcggcgagctgggcggcagactggacctgctggaggagcaggtggccggcgccatgcaggcctgcggccagctgtgcagcggcgcccccggcgagcaggacagccaggtgagcgagatcctgagcgccctggagagaagagtgctggacagcgagggccagctgagactggtgggcagcggcctgcacaccgtggaggccgccggcgaggccagacaggccaccctggagggcctgcaggaggtggtgggcagactgcaggacagagtggacgcccaggacgagaccgccgccgagttcaccctgagactgaacctgaccgccgccagactgggccagctggagggcctgctgcaggcccacggcgacgagggctgcggcgcctgcggcggcgtgcaggaggagctgggcagactgagagacggcgtggagagatgcagctgccccctgctgccccccagaggccccggcgccggccccggcgtgggcggccccagcagaggccccctggacggcttcagcgtgttcggcggcagcagcggcagcgccctgcaggccctgcagggcgagctgagcgaggtgatcctgagcttcagcagcctgaacgacagcctgaacgagctgcagaccaccgtggagggccagggcgccgacctggccgacctgggcgccaccaaggacagaatcatcagcgagatcaacagactgcagcaggaggccaccgagcacgccaccgagagcgaggagagattcagaggcctggaggagggccaggcccaggccggccagtgccccagcctggagggcagactgggcagactggagggcgtgtgcgagagactggacaccgtggccggcggcctgcagggcctgagagagggcctgagcagacacgtggccggcctgtgggccggcctgagagagaccaacaccaccagccagatgcaggccgccctgctggagaagctggtgggcggccaggccggcctgggcagaagactgggcgccctgaacagcagcctgcagctgctggaggacagactgcaccagctgagcctgaaggacctgaccggccccgccggcgaggccggcccccccggcccccccggcctgcagggcccccccggccccgccggcccccccggcagccccggcaaggacggccaggagggccccatcggcccccccggcccccagggcgagcagggcgtggagggcgcccccgccgcccccgtgccccaggtggccttcagcgccgccctgagcctgcccagaagcgagcccggcaccgtgcccttcgacagagtgctgctgaacgacggcggctactacgaccccgagaccggcgtgttcaccgcccccctggccggcagatacctgctgagcgccgtgctgaccggccacagacacgagaaggtggaggccgtgctgagcagaagcaaccagggcgtggccagagtggacagcggcggctacgagcccgagggcctggagaacaagcccgtggccgagagccagcccagccccggcaccctgggcgtgttcagcctgatcctgcccctgcaggccggcgacaccgtgtgcgtggacctggtgatgggccagctggcccacagcgaggagcccctgaccatcttcagcggcgccctgctgtacggcgaccccgagctggagcacgcctag

SEQ ID NO: 170005 - DNA, 1044 bp, Artificial Sequence
  derived and/or modified sequence
atggccgacctgggcgccaccaaggacagaatcatcagcgagatcaacagactgcagcaggaggccaccgagcacgccaccgagagcgaggagagattcagaggcctggaggagggccaggcccaggccggccagtgccccagcctggagggcagactgggcagactggagggcgtgtgcgagagactggacaccgtggccggcggcctgcagggcctgagagagggcctgagcagacacgtggccggcctgtgggccggcctgagagagaccaacaccaccagccagatgcaggccgccctgctggagaagctggtgggcggccaggccggcctgggcagaagactgggcgccctgaacagcagcctgcagctgctggaggacagactgcaccagctgagcctgaaggacctgaccggcgagggcaccaagggccccgccggcgaggccggcccccccggcccccccggcctgcagggcccccccggccccgccggcccccccggcagccccggcaaggacggccaggagggccccatcggcccccccggcccccagggcgagcagggcgtggagggcgcccccgccgcccccgtgccccaggtggccttcagcgccgccctgagcctgcccagaagcgagcccggcaccgtgcccttcgacagagtgctgctgaacgacggcggctactacgaccccgagaccggcgtgttcaccgcccccctggccggcagatacctgctgagcgccgtgctgaccggccacagacacgagaaggtggaggccgtgctgagcagaagcaaccagggcgtggccagagtggacagcggcggctacgagcccgagggcctggagaacaagcccgtggccgagagccagcccagccccggcaccctgggcgtgttcagcctgatcctgcccctgcaggccggcgacaccgtgtgcgtggacctggtgatgggccagctggcccacagcgaggagcccctgaccatcttcagcggcgccctgctgtacggcgaccccgagctggagcacgcctag

SEQ ID NO: 170006 - DNA, 3938 bp, Artificial Sequence
  derived and/or modified sequence
gggaggggagccagcagggaggaggaggccagggcccgccccacagccactctcgcgcctccgaacagccacaggggcaaagccctgtcacccccaggatccggtcatcagggaaagaggacagggagaccagaagagggccagctgggacgagggggcggacgcccaggaggcaacttctgagacgcagctcctgagaggggcagggaccaggcgcgggaggccagagggggcacagagaacaaaccccctcagaagtgaagaggagagcggaaggaaccgagaggggacggacaggagctgaggaggaaagaggaggggagaggggtcaggccaggcagccaaggagaagacgtgtggccgggggctatcagaaggaaactgggacggacgggccgggctcgggctgtcctgtggagcagcagcatccccggggccggcagaggcgccagtggctgggcgggatgagtctctgagggccactgtggagcgccccgccatggccccccgcaccctctggagctgctacctctgctgcctgctgacggcagctgcaggggccgccagctaccctcctcgaggtttcagcctctacacaggttccagtggggccctcagccccggggggccccaggcccagattgccccccggccagccagccgccacaggaactggtgtgcctacgtggtgacccggacagtgagctgtgtccttgaggatggagtggagacatatgtcaagtaccagccttgtgcctggggccagccccagtgtccccaaagcatcatgtaccgccgcttcctccgccctcgctaccgtgtggcctacaagacagtgaccgacatggagtggaggtgctgtcagggttatgggggcgatgactgtgctgagagtcccgctccagcgctggggcctgcgtcttccacaccacggcccctggcccagcctgcccgccccaacctctctggctccagtgcaggcagccccctcagtggactggggggagaaggtcctggggagtcagagaaggtgcagcagctggaggaacaggtgcagagcctgaccaaggagctgcaaggcctgcggggcgtcctgcaaggactgagcgggcgcctggcagaggatgtgcagagggctgtggagacggccttcaacgggaggcagcagccagctgacgcggctgcccgccctggggtgcatgaaaccctcaatgagatccagcaccagctgcagctcctggacacccgcgtctccacccacgaccaggagctgggtcacctcaacaaccatcatggcggcagcagcagcagtgggggcagcagggccccagccccagcctcagcccctccgggccccagtgaggagctgctgcggcagctggagcagcggttgcaggagtcctgctccgtgtgcctggccgggctagatggcttccgccggcagcagcaggaggacagggagcggctgcgagcgatggagaagctgctggcctcggtggaggagcggcaacggcacctcgcagggctggcggtgggccgcaggccccctcaggaatgctgctctccagagctgggccggcgactggcagagctggagcgcaggctggatgtcgtggccggctcagtgacagtgctgagtgggcggcgaggcacagagctgggaggagccgcggggcagggaggccaccccccaggctacaccagcttggcctcccgcctgtctcgcctggaggaccgcttcaactccaccctgggcccttcggaggagcaggaggagagctggcctggggctcctggggggctgagccactggctgcctgctgcccggggccgactagagcagttgggggggctgctggccaatgtgagcggggagctgggggggcggttggatctgttggaggagcaggtggcaggggccatgcaggcatgcgggcagctctgctctggggcccctggggagcaggactctcaagtcagcgagatcctcagtgccttggagcgcagggtgctggacagtgaggggcagctgcggctggtgggctccggcctgcacacggtggaagcagcgggggaggcccggcaggccacgctggagggattacaagaggttgtgggccggctccaggatcgtgtggatgcccaggatgagacagctgcagagttcacactacggctgaatctcactgcggcccggctaggccaactggaggggctgctgcaggcccatggggatgagggctgtggggcctgtggcggagtccaagaggaactaggccgccttcgggatggtgtggagcgctgctcctgccccctgttgcctcctcggggtcctggggctggtccaggtgttgggggcccaagccgtgggcccctggacggcttcagcgtgtttgggggcagctcaggctcagccctgcaggccctgcaaggagagctctctgaggttattctcagcttcagctccctcaatgactcactgaatgagctccagaccactgtggagggccagggcgctgatctggctgacctgggggcaaccaaggaccgtatcatttctgagattaacaggctgcagcaggaggccacagagcatgctacagagagtgaagagcgcttccgaggcctagaggagggacaagcacaggccggccagtgccccagcttagaggggcgattgggccgtcttgagggtgtctgtgaacggttggacactgtggctgggggactgcagggcctgcgcgagggcctttccagacacgtggctgggctctgggctgggctccgggaaaccaacaccaccagccagatgcaggcagccctgctggagaagctggtcgggggacaggcgggcctgggcaggcggctgggtgcccttaacagctccctgcagctcctggaggaccgtctgcaccagctcagcctgaaggacctcactgggcctgcaggagaggctgggcccccagggcctcctgggctgcagggacccccaggccctgctggacctccaggatcaccaggcaaggacgggcaagagggccccatcgggccaccaggtcctcaaggtgaacagggagtggagggggcaccagcagcccctgtgccccaagtggcattttcagctgctctgagtttgccccggtctgaaccaggcacggtccccttcgacagagtcctgctcaatgatggaggctattatgatccagagacaggcgtgttcacagcgccactggctggacgctacttgctgagcgcggtgctgactgggcaccggcacgagaaagtggaggccgtgctgtcccgctccaaccagggcgtggcccgcgtagactccggtggctacgagcctgagggcctggagaataagccggtggccgagagccagcccagcccgggcaccctgggcgtcttcagcctcatcctgccgctgcaggccggggacacggtctgcgtcgacctggtcatggggcagctggcgcactcggaggagccgctcaccatcttcagcggggccctgctctatggggacccagagcttgaacacgcgtagactggggtcccgcccgacgtgtctacgtcggctgaagagacagcgggggcggcgggctcctggggtctcgcctgagacggggcacctagccctgggcgagcgccgcacccgggcccgcagcggcaccgcgcccagagcggcctctccccacgcccggggcgcgccggctcagggaggctcggggccgcccatgcagacttttggcctggcgcgatcccccaagaacccctccagggccggcctgcggaggagccgatcctcgcaccctccgctccctccactggccctccaggtcgattccctgggctccaggctcccccgcgcgggcgccgcccaccgccatactaaacgatcgaggaataaagacacttggtttttctaaaaaaaa

SEQ ID NO: 170007 - DNA, 2389 bp, Artificial Sequence
  derived and/or modified sequence
gtcaggccaggcagccaaggagaagacgtgtggccgggggctatcagaaggaaactgggacggacgggccgggctcgggctgtcctgtggagcagcagcatccccggggccggcagaggcgccagtggctgggcgggatgagtctctgagggccactgtggagcgccccgccatggccccccgcaccctctggagctgctacctctgctgcctgctgacggcagctgcaggggccgccagctaccctcctcgaggtttcagcctctacacaggttccagtggggccctcagccccggggggccccaggcccagattgccccccggccagccagccgccacaggaactggtgtgcctacgtggtgacccggacagtgagctgtgtccttgaggatggagtggagacatatgtcaagtaccagccttgtgcctggggccagccccagtgtccccaaagcatcatgtaccgccgcttcctccgccctcgctaccgtgtggcctacaagacagtgaccgacatggagtggaggtgctgtcagggttatgggggcgatgactgtgctgagagtcccgctccagcgctggggcctgcgtcttccacaccacggcccctggcccagcctgcccgccccaacctctctggctccagtgcaggcagccccctcagtggactggggggagaaggtcctggggagtcagagaaggtgcagcagctggaggaacaggtgcagagcctgaccaaggagctgcaaggcctgcggggcgtcctgcaaggactgagcgggcgcctggcagaggatgtgcagagggctgtggagacggccttcaacgggaggcagcagccagctgacgcggctgcccgccctggggtgcatgaaaccctcaatgagatccagcaccagctgcagctcctggacacccgcgtctccacccacgaccaggagctgggtcacctcaacaaccatcatggctgacctgggggcaaccaaggaccgtatcatttctgagattaacaggctgcagcaggaggccacagagcatgctacagagagtgaagagcgcttccgaggcctagaggagggacaagcacaggccggccagtgccccagcttagaggggcgattgggccgtcttgagggtgtctgtgaacggttggacactgtggctgggggactgcagggcctgcgcgagggcctttccagacacgtggctgggctctgggctgggctccgggaaaccaacaccaccagccagatgcaggcagccctgctggagaagctggtcgggggacaggcgggcctgggcaggcggctgggtgcccttaacagctccctgcagctcctggaggaccgtctgcaccagctcagcctgaaggacctcactggtgaggggacaaaagggcctgcaggagaggctgggcccccagggcctcctgggctgcagggacccccaggccctgctggacctccaggatcaccaggcaaggacgggcaagagggccccatcgggccaccaggtcctcaaggtgaacagggagtggagggggcaccagcagcccctgtgccccaagtggcattttcagctgctctgagtttgccccggtctgaaccaggcacggtccccttcgacagagtcctgctcaatgatggaggctattatgatccagagacaggcgtgttcacagcgccactggctggacgctacttgctgagcgcggtgctgactgggcaccggcacgagaaagtggaggccgtgctgtcccgctccaaccagggcgtggcccgcgtagactccggtggctacgagcctgagggcctggagaataagccggtggccgagagccagcccagcccgggcaccctgggcgtcttcagcctcatcctgccgctgcaggccggggacacggtctgcgtcgacctggtcatggggcagctggcgcactcggaggagccgctcaccatcttcagcggggccctgctctatggggacccagagcttgaacacgcgtagactggggtcccgcccgacgtgtctacgtcggctgaagagacagcgggggcggcgggctcctggggtctcgcctgagacggggcacctagccctgggcgagcgccgcacccgggcccgcagcggcaccgcgcccagagcggcctctccccacgcccggggcgcgccggctcagggaggctcggggccgcccatgcagacttttggcctggcgcgatcccccaagaacccctccagggccggcctgcggaggagccgatcctcgcaccctccgctccctccactggccctccaggtcgattccctgggctccaggctcccccgcgcgggcgccgcccaccgccatactaaacgatcgaggaataaagacacttggtttttct

SEQ ID NO: 170008 - protein, 513 aa, Artificial Sequence
  derived and/or modified sequence
MKMASFLAFLLLNFRVCLLLLQLLMPHSAQFSVLGPSGPILAMVGEDADLPCHLFPTMSAETMELKWVSSSLRQVVNVYADGKEVEDRQSAPYRGRTSILRDGITAGKAALRIHNVTASDSGKYLCYFQDGDFYEKALVELKVAALGSDLHVDVKGYKDGGIHLECRSTGWYPQPQIQWSNNKGENIPTVEAPVVADGVGLYAVAASVIMRGSSGEGVSCTIRSSLLGLEKTASISIADPFFRSAQRWIAALAGTLPVLLLLLGGAGYFLWQQQEEKKTQFRKKKREQELREMAWSTMKQEQSTRVKLLEELRWRSIQYASRGERHSAYNEWKKALFKPADVILDPKTANPILLVSEDQRSVQRAKEPQDLPDNPERFNWHYCVLGCESFISGRHYWEVEVGDRKEWHIGVCSKNVQRKGWVKMTPENGFWTMGLTDGNKYRTLTEPRTNLKLPKPPKKVGVFLDYETGDISFYNAVDGSHIHTFLDVSFSEALYPVFRILTLEPTALTICPA

SEQ ID NO: 170009 - protein, 43 aa, Artificial Sequence
  derived and/or modified sequence
MKMASFLAFLLLNFRVCLLLLQLLMPHSAQFSVLGPSGPILAM

SEQ ID NO: 170010 - DNA, 1542 bp, Artificial Sequence
  derived and/or modified sequence
atgaaaatggcctcctttttggcatttcttcttctgaacttccgcgtgtgcctcctgctgctccaattgctgatgccccatagcgcccagttcagcgtactgggaccatcaggcccaatccttgcaatggtgggggaggatgccgacctaccctgccacctgtttcccactatgtcagcagaaaccatggagctgaaatgggtctccagttctctgcgccaagtggtgaacgtctatgctgacggtaaagaggtggaggacaggcaaagcgccccatacagagggcgcacctctatactgagggatggcataaccgcaggaaaggctgctctgcggattcataatgtgacagctagtgactctggtaaatatctctgttatttccaggatggggacttctatgagaaggccctcgtagaacttaaggtggctgccctgggcagcgacctgcacgtcgatgtaaagggttataaagatggtggtatacacctcgagtgccgaagcacaggctggtaccctcagccacagattcagtggtccaataacaagggggaaaacatcccaaccgtcgaagcgcctgtagtggccgacggcgtggggctctatgccgtcgctgcctccgtgatcatgagaggaagcagtggtgagggtgtgtcatgtaccattcggtcctcgctcttaggactggagaaaaccgcctctatttctattgccgacccattcttccgcagtgctcagcggtggattgccgccctggccgggacactccctgtgctgctcctcctcttaggaggcgcgggctatttcctgtggcaacagcaggaggagaagaaaacgcagtttaggaaaaagaagagggagcaagagctccgggagatggcttggtcaaccatgaaacaggaacaaagtacacgagtaaagttgctggaagagctgaggtggagatcaatccagtacgctagtcgaggcgaaaggcacagcgcctacaacgagtggaaaaaggctctgttcaaaccagccgacgtgattttagatccgaagactgccaaccccattcttctggtcagcgaggatcagaggtctgtgcaaagagccaaagaaccccaggatttgcccgacaatcccgaacgcttcaattggcactactgtgtcctcggttgcgaaagttttatatccgggcgacattattgggaagtcgaggtcggcgaccgtaaggaatggcatattggtgtgtgttcaaaaaacgtccagcggaaagggtgggtgaagatgaccccggagaacggattttggactatgggtctaaccgatggtaataaatatagaacactcacggaacctcgcactaacctcaagttaccaaaacctcccaagaaggtaggagtcttcctggactacgagaccggagatatttctttttacaacgccgtggatggatcccacatccatactttcctcgatgtgtctttttcagaagctctttatccggtgtttcggattctcaccctggagcccactgctctgactatctgcccggcttag

SEQ ID NO: 170011 - DNA, 1542 bp, Artificial Sequence
  derived and/or modified sequence
atgaagatggccagcttcctggccttcctgctgctgaacttccgggtgtgcctgctgctgctgcagctgctgatgccccacagcgcccagttctctgtgctgggccccagcggccccatcctggccatggtgggggaggatgctgacctgccctgccacctgttccccaccatgtctgctgagaccatggagctgaagtgggtgagcagcagcctgcggcaggtggtgaatgtgtatgcagatggcaaggaggtggaggaccggcagagcgccccctaccggggccgcaccagcatcctgagagatggcatcacagctgggaaggccgccctgcgcatccacaacgtgacagccagtgacagcggcaagtacctgtgctacttccaggatggagacttctatgagaaggccctggtggagctgaaggtggccgccctgggcagtgacctgcacgtggatgtgaagggctacaaggatggcggcatccacctggagtgccgcagcacaggctggtacccccagccccagatccagtggagcaacaacaagggggagaacatccccaccgtggaggcccctgtggtggctgatggagtgggcctgtatgctgtggccgccagcgtcatcatgaggggcagcagcggggagggcgtgtcctgcaccatccgcagcagcctgctgggcctggagaagacagccagcatcagcattgctgaccccttcttccgcagcgcccagcgctggattgctgccctggccggcaccctgcctgtgctgctgctgctgctgggcggggccggctacttcctgtggcagcagcaggaggagaagaagacccagttcaggaagaagaagcgggagcaggagctgcgggagatggcctggagcaccatgaagcaggagcagagcaccagggtgaagctgctggaggagctgcgctggaggagcatccagtatgccagcagaggagagcggcacagcgcctacaatgagtggaagaaggccctcttcaagccagcagatgtgatcctggaccccaagacagccaaccccatcctgctggtgtctgaggaccagaggtctgtgcagagggccaaggagccccaggacctgcctgacaaccctgagcgcttcaactggcactactgtgtgctgggctgtgagagcttcatcagcggccgccactactgggaggtggaggtgggggacaggaaggagtggcacatcggcgtgtgcagcaagaatgtgcagaggaagggctgggtgaagatgaccccagaaaatggcttctggaccatgggcctgacagatggcaacaagtaccgcaccctgacagagcccaggaccaacctgaagctgcccaagccacccaagaaggtgggcgtcttcctggactatgagaccggggacatctccttctacaatgctgtggatggcagccacatccacaccttcctggatgtgtccttcagcgaggccctgtaccctgtgttccgcatcctgaccctggagcccacagccctgaccatctgcccagcctag

SEQ ID NO: 170012 - DNA, 1542 bp, Artificial Sequence
  derived and/or modified sequence
atgaagatggccagcttcctggccttcctgctgctgaacttccgggtgtgtctcctattacttcagctgcttatgccccattctgcccagttcagcgtgctgggacccagtggccctatcttggcaatggttggggaagacgccgacctcccctgccacctatttcctacgatgtccgcggaaacaatggaactaaaatgggtgagctcttctctccgccaagtcgtaaacgtgtatgccgatggaaaagaagtcgaggataggcagtccgcgccataccgaggaaggacttctatcctgagagatggaatcaccgccggcaaagccgcattaaggatccacaatgtgaccgccagcgacagtggaaaatatctttgttactttcaagacggcgacttttatgagaaagctttggtggaactgaaggtggccgccttgggctccgacctgcatgtagatgttaagggatataaggacggtggtatacatttggagtgccgctcaaccggctggtacccacagccccaaatccagtggagcaataataaaggggagaacattccaactgtggaggctcctgtagtcgctgatggcgtgggactttatgccgtggccgccagtgttatcatgaggggctccagtggagagggcgtctcatgcacaatcaggtcttctttgcttgggttagagaagaccgcctctatatctatcgccgacccgttttttaggagcgcccagcgctggatcgctgcgctagccggtaccctcccggtgctgttgttgttgctgggaggtgctggatactttctgtggcagcagcaggaagagaagaagacacagttccgaaagaagaaacgagaacaagagctaagggagatggcatggtcgacaatgaaacaagagcagtctactcgggttaagttgctcgaggaattgcggtggcggtcaatccaatatgcatcccgtggagagagacatagtgcgtataacgaatggaagaaagctcttttcaagccagccgatgtcattctcgacccaaagaccgccaatcctatcttgcttgtgagcgaggaccagaggagcgtgcagagagcaaaggaaccgcaggacctgcccgacaaccccgaacgatttaactggcactattgcgtgctcggctgcgagtccttcatttccggcagacactactgggaagttgaagtcggtgaccgcaaggaatggcatatcggagtctgtagcaaaaacgtacagcgtaagggatgggttaagatgacgcccgaaaacgggttttggaccatgggtctcactgacggtaacaagtaccggacgctgaccgaacctaggaccaacttaaaactccccaaacctcctaagaaagtcggagtctttctggactatgaaactggcgatatctcattctataatgcggtggatggcagccacatccacactttcttggacgtcagcttcagtgaggcactgtaccccgtcttccgaattctaacacttgagccaaccgccctaacgatttgtcccgcctag

SEQ ID NO: 170013 - DNA, 1542 bp, Artificial Sequence
  derived and/or modified sequence
atgaaaatggcctcatttctggcattcctcctgcttaattttcgtgtgtgccttctgcttctacaattgctgatgcctcattctgcacaatttagcgtcctgggaccgagtgggcctatactggcaatggtgggagaggacgcagacttgccttgtcacctgttcccaactatgtccgccgagactatggagctgaagtgggttagctcctccctgagacaggtggtaaacgtttacgctgacggcaaggaggtggaagaccgacagagtgccccatataggggacgcaccagcattcttagagacggaatcactgccggtaaagccgcactcaggattcacaacgtaacagccagcgacagcggcaagtatctgtgttactttcaagatggcgatttttatgagaaagctctggtagagttaaaagtcgctgctcttgggtctgatttgcacgtcgatgtaaagggctacaaagacggcggtattcacctggaatgtaggagtaccgggtggtatcctcagccgcagatacaatggtccaataataaaggggagaatattccaactgtggaggcaccagtggttgccgacggtgtgggtctgtacgccgtcgccgctagtgttattatgcggggttcctccggagagggagtttcttgtaccattaggtcctctctgctgggcctggagaagacggcatctatctctatagccgatcctttcttcaggagtgcccagcgatggattgcagcactggctggaacgctgcctgtgctcctgctcctgttggggggagcagggtatttcttgtggcagcagcaggaagagaagaagacccagtttagaaaaaaaaagagagagcaggagcttcgcgaaatggcatggtcgacaatgaaacaggagcagagtacacgcgtaaaacttttggaagaactgcggtggagatctatccaatatgcttcccgcggagagcggcactcggcttacaacgaatggaaaaaagcacttttcaaacctgccgacgtgattctggatcctaaaacagcaaatccgatccttctcgtgtcagaggaccagaggagcgtgcagcgggctaaggagccccaagacctgcctgataatccggagcgtttcaattggcattattgtgttcttggctgtgaaagcttcatatccggcaggcattactgggaagttgaggtcggagatcgtaaggaatggcatattggcgtctgcagcaaaaacgtacagcggaagggatgggtgaaaatgacacctgagaacggcttttggacaatgggactcaccgacggcaacaagtaccggacactgactgagcccaggaccaacctgaagcttcctaaacccccaaagaaggtgggcgtttttcttgactacgaaacaggggacatttccttttataacgcagtggatggtagccatatccacactttcttggatgtgagcttttccgaagcactttatccagtgtttcgtatccttacactggagcctacagctctgaccatttgccctgcttag

SEQ ID NO: 170014 - DNA, 3434 bp, Artificial Sequence
  derived and/or modified sequence
aatcaaaaaacttattcttccaaagagagattgttattattcctcacgatgacccgacagtctctgctttctttttcctttcttccagaaggagatttaaccatagtagaaagaatggagaactattaactgcctttcttctgtgggctgtgattttcagaggggaatgctaagaggtgattttcaatgttgggactcaaaggtgaagacactgaaggacagaatttttggcagaggaaagatcttcttcggtcaccatacttgagttagctctagggaagtggaggtttccatttggaattctatagcttcttccaggtcatagtgtctgccccccaccttccagtatctcctgatatgcagcatgaatgaaaatggcaagtttcctggccttccttctgctcaactttcgtgtctgcctccttttgcttcagctgctcatgcctcactcagctcagttttctgtgcttggaccctctgggcccatcctggccatggtgggtgaagacgctgatctgccctgtcacctgttcccgaccatgagtgcagagaccatggagctgaagtgggtgagttccagcctaaggcaggtggtgaacgtgtatgcagatggaaaggaagtggaagacaggcagagtgcaccgtatcgagggagaacttcgattctgcgggatggcatcactgcagggaaggctgctctccgaatacacaacgtcacagcctctgacagtggaaagtacttgtgttatttccaagatggtgacttctatgaaaaagccctggtggagctgaaggttgcagcactgggttctgatcttcacgttgatgtgaagggttacaaggatggagggatccatctggagtgcaggtccactggctggtacccccaaccccaaatacagtggagcaacaacaagggagagaacatcccgactgtggaagcacctgtggttgcagacggagtgggcctgtatgcagtagcagcatctgtgatcatgagaggcagctctggggagggtgtatcctgtaccatcagaagttccctcctcggcctggaaaagacagccagcatttccatcgcagaccccttcttcaggagcgcccagaggtggatcgccgccctggcagggaccctgcctgtcttgctgctgcttcttgggggagccggttacttcctgtggcaacagcaggaggaaaaaaagactcagttcagaaagaaaaagagagagcaagagttgagagaaatggcatggagcacaatgaagcaagaacaaagcacaagagtgaagctcctggaggaactcagatggagaagtatccagtatgcatctcggggagagagacattcagcctataatgaatggaaaaaggccctcttcaagcctgcggatgtgattctggatccaaaaacagcaaaccccatcctccttgtttctgaggaccagaggagtgtgcagcgtgccaaggagccccaggatctgccagacaaccctgagagatttaattggcattattgtgttctcggctgtgagagcttcatatcagggagacattactgggaggtggaggtaggggacaggaaagagtggcatataggggtgtgcagtaagaatgtgcagagaaaaggctgggtcaaaatgacacctgagaatggattctggactatggggctgactgatgggaataagtatcggactctaactgagcccagaaccaacctgaaacttcctaagccccctaagaaagtgggggtcttcctggactatgagactggagatatctcattctacaatgctgtggatggatcgcatattcatactttcctggacgtctccttctctgaggctctatatcctgttttcagaattttgaccttggagcccacggccctgactatttgtccagcgtgaaaagaagaagagagttcctccaattctgaccgagtgctgatcattccctagagacaccagtaaccccgggcttagctaacgaaagtggggagcctcaggctgaagtaacttttctctgcttctccctgcccagctcagagctgagggcctccccctccacagcaaccaatcacaaccataaagctacaagcacgcactgaagcactttactgatactcattcaattattcatatgacagttgtttgagtttggtaccatcttattttccccttatacagataaggaaactggggtgcagaaaagtgaattgactacaaagtagacatgactagttaacaacacagctgggatctaaacagcaataactaacattaatggagaacttaaaatgctctgagtgctgtgttatgagctttggtggatgtcactcctttaatcctcgcaacaccctgtcgggtagtctcatttagcaagtatggaagttgaggcagggcaacattaagcaacttacataactcatgcagtaatttctgcagttgggagatgttcagcttcagtccccggccctatggccgttcttttccaccctgtttcttcccccataggaagaacccacctgtagccctgaggttcttttcccaggatggctccaggataaggatcactgtaggtggttgtggagttgacacccctgttgactccttcccagctgattgtcagagccttagacccagcacgccttggattagctctgcagagtgtcttggttgagagaataacctcaccgtacccacatgacacgtgatttggaaagagactagaggccacacttgataaatcatggggaacagatgtgttccacccaacaaatgtgataagtgatcatgcagccagagccagccttccttcaatcaaggtttccaggcagagcaaataccctagagattctctgtgatataggaaatttggatgaagggagctagaagaaatacagggatttttttttttttttaagatggagtcttactctgttgctaggctggagtgcagtggtgcgatctcagctccctgcaacctccacctcctgggttcaaacaattctcctgcctcagcctcccgagtactgggaatataggtgcacgccaccacacccaacaaatttttgtacttttagtacagatgagggttcactatgttggccaggatggtctcgatctcttgacctcatgatccacccacctcggtctcccaaagtgctgggattacaggcttgagccaccgggtgaccggcttacagggatatttttaatcccgttatggactctgtctccaggagaggggtctatccacccctgctcattggtggatgttaaaccaatattcctttcaactgctgcctgctagggaaaaactactcctcattatcatcattattattgctctccactgtatcccctctacctggcatgtgcttgtcaagttctagttgttcaataaatttgttaataatgctgactcttcaa

SEQ ID NO: 170015 - DNA, 3017 bp, Artificial Sequence
  derived and/or modified sequence
atttgctttctctttttcctttcttccggatgagaggctaagccataatagaaagaatggagaattattgattgaccgtctttattctgtgggctctgattctccaatgggaataccaagggatggttttccatactggaacccaaaggtaaagacactcaaggacagacatttttggcagagcatagatgaaaatggcaagttccctggctttccttctgctcaactttcatgtctccctcctcttggtccagctgctcactccttgctcagctcagttttctgtgcttggaccctctgggcccatcctggccatggtgggtgaagacgctgatctgccctgtcacctgttcccgaccatgagtgcagagaccatggagctgaagtgggtaagttccagcctaaggcaggtggtgaacgtgtatgcagatggaaaggaagtggaagacaggcagagtgcaccgtatcgagggagaacttcgattctgcgggatggcatcactgcagggaaggctgctctccgaatacacaacgtcacagcctctgacagtggaaagtacttgtgttatttccaagatggtgacttctatgaaaaagccctggtggagctgaaggttgcagcactgggttctaatcttcacgtcgaagtgaagggttatgaggatggagggatccatctggagtgcaggtccaccggctggtacccccaaccccaaatacagtggagcaacgccaagggagagaacatcccagctgtggaagcacctgtggttgcagatggagtgggcctatatgaagtagcagcatctgtgatcatgagaggcggctccggggagggtgtatcctgcatcatcagaaattccctcctcggcctggaaaagacagccagcatttccatcgcagaccccttcttcaggagcgcccagccctggatcgcagccctggcagggaccctgcctatcttgctgctgcttctcgccggagccagttacttcttgtggagacaacagaaggaaataactgctctgtccagtgagatagaaagtgagcaagagatgaaagaaatgggatatgctgcaacagagcgggaaataagcctaagagagagcctccaggaggaactcaagaggaaaaaaatccagtacttgactcgtggagaggagtcttcgtccgataccaataagtcagcctgatgctctaatggaaaaatggccctcttcaagcctggaaaaatggctgaccccatggacacctcctcaaactctctgcagcagatgtaattctgtatccagacatggcaaatgccatcctccttgtttctgaggaccagaggagtgtacagcgtgctgaggagccccatgacctaccagacaaccctgagagatttgaatggcgttactgtgtgcttggctgtgaaagcttcatgtcagagagacactactgggaggtggaagtgggggacagaaaagagtggcatattggggtatgtagtaagaacgtggagaggaaaaaagtttgggtcaaaatgacaccggagaacggatactggactatgggcctgactgatgggaataagtatcgggctctcactgagcccagaaccaacctgaaacttcctgagcctcctaggaaagtgggggtcatcctggactatgagactggacatatctcgttctacaatgccacggatggatctcatatctacacatttctgcacgcctcttcctctgagcctctgtatcctgtattcagaattttgaccttggagcccactgccctgaccgtttgcccaataccaaaagtagagagttcccccgatcccgacctagtgcctgatcattccctggagataccactgaccccaggcttagctaatgaaagtggggagcctcaggctgaagtaacatctctgcttctccctgcccagcctggagctaagggtctcaccctccacaacagccagtcagaaccataaagctacaggcacacactgaagcactttactgatattcattcaattattccataggacagttgtttgagtttggtgccaccttattggcccctttatacagataaggaaactggggtgtagaaaagtgtattgactttacaaagcagacaggaatagtgaacaacagagctgggatctgaacaacaatgactaacattaatggagaatttaaaacgttctgagtgctgtgttatgagctttggtgggtgtcactcctttaatcctcacaacaccctgtcaggtagtctcatttggcaagtatggaagcagaggcagggcaacattaagtagcttacataactcacacggtaatttgtgcagttgggagatgttcagcttcagtccctggccaattgcccgttcttttccagcctgatttttcctgcatgggaagagcccacatgtagccctgaggttcccttcccaggacagctccaggatcgagatcactgtgagtggttgtggagttaagacccctatggactccttcccagctgattatcagagccttagacccagcactccttggattggctctgcagagtgtcttggttgagagaataacgttgcagttcccacagggcatgtgactttgaaagagactagaggccacactcagttaataatggggcacagatgtgttcccacccaacaaatgtgataagtgatcgtgcagccagagccagccttccttcagtcaaggtttccaggcagagcaaataccctagagattctctgtaatattggtaatttggatgaaggaagctagaagaattacagggatgtttttaatcccactatggactcagtctcctggaaaaggatctgtccactcctggtcattggtggatgttaaacccatattcctttcaactgctgcctgctagggaaaactgctcctcattatcatcactattattgctcaccactgtatcccctctactgggcaagtgcttgtcaagttctagttgttcaataaatttgttaataatgctgactcttc

SEQ ID NO: 170016 - DNA, 1542 bp, Artificial Sequence
  derived and/or modified sequence
atgaagatggccagcttcctggccttcctgctgctgaacttcagagtgtgcctgctgctgctgcagctgctgatgccccacagcgcccagttcagcgtgctgggccccagcggccccatcctggccatggtgggcgaggacgccgacctgccctgccacctgttccccaccatgagcgccgagaccatggagctgaagtgggtgagcagcagcctgagacaggtggtgaacgtgtacgccgacggcaaggaggtggaggacagacagagcgccccctacagaggcagaaccagcatcctgagagacggcatcaccgccggcaaggccgccctgagaatccacaacgtgaccgccagcgacagcggcaagtacctgtgctacttccaggacggcgacttctacgagaaggccctggtggagctgaaggtggccgccctgggcagcgacctgcacgtggacgtgaagggctacaaggacggcggcatccacctggagtgcagaagcaccggctggtacccccagccccagatccagtggagcaacaacaagggcgagaacatccccaccgtggaggcccccgtggtggccgacggcgtgggcctgtacgccgtggccgccagcgtgatcatgagaggcagcagcggcgagggcgtgagctgcaccatcagaagcagcctgctgggcctggagaagaccgccagcatcagcatcgccgaccccttcttcagaagcgcccagagatggatcgccgccctggccggcaccctgcccgtgctgctgctgctgctgggcggcgccggctacttcctgtggcagcagcaggaggagaagaagacccagttcagaaagaagaagagagagcaggagctgagagagatggcctggagcaccatgaagcaggagcagagcaccagagtgaagctgctggaggagctgagatggagaagcatccagtacgccagcagaggcgagagacacagcgcctacaacgagtggaagaaggccctgttcaagcccgccgacgtgatcctggaccccaagaccgccaaccccatcctgctggtgagcgaggaccagagaagcgtgcagagagccaaggagccccaggacctgcccgacaaccccgagagattcaactggcactactgcgtgctgggctgcgagagcttcatcagcggcagacactactgggaggtggaggtgggcgacagaaaggagtggcacatcggcgtgtgcagcaagaacgtgcagagaaagggctgggtgaagatgacccccgagaacggcttctggaccatgggcctgaccgacggcaacaagtacagaaccctgaccgagcccagaaccaacctgaagctgcccaagccccccaagaaggtgggcgtgttcctggactacgagaccggcgacatcagcttctacaacgccgtggacggcagccacatccacaccttcctggacgtgagcttcagcgaggccctgtaccccgtgttcagaatcctgaccctggagcccaccgccctgaccatctgccccgcctag

SEQ ID NO: 170017 - protein, 529 aa, Artificial Sequence
  derived and/or modified sequence
MESAAALHFSRPASLLLLLLSLCALVSAQFIVVGPTDPILATVGENTTLRCHLSPEKNAEDMEVRWFRSQFSPAVFVYKGGRERTEEQMEEYRGRTTFVSKDISRGSVALVIHNITAQENGTYRCYFQEGRSYDEAILHLVVAGLGSKPLISMRGHEDGGIRLECISRGWYPKPLTVWRDPYGGVAPALKEVSMPDADGLFMVTTAVIIRDKSVRNMSCSINNTLLGQKKESVIFIPESFMPSVSPPIAVCIYWINKLQKEKKILSGEKEFERETREIALKELEKERVQKEEELQVKEKLQEELRWRRTFLHAVDVVLDPDTAHPDLFLSEDRRSVRRCPFRHLGESVPDNPERFDSQPCVLGRESFASGKHYWEVEVENVIEWTVGVCRDSVERKGEVLLIPQNGFWTLEMHKGQYRAVSSPDRILPLKESLCRVGVFLDYEAGDVSFYNMRDRSHIYTCPRSAFSGPDTSQSGDPPEPIESIPWSHSHVDKPWSSQQPPHNTHLPAASFTPTTDLSPSFLLLTRLCF

SEQ ID NO: 170018 - protein, 527 aa, Artificial Sequence
  derived and/or modified sequence
MESAAALHFSRPASLLLLLLSLCALVSAQFIVVGPTDPILATVGENTTLRCHLSPEKNAEDMEVRWFRSQFSPAVFVYKGGRERTEEQMEEYRGRTTFVSKDISRGSVALVIHNITAQENGTYRCYFQEGRSYDEAILHLVVAGLGSKPLISMRGHEDGGIRLECISRGWYPKPLTVWRDPYGGVAPALKEVSMPDADGLFMVTTAVIIRDKSVRNMSCSINNTLLGQKKESVIFIPESFMPSVSPCAVALPIIVVILMIPIAVCIYWINKLQKEKKILSGEKEFERETREIALKELEKERVQKEEELQVKEKLQEELRWRRTFLHAVDVVLDPDTAHPDLFLSEDRRSVRRCPFRHLGESVPDNPERFDSQPCVLGRESFASGKHYWEVEVENVIEWTVGVCRDSVERKGEVLLIPQNGFWTLEMHKGQYRAVSSPDRILPLKESLCRVGVFLDYEAGDVSFYNMRDRSHIYTCPRSAFSVPVRPFFRLGCEDSPIFICPALTGANGVTVPEEGLTLHRVGTHQSL

SEQ ID NO: 170019 - protein, 466 aa, Artificial Sequence
  derived and/or modified sequence
MEVRWFRSQFSPAVFVYKGGRERTEEQMEEYRGRTTFVSKDISRGSVALVIHNITAQENGTYRCYFQEGRSYDEAILHLVVAGLGSKPLISMRGHEDGGIRLECISRGWYPKPLTVWRDPYGGVAPALKEVSMPDADGLFMVTTAVIIRDKSVRNMSCSINNTLLGQKKESVIFIPESFMPSVSPCAVALPIIVVILMIPIAVCIYWINKLQKEKKILSGEKEFERETREIALKELEKERVQKEEELQVKEKLQEELRWRRTFLHAVDVVLDPDTAHPDLFLSEDRRSVRRCPFRHLGESVPDNPERFDSQPCVLGRESFASGKHYWEVEVENVIEWTVGVCRDSVERKGEVLLIPQNGFWTLEMHKGQYRAVSSPDRILPLKESLCRVGVFLDYEAGDVSFYNMRDRSHIYTCPRSAFSVPVRPFFRLGCEDSPIFICPALTGANGVTVPEEGLTLHRVGTHQSL

SEQ ID NO: 170020 - DNA, 1590 bp, Artificial Sequence
  derived and/or modified sequence
atggagtctgccgcagctctccattttagcagacccgccagccttctcttgctcctgctgagcttgtgtgctctggtgagtgcgcagttcatagtcgtcggaccaactgacccgatcctggcgactgtgggcgaaaacaccacactgagatgtcatctttctcctgaaaaaaacgccgaggacatggaggtccgatggttcaggagtcaattcagccctgccgtgtttgtgtacaaaggggggcgggagcgtacagaagaacaaatggaggagtacaggggcaggactacctttgtttctaaagatatatcacgagggtccgtggctctggtcatccacaacattaccgcgcaggagaacgggacctatcgatgctacttccaggaggggagaagctatgacgaggcgatcctccacctagtcgtggctgggcttgggtcgaaacctctaatctcaatgcgcggccacgaggatggtgggattcgtcttgaatgcatatcgcgcgggtggtaccccaagccactgacggtgtggcgggacccttatggcggggtagcacccgccctgaaggaggtgtccatgccagacgctgatggcctcttcatggtgacaacggccgtcatcatacgggataaaagcgtgcgcaacatgtcctgcagcattaacaacactctgctcggccaaaaaaaggagtctgttatctttataccggagagttttatgccgtccgtgagccctccgatcgccgtgtgcatttactggataaacaaactccaaaaggagaaaaaaatcctgtcaggcgagaaagaatttgaaagagagacccgtgagatagctttaaaggaactggaaaaagagagagtgcagaaggaagaagagcttcaggtgaaagagaagctgcaggaagaacttagatggcgtagaacctttttacacgccgtcgacgtagtgctggacccggataccgctcaccccgatttgtttctctctgaagaccggcgaagtgtcaggcgctgtcctttcaggcaccttggtgaatcagtgccagataacccagagagatttgacagccagccttgcgtcctggggcgagagtcattcgcttccgggaagcattattgggaagtcgaagtggaaaatgtgatagagtggaccgtcggcgtttgtagagacagcgtggagaggaaaggcgaggttctgctgatccctcagaatgggttttggacactggagatgcacaaagggcagtatagggctgtttcttcacccgaccgcattctaccccttaaagagtcactgtgccgtgttggggtatttctcgattatgaagcaggggacgtgagtttttataatatgcgagacagatcccatatctacacttgtccacgttctgccttcagcggacccgacacttctcagtccggggacccccctgaacccattgagagtatcccatggagtcattctcatgttgataagccttggagttctcaacagccaccccacaatactcacctccccgcagctagtttcacccctacgactgatttgtcacctagttttttactgctcacaaggctgtgtttttag

SEQ ID NO: 170021 - DNA, 1584 bp, Artificial Sequence
  derived and/or modified sequence
atggagtctgctgctgctctgcacttttcgcgccctgctagtcttttactgcttttgctgagcctttgcgccctcgtatcagcccaattcattgtcgtcggccccaccgatcctatccttgcgacagtgggcgagaatacgacattgagatgtcacctcagccctgagaaaaacgctgaagatatggaggtacgctggtttaggagccagttctccccggcagtctttgtctacaagggaggaagggaacggacggaggaacagatggaagaatatcgaggaagaaccacctttgtaagcaaggatatcagtagagggtcggtagctcttgtaatccacaacattaccgctcaggagaacggcacgtatagatgctactttcaagaaggccgaagttacgacgaagcaatcctgcatctggttgtagcgggactgggcagcaaacccctcatcagtatgagaggccatgaggacggcgggattcgactagaatgtatcagccgcgggtggtatcctaagcctcttactgtctggcgggatccctacgggggagtggcacccgcgctgaaagaggtgtctatgccagacgctgatggcctgttcatggtaacgaccgcggttatcataagagacaagtctgttaggaatatgagttgtagcatcaacaacacgctgttaggtcagaagaaggaaagcgtcatctttattcctgagagctttatgcctagtgtatccccctgcgccgtggccttaccgatcatagtcgtcatactgatgataccaattgctgtatgcatttattggataaacaaactacagaaggaaaaaaagattctgtctggggagaaagagtttgagagggagactagagaaattgctttaaaagagttggagaaggaacgcgtgcagaaggaagaggagcttcaggtcaaggagaaactgcaagaggaattaagatggaggaggacctttctgcacgctgtggacgtggtgttggacccagatactgctcaccccgacctctttcttagtgaagaccgtcggtccgtcaggaggtgccctttcagacacctgggcgaaagtgtgccagataacccggagaggttcgattcccagccctgtgtgctaggcagagaatcctttgcaagcggcaaacactattgggaagtcgaggttgaaaatgtgatcgagtggaccgttggcgtctgtagagatagcgtggagcgtaagggcgaagttctgctcatcccgcaaaacggattctggacactggagatgcataagggacagtacagggctgtgtcatcacccgatcgaatcctcccccttaaggagagcctctgccgggtcggggtctttctcgattatgaggcgggagacgtgtccttctacaacatgcgagatcggtcccatatctatacctgcccaagatcagccttcagcgtgccggttaggcccttttttaggcttggctgtgaggattctcccatttttatctgtccagcactaacaggagccaatggggtcaccgtccctgaggagggcctgaccctgcacagagtcggcacccatcagagcctgtag

SEQ ID NO: 170022 - DNA, 1590 bp, Artificial Sequence
  derived and/or modified sequence
atggagagcgctgctgccctgcacttcagcaggcctgccagcctgctgctgctgctgctgagcctgtgtgccctggtgtctgcccagttcatcgtggtgggccccacagaccccatcctggccaccgtgggggagaacaccaccctgcgctgccacctgagccctgagaagaatgctgaggacatggaggtgcgctggttccgcagccagttctccccagctgtgtttgtgtacaagggcggccgggagaggacagaggagcagatggaggagtaccggggccgcaccacctttgtgtccaaggacatcagccggggctctgtggccctggtgatccacaacatcacagcccaggagaatggcacctaccgctgctacttccaggagggccgctcctatgatgaggccatcctgcacctggtggtggccggcctgggcagcaagcccctcatctccatgaggggccatgaagatggcggcatccggctggagtgcatcagccggggctggtaccccaagcccctgactgtgtggagggacccctacggcggcgtggccccagccctgaaggaggtgtccatgccagatgctgatggcctcttcatggtgaccacagctgtgatcatccgggacaagtctgtgaggaacatgagctgcagcatcaacaacaccctgctgggccagaagaaggagagcgtcatcttcatccctgagagcttcatgcccagcgtgagcccccccatcgctgtgtgcatctactggatcaacaagctgcagaaggagaagaagatcctgagcggggagaaggagtttgagcgggagacccgggagatcgccctgaaggagctggagaaggagcgggtgcagaaggaggaggagctgcaggtgaaggagaagctgcaggaggagctgcgctggaggaggaccttcctgcatgctgtggatgtggtgctggaccctgacacagcccacccagacctcttcctgtctgaagatagaagatctgtgcggcgctgccccttccgccacctgggggagagcgtgcctgacaaccctgagagatttgacagccagccctgtgtgctgggccgggagagctttgccagcggcaagcactactgggaggtggaggtggagaatgtcatcgagtggacagtgggcgtgtgccgggacagcgtggagaggaagggggaggtgctgctgatcccccagaatggcttctggaccctggagatgcacaagggccagtacagagctgtgagcagcccagaccgcatcctgcccctgaaggagagcctgtgccgggtgggcgtcttcctggactatgaggccggagatgtgtccttctacaacatgagggacaggagccacatctacacctgccccaggtctgccttcagcggccctgacaccagccagagcggggaccccccagagcccatcgagagcatcccctggagccacagccacgtggacaagccctggagcagccagcagcccccccacaacacccacctgcctgctgccagcttcacccccaccacagacctgagccccagcttcctgctgctgacccggctgtgcttctag

SEQ ID NO: 170023 - DNA, 1584 bp, Artificial Sequence
  derived and/or modified sequence
atggagagcgctgctgccctgcacttcagcaggcctgccagcctgctgctgctgctgctgagcctgtgtgccctggtgtctgcccagttcatcgtggtgggccccacagaccccatcctggccaccgtgggggagaacaccaccctgcgctgccacctgagccctgagaagaatgctgaggacatggaggtgcgctggttccgcagccagttctccccagctgtgtttgtgtacaagggcggccgggagaggacagaggagcagatggaggagtaccggggccgcaccacctttgtgtccaaggacatcagccggggctctgtggccctggtgatccacaacatcacagcccaggagaatggcacctaccgctgctacttccaggagggccgctcctatgatgaggccatcctgcacctggtggtggccggcctgggcagcaagcccctcatctccatgaggggccatgaagatggcggcatccggctggagtgcatcagccggggctggtaccccaagcccctgactgtgtggagggacccctacggcggcgtggccccagccctgaaggaggtgtccatgccagatgctgatggcctcttcatggtgaccacagctgtgatcatccgggacaagtctgtgaggaacatgagctgcagcatcaacaacaccctgctgggccagaagaaggagagcgtcatcttcatccctgagagcttcatgcccagcgtgagcccctgtgctgtggccctgcccatcatcgtggtgatcctgatgatccccatcgctgtgtgcatctactggatcaacaagctgcagaaggagaagaagatcctgagcggggagaaggagtttgagcgggagacccgggagatcgccctgaaggagctggagaaggagcgggtgcagaaggaggaggagctgcaggtgaaggagaagctgcaggaggagctgcgctggaggaggaccttcctgcatgctgtggatgtggtgctggaccctgacacagcccacccagacctcttcctgtctgaagatagaagatctgtgcggcgctgccccttccgccacctgggggagagcgtgcctgacaaccctgagagatttgacagccagccctgtgtgctgggccgggagagctttgccagcggcaagcactactgggaggtggaggtggagaatgtcatcgagtggacagtgggcgtgtgccgggacagcgtggagaggaagggggaggtgctgctgatcccccagaatggcttctggaccctggagatgcacaagggccagtacagagctgtgagcagcccagaccgcatcctgcccctgaaggagagcctgtgccgggtgggcgtcttcctggactatgaggccggagatgtgtccttctacaacatgagggacaggagccacatctacacctgccccaggtctgccttctctgtgcctgtgcggcccttcttccggctgggctgtgaggacagccccatcttcatctgcccagccctgaccggggccaatggagtgacagtgcctgaggagggcctgaccctgcaccgggtgggcacccaccagagcctgtag

SEQ ID NO: 170024 - DNA, 1590 bp, Artificial Sequence
  derived and/or modified sequence
atggagagcgccgccgccctgcacttcagccggcccgccagcctgttgctgctgctcctgtctctatgcgccctggtttcagctcagttcatagttgtcggccccacagatccaattttagccacagtgggagagaatactactctgagatgccatctctcccctgagaaaaatgcagaggatatggaagtgcggtggttccggagccagttctcgccagcagtgttcgtgtataagggcggtagggaacggactgaggaacagatggaggaatatcgagggcgcactacctttgtgtcaaaagatatctcgaggggttctgtggcactggttatacacaatatcacggcacaggagaacggcacatatagatgttatttccaggagggtaggagttacgacgaggctatccttcacttggttgtggccgggcttggatccaagcctctcatctcaatgcgcgggcacgaagacggagggattcgtttagagtgtattagtcgggggtggtacccgaagcctctcactgtgtggcgggatccatatggtggggttgcgccagcactcaaagaggtgtccatgcctgacgccgatggtctcttcatggtgaccaccgccgtgatcattagggataagtcagtacgaaatatgtcctgcagcataaacaacaccttgttggggcagaagaaagagtctgtgatcttcatcccagaatctttcatgccatccgtgtcgcctccgatcgctgtgtgcatctactggatcaataagctgcagaaagaaaagaaaattctcagtggcgagaaagagttcgaaagggaaacaagagagatcgctttgaaggaactggaaaaagagagggtgcaaaaggaggaggagctccaagtgaaggaaaaattacaagaggagctgcggtggcggagaacgtttcttcacgcggtggacgtggttttagacccagatactgcccacccagatctgtttcttagcgaggatcggcgatcagttagacgctgtccatttaggcacctgggagagtcagttccagacaatccggagaggttcgattcacagccgtgtgttttaggcagagagtccttcgccagcggcaaacattattgggaggttgaggtggagaatgtgatcgagtggacggtgggggtgtgcagggacagcgtggaaaggaagggcgaggtgctacttattcctcagaacgggttttggacattggagatgcacaagggacaataccgagccgtttcctcccccgacaggattttgcccctcaaagaatctctatgccgggtgggcgttttcttggattacgaggccggggacgtatccttttataacatgagagatcggagccacatctacacttgccctcgctctgccttctcagggccggatacaagtcagagcggagacccgcccgagccgatcgaatcaattccttggagtcattcacacgtcgataagccttggtcttcccagcagccacctcataacacacacctgcccgctgcctcgttcactcccacaacagacctctcaccttccttcctacttttgacacgactgtgcttctag

SEQ ID NO: 170025 - DNA, 1584 bp, Artificial Sequence
  derived and/or modified sequence
atggagagcgccgccgccctgcacttcagccggcccgccagcctgctgttgttgctgctgagcctttgtgctttagtgtctgctcaatttattgtggtggggcccaccgacccaatcttagccaccgtgggagaaaacacgaccctccgatgtcacctgagcccggaaaaaaacgctgaagatatggaagtcagatggttccggagtcagttctctccggccgtctttgtctacaaggggggacgggaacgcaccgaggaacagatggaagaataccgcggacgcacaacttttgtcagtaaggatatatctcgggggagtgtggcactggtaatacacaacatcaccgcacaggagaatggaacataccgctgttactttcaggaggggcggagctatgacgaggcaattttacatctagtggtcgcagggctgggctctaaaccccttatctcaatgcggggccatgaggacggcggtattcgtttagaatgcatatcacgcggctggtacccaaagcctttaactgtctggcgcgacccatacggtggggttgcaccagccctcaaggaagttagtatgccggatgcagacggcctgttcatggttacaactgctgttattatccgcgataagtctgtccgaaatatgtcttgcagcattaataacactctactgggacagaagaaagaatcagtgatctttattcctgaaagctttatgccgagtgtttcaccgtgtgcggtagctttgcccatcattgtggtcatccttatgattccaattgctgtttgcatatattggataaacaagttacaaaaagaaaaaaaaatcttgagcggcgaaaaagaatttgaaagagagacacgggaaattgccttgaaagagctggaaaaagagcgtgttcaaaaagaagaagagctgcaggtgaaggagaaactacaggaggagcttcggtggcgcaggacattccttcacgccgtcgacgtggttctcgatccggacaccgcacacccagacctctttctctcagaggataggaggagcgtccgacgatgcccatttaggcatcttggggaatctgtgccagataaccctgagagattcgacagccagccttgtgtcttgggccgggagagttttgccagcggcaaacattactgggaggtggaagtggaaaacgtgattgaatggaccgtaggcgtttgtagagactccgtggagcgcaaaggcgaagtgttactgatcccacaaaacggtttctggaccctcgagatgcataaaggacagtatagagccgtctccagcccagaccggatcctcccgctcaaggaaagtctttgtagagtcggagtctttctggattacgaagcaggcgacgttagtttttataacatgcgcgatcgctcacacatctatacatgtccacggtccgctttctctgtgcctgtgagaccattttttcgactcggttgcgaagactcgcctatttttatctgccctgcactcactggtgctaatggcgtaacagttccagaggagggactgaccctgcacagggtcggtacccatcagagcctctag

SEQ ID NO: 170026 - DNA, 1590 bp, Artificial Sequence
  derived and/or modified sequence
atggagagcgccgcagcactccatttctcccggcctgccagcttgctgttactgctgctttcgttgtgcgctcttgtcagtgctcagtttatagttgtaggccctactgatcctattctggcaaccgtcggggagaatacgaccttaaggtgtcatctgtcacccgagaagaatgctgaagacatggaggtgaggtggtttaggtcgcagttctcacctgccgtgttcgtatataaaggcggacgagaacgaacagaggagcaaatggaggagtaccggggaagaacaacctttgtgagcaaagatatctcgcgtggatcagtcgccttagtgatccacaacatcaccgcccaggagaacggcacgtaccggtgttatttccaggagggcagaagttatgacgaagctattctccatctggtggtggccggtctgggcagcaaaccattaatctcgatgagaggccacgaggatggagggatccgactggaatgtatctctcgcggatggtaccctaagcctttaaccgtatggcgcgatccttatggaggagtggctcctgccctgaaagaggtaagcatgccagacgcggacgggttattcatggtgacaactgccgtcatcatccgtgacaaatccgttaggaacatgtcctgtagcatcaacaacaccttattgggccaaaagaaagagagcgtaatctttatcccggagtcatttatgccttctgtttcaccgcctattgccgtctgtatctattggataaacaaactgcagaaagaaaaaaaaatcctgagtggcgaaaaggaatttgagagggagacacgcgagattgccctcaaagagctcgaaaaagagagggtgcaaaaggaagaggaactgcaggtgaaagaaaagctgcaagaggaactgaggtggcggaggacttttctgcatgcagtggacgtagtccttgacccggacaccgcgcatccagacttgtttctctcagaagacaggcgctctgtgaggaggtgccctttccgacatttgggtgagtccgtcccagataaccctgagcggttcgattctcagccttgtgtcctgggcagagaaagcttcgcatctggcaagcactattgggaagtggaggtagaaaatgtcatcgagtggacggtgggggtgtgtagggactcagtcgaaaggaagggtgaagtcctactgatcccccaaaacggcttttggacgttggaaatgcacaaaggccagtatagagccgtctcttccccagataggattctccctctgaaagaatccttgtgtagggtgggtgtgttcttggattacgaagccggagatgtctctttctacaacatgcgggatcgcagccacatctatacctgcccacggtcagctttttctggaccagatacgagccaatctggggaccccccagagccaatagagtccatcccctggtcccatagccatgtggacaaaccttggtccagtcagcaaccacctcacaatacccacctgccagcagcttcattcaccccaacaaccgatttgtcccctagtttcttgctcctcacccgcctctgtttctag

SEQ ID NO: 170027 - DNA, 1584 bp, Artificial Sequence
  derived and/or modified sequence
atggagtcagctgccgctcttcacttctcgagacctgccagcctgcttctcctgctcttgagtctttgtgccctagtctccgcgcaattcattgtggtgggcccaactgacccaatcctggccaccgtaggagaaaacacaacacttaggtgccatctgagtcctgaaaaaaacgccgaggatatggaggtgagatggttcagatcacaattctcccctgctgtgttcgtatataaggggggacgcgagcggactgaggaacagatggaagagtacaggggaaggacaacattcgtgtccaaggatatcagtcgcggaagcgtggcactcgttatacacaacattactgcccaggagaatgggacctaccgttgctacttccaggagggcaggtcctacgacgaggccattctgcacctggtggtagcgggattgggatcaaagcccttgatctctatgagggggcatgaggacggcggaattcgactagaatgcataagcaggggatggtacccaaagcctttgacagtgtggcgagacccttacggcggtgtggcacctgctctcaaagaagtcagtatgcccgatgcagatggcctcttcatggtgaccactgcagtgataattcgagataaatctgttagaaacatgtcatgttcaattaacaatacactgctcggacagaagaaagagagtgtgatctttatccctgagtcctttatgccaagcgtcagcccttgtgccgtggctttacctatcattgtcgttattctgatgatccctatagcggtgtgcatatactggatcaataagttgcagaaagagaagaagatcttgagcggggagaaggagtttgaacgggagacacgtgaaattgctctgaaggagctggaaaaggaaagagtccagaaggaagaagaactgcaggttaaagaaaaactgcaggaagaactcagatggcggaggacgttcctccacgcggtggacgtggtattggaccccgataccgcccatccagatctcttcttatctgaggataggaggagcgttcggaggtgcccatttaggcacctaggtgagtcggtgcccgataatccagaacggttcgactcgcagccgtgtgtgctcgggcgagagtctttcgcatctgggaagcactattgggaggtggaggtggaaaatgttatcgagtggaccgtgggggtttgcagggatagtgtcgagaggaagggagaggtgctgcttatcccgcagaacggcttctggactctcgaaatgcacaagggtcaatatcgggctgtgtctagtccggacagaatcctgcctctcaaagagtcgttgtgccgcgtgggtgtgttcctggattatgaagccggagacgttagtttttataatatgagagaccgaagtcatatatatacctgccctcggagtgcattctctgttccagtgcgcccttttttcagactcggatgtgaagactcacctatttttatctgtccagctttgactggtgccaacggggtcacggtgccagaagagggtctgaccctgcatcgggttgggacccaccagagcctctag

SEQ ID NO: 170028 - DNA, 1802 bp, Artificial Sequence
  derived and/or modified sequence
cgtttcctgcatctccaaacatggcgacctaggagaaggggaagaacaattttttctcctcttttgggaaggtttgtgtctagtagtgcctgtgcccctgggcagattggagagaagagggacgactggagaatcgtcgagaaccagcggagaaaagaaaaagcaacgtttaattctagaaggcctcctgtccctgcctgctctgggtgctcatggaatcagctgctgccctgcacttctcccggccagcctccctcctcctcctcctcctcagcctgtgtgcactggtctcagcccagtttattgtcgtggggcccactgatcccatcttggccacggttggagaaaacactacgttacgctgccatctgtcacccgagaaaaatgctgaggacatggaggtgcggtggttccggtctcagttctcccccgcagtgtttgtgtataaaggtggcagagagagaacagaggagcagatggaggagtaccgaggaagaaccacctttgtgagcaaagacatcagcaggggcagcgtggccctggtcatacacaacatcacagcccaggaaaacggcacctaccgctgttacttccaagaaggcaggtcctacgatgaggccatcctgcacctcgtagtggcaggactaggctctaagcccctcatttcaatgaggggccatgaagacgggggcatccggctggagtgcatatctagagggtggtacccaaagcccctcacagtgtggagggacccctacggtggggttgcgcctgccctgaaagaggtctccatgcctgatgcagacggcctcttcatggtcaccacggctgtgatcatcagagacaagtctgtgaggaacatgtcctgctctatcaacaacaccctgctcggccagaagaaagaaagtgtcatttttattccagaatcctttatgcccagtgtgtctccccccattgccgtatgcatctattggatcaacaaactccaaaaggaaaaaaagattctgtcaggggaaaaggagtttgaacgggaaacaagagaaattgctctaaaggaactggagaaagaacgtgtgcaaaaagaggaagaacttcaagtaaaagagaaacttcaagaagaattgcgatggagaagaacattcttacatgctgttgatgtggtcctggatccagacaccgctcatcccgatctcttcctgtcagaggaccggagaagtgtgagaaggtgccccttcaggcacctaggggagagcgtgcctgacaacccagagagattcgacagtcagccttgtgtcctaggccgggagagcttcgcttcagggaaacattactgggaggtggaggtggaaaacgtgattgagtggactgtgggggtctgtagagacagtgttgagaggaaaggggaggtcctgctgattcctcagaatggcttctggaccttggagatgcataaagggcaataccgggccgtgtcctcccctgataggattctccctttgaaggagtccctttgccgggtgggcgtcttcctggactatgaagctggagatgtctccttctacaacatgagggacagatcgcacatctacacatgtccccgttcagccttttcagggcctgacacttcacagagtggggacccaccagagcctatagaatcaattccttggtctcacagccatgtagacaagccctggtcatctcagcagccaccgcacaacacccatcttccagctgcctctttcacacccactacagacctcagccccagttttctcctcctcactaggctgtgtttttag

SEQ ID NO: 170029 - DNA, 2920 bp, Artificial Sequence
  derived and/or modified sequence
actcttgggactgtggaagcccaggagaccagatttcgtttcctgcatctccaaacatggcgacctaggagaaggggaagaacaattttttctcctcttttgggaaggtttgtgtctagtagtgcctgtgcccctgggcagattggagagaagagggacgactggagaatcgtcgagaaccagcggagaaaagaaaaagcaacgtttaattctagaaggcctcctgtccctgcctgctctgggtgctcatggaatcagctgctgccctgcacttctcccggccagcctccctcctcctcctcctcctcagcctgtgtgcactggtctcagcccagtttattgtcgtggggcccactgatcccatcttggccacggttggagaaaacactacgttacgctgccatctgtcacccgagaaaaatgctgaggacatggaggtgcggtggttccggtctcagttctcccccgcagtgtttgtgtataaaggtggcagagagagaacagaggagcagatggaggagtaccgaggaagaaccacctttgtgagcaaagacatcagcaggggcagcgtggccctggtcatacacaacatcacagcccaggaaaacggcacctaccgctgttacttccaagaaggcaggtcctacgatgaggccatcctgcacctcgtagtggcaggactaggctctaagcccctcatttcaatgaggggccatgaagacgggggcatccggctggagtgcatatctagagggtggtacccaaagcccctcacagtgtggagggacccctacggtggggttgcgcctgccctgaaagaggtctccatgcctgatgcagacggcctcttcatggtcaccacggctgtgatcatcagagacaagtctgtgaggaacatgtcctgctctatcaacaacaccctgctcggccagaagaaagaaagtgtcatttttattccagaatcctttatgcccagtgtgtctccctgtgcagtggccctgcctatcattgtggttattctgatgatacccattgccgtatgcatctattggatcaacaaactccaaaaggaaaaaaagattctgtcaggggaaaaggagtttgaacgggaaacaagagaaattgctctaaaggaactggagaaagaacgtgtgcaaaaagaggaagaacttcaagtaaaagagaaacttcaagaagaattgcgatggagaagaacattcttacatgctgttgatgtggtcctggatccagacaccgctcatcccgatctcttcctgtcagaggaccggagaagtgtgagaaggtgccccttcaggcacctaggggagagcgtgcctgacaacccagagagattcgacagtcagccttgtgtcctaggccgggagagcttcgcttcagggaaacattactgggaggtggaggtggaaaacgtgattgagtggactgtgggggtctgtagagacagtgttgagaggaaaggggaggtcctgctgattcctcagaatggcttctggaccttggagatgcataaagggcaataccgggccgtgtcctcccctgataggattctccctttgaaggagtccctttgccgggtgggcgtcttcctggactatgaagctggagatgtctccttctacaacatgagggacagatcgcacatctacacatgtccccgttcagccttttccgtgcctgtgaggcccttcttcaggttggggtgtgaggacagccccatcttcatctgccctgcactcacaggagccaatggggtcacggtgcctgaagagggcctgacacttcacagagtggggacccaccagagcctatagaatcaattccttggtctcacagccatgtagacaagccctggtcatctcagcagccaccgcacaacacccctggtggaagacacgccctcctcccctctggtcacacaagagaacatcttccagctgcctctttcacacccactacagacctcagccccagttttctcctcctcactaggctgtgtttttagtagttcctttgcttgtaactatgggatgggatccaggcatagggaactagttgttacacagctcccagccaagaagaaagtgtgagaagttgatgggcagcaaacctgctgtttaacatcagggtgaccacattaagcccagtattccagttggcaccagaagatatggacttggaatgaggcctacagggttcaccaggatgtaagaggagagaggaatccacaggaccaccagagaggagagggaaccagatatgcagatcagagatagaggaagtggaaccagagagctgggagggaccaaggttgtaagggtggctaagtcccaccataacagctaaggggacctgggagatgatggctcatttccacccagccccaggatttccagagcgcacatccacaggcctggacctgggatgaagatgaatgaagaacatggatgcacgtggatgtagtttggctcaggtgtccctgcagttggcaaggagtcagtactcagtccctgagtgtggctgaaatttgaggtcctggctgagccaaggagtaatggaccagatctacctcagtattcaagttcagtggggacaccagtggcttcaaacttcctggtttcatgatatcttgagacgccttacaaatgatggaggattccaaagagtttttgtttatttgggttaatatttgttggtatttatggcatttgagattgaaactaagaaatgttttaatttattacctttacaacatttatttacattacatacatacatttacaacatttattaatttatattaaaatagcatgaataagccaattataggttaatataagtagaatgtttgtgaaaaataagtatggtatccaaagcaaaataaattttattgtgaagtgtg

SEQ ID NO: 170030 - DNA, 1780 bp, Artificial Sequence
  derived and/or modified sequence
agaccagatttcgtttcctgcatctccaaacatggcgacctaggagaaggggaagaacaattttttctcctcttttgggaaggtttgtgtctagtagtgcctgtgcccctgggcagattggagagaagagggacgactggagaatcgtcgagaaccagcggagaaaagaaaaagcaacgtttaattctagaagcccagtttattgtcgtggggcccactgatcccatcttggccacggttggagaaaacactacgttacgctgccatctgtcacccgagaaaaatgctgaggacatggaggtgcggtggttccggtctcagttctcccccgcagtgtttgtgtataaaggtggcagagagagaacagaggagcagatggaggagtaccgaggaagaaccacctttgtgagcaaagacatcagcaggggcagcgtggccctggtcatacacaacatcacagcccaggaaaacggcacctaccgctgttacttccaagaaggcaggtcctacgatgaggccatcctgcacctcgtagtggcaggactaggctctaagcccctcatttcaatgaggggccatgaagacgggggcatccggctggagtgcatatctagagggtggtacccaaagcccctcacagtgtggagggacccctacggtggggttgcgcctgccctgaaagaggtctccatgcctgatgcagacggcctcttcatggtcaccacggctgtgatcatcagagacaagtctgtgaggaacatgtcctgctctatcaacaacaccctgctcggccagaagaaagaaagtgtcatttttattccagaatcctttatgcccagtgtgtctccctgtgcagtggccctgcctatcattgtggttattctgatgatacccattgccgtatgcatctattggatcaacaaactccaaaaggaaaaaaagattctgtcaggggaaaaggagtttgaacgggaaacaagagaaattgctctaaaggaactggagaaagaacgtgtgcaaaaagaggaagaacttcaagtaaaagagaaacttcaagaagaattgcgatggagaagaacattcttacatgctgttgatgtggtcctggatccagacaccgctcatcccgatctcttcctgtcagaggaccggagaagtgtgagaaggtgccccttcaggcacctaggggagagcgtgcctgacaacccagagagattcgacagtcagccttgtgtcctaggccgggagagcttcgcttcagggaaacattactgggaggtggaggtggaaaacgtgattgagtggactgtgggggtctgtagagacagtgttgagaggaaaggggaggtcctgctgattcctcagaatggcttctggaccttggagatgcataaagggcaataccgggccgtgtcctcccctgataggattctccctttgaaggagtccctttgccgggtgggcgtcttcctggactatgaagctggagatgtctccttctacaacatgagggacagatcgcacatctacacatgtccccgttcagccttttccgtgcctgtgaggcccttcttcaggttggggtgtgaggacagccccatcttcatctgccctgcactcacaggagccaatggggtcacggtgcctgaagagggcctgacacttcacagagtggggacccaccagagcctatagaatcaattccttggtctcacagccatgtagacaagccctggtcatctcagcagccaccgcacaacacccctggtggaagacacgc

SEQ ID NO: 170031 - DNA, 1590 bp, Artificial Sequence
  derived and/or modified sequence
atggagagcgccgccgccctgcacttcagcagacccgccagcctgctgctgctgctgctgagcctgtgcgccctggtgagcgcccagttcatcgtggtgggccccaccgaccccatcctggccaccgtgggcgagaacaccaccctgagatgccacctgagccccgagaagaacgccgaggacatggaggtgagatggttcagaagccagttcagccccgccgtgttcgtgtacaagggcggcagagagagaaccgaggagcagatggaggagtacagaggcagaaccaccttcgtgagcaaggacatcagcagaggcagcgtggccctggtgatccacaacatcaccgcccaggagaacggcacctacagatgctacttccaggagggcagaagctacgacgaggccatcctgcacctggtggtggccggcctgggcagcaagcccctgatcagcatgagaggccacgaggacggcggcatcagactggagtgcatcagcagaggctggtaccccaagcccctgaccgtgtggagagacccctacggcggcgtggcccccgccctgaaggaggtgagcatgcccgacgccgacggcctgttcatggtgaccaccgccgtgatcatcagagacaagagcgtgagaaacatgagctgcagcatcaacaacaccctgctgggccagaagaaggagagcgtgatcttcatccccgagagcttcatgcccagcgtgagcccccccatcgccgtgtgcatctactggatcaacaagctgcagaaggagaagaagatcctgagcggcgagaaggagttcgagagagagaccagagagatcgccctgaaggagctggagaaggagagagtgcagaaggaggaggagctgcaggtgaaggagaagctgcaggaggagctgagatggagaagaaccttcctgcacgccgtggacgtggtgctggaccccgacaccgcccaccccgacctgttcctgagcgaggacagaagaagcgtgagaagatgccccttcagacacctgggcgagagcgtgcccgacaaccccgagagattcgacagccagccctgcgtgctgggcagagagagcttcgccagcggcaagcactactgggaggtggaggtggagaacgtgatcgagtggaccgtgggcgtgtgcagagacagcgtggagagaaagggcgaggtgctgctgatcccccagaacggcttctggaccctggagatgcacaagggccagtacagagccgtgagcagccccgacagaatcctgcccctgaaggagagcctgtgcagagtgggcgtgttcctggactacgaggccggcgacgtgagcttctacaacatgagagacagaagccacatctacacctgccccagaagcgccttcagcggccccgacaccagccagagcggcgacccccccgagcccatcgagagcatcccctggagccacagccacgtggacaagccctggagcagccagcagcccccccacaacacccacctgcccgccgccagcttcacccccaccaccgacctgagccccagcttcctgctgctgaccagactgtgcttctag

SEQ ID NO: 170032 - DNA, 1584 bp, Artificial Sequence
  derived and/or modified sequence
atggagagcgccgccgccctgcacttcagcagacccgccagcctgctgctgctgctgctgagcctgtgcgccctggtgagcgcccagttcatcgtggtgggccccaccgaccccatcctggccaccgtgggcgagaacaccaccctgagatgccacctgagccccgagaagaacgccgaggacatggaggtgagatggttcagaagccagttcagccccgccgtgttcgtgtacaagggcggcagagagagaaccgaggagcagatggaggagtacagaggcagaaccaccttcgtgagcaaggacatcagcagaggcagcgtggccctggtgatccacaacatcaccgcccaggagaacggcacctacagatgctacttccaggagggcagaagctacgacgaggccatcctgcacctggtggtggccggcctgggcagcaagcccctgatcagcatgagaggccacgaggacggcggcatcagactggagtgcatcagcagaggctggtaccccaagcccctgaccgtgtggagagacccctacggcggcgtggcccccgccctgaaggaggtgagcatgcccgacgccgacggcctgttcatggtgaccaccgccgtgatcatcagagacaagagcgtgagaaacatgagctgcagcatcaacaacaccctgctgggccagaagaaggagagcgtgatcttcatccccgagagcttcatgcccagcgtgagcccctgcgccgtggccctgcccatcatcgtggtgatcctgatgatccccatcgccgtgtgcatctactggatcaacaagctgcagaaggagaagaagatcctgagcggcgagaaggagttcgagagagagaccagagagatcgccctgaaggagctggagaaggagagagtgcagaaggaggaggagctgcaggtgaaggagaagctgcaggaggagctgagatggagaagaaccttcctgcacgccgtggacgtggtgctggaccccgacaccgcccaccccgacctgttcctgagcgaggacagaagaagcgtgagaagatgccccttcagacacctgggcgagagcgtgcccgacaaccccgagagattcgacagccagccctgcgtgctgggcagagagagcttcgccagcggcaagcactactgggaggtggaggtggagaacgtgatcgagtggaccgtgggcgtgtgcagagacagcgtggagagaaagggcgaggtgctgctgatcccccagaacggcttctggaccctggagatgcacaagggccagtacagagccgtgagcagccccgacagaatcctgcccctgaaggagagcctgtgcagagtgggcgtgttcctggactacgaggccggcgacgtgagcttctacaacatgagagacagaagccacatctacacctgccccagaagcgccttcagcgtgcccgtgagacccttcttcagactgggctgcgaggacagccccatcttcatctgccccgccctgaccggcgccaacggcgtgaccgtgcccgaggagggcctgaccctgcacagagtgggcacccaccagagcctgtag

SEQ ID NO: 170033 - protein, 1441 aa, Artificial Sequence
  derived and/or modified sequence
MASLAALALSLLLRLQLPPLPGARAQSAAGGCSFDEHYSNCGYSVALGTNGFTWEQINTWEKPMLDQAVPTGSFMMVNSSGRASGQKAHLLLPTLKENDTHCIDFHYYFSSRDRSSPGALNVYVKVNGGPQGNPVWNVSGVVTEGWVKAELAISTFWPHFYQVIFESVSLKGHPGYIAVDEVRVLAHPCRKAPHFLRLQNVEVNVGQNATFQCIAGGKWSQHDKLWLQQWNGRDTALMVTRVVNHRRFSATVSVADTAQRSVSKYRCVIRSDGGSGVSNYAELIVKEPPTPIAPPELLAVGATYLWIKPNANSIIGDGPIILKEVEYRTTTGTWAETHIVDSPNYKLWHLDPDVEYEIRVLLTRPGEGGTGPPGPPLTTRTKCADPVHGPQNVEIVDIRARQLTLQWEPFGYAVTRCHSYNLTVQYQYVFNQQQYEAEEVIQTSSHYTLRGLRPFMTIRLRLLLSNPEGRMESEELVVQTEEDVPGAVPLESIQGGPFEEKIYIQWKPPNETNGVITLYEINYKAVGSLDPSADLSSQRGKVFKLRNETHHLFVGLYPGTTYSFTIKASTAKGFGPPVTTRIATKISAPSMPEYDTDTPLNETDTTITVMLKPAQSRGAPVSVYQLVVKEERLQKSRRAADIIECFSVPVSYRNASSLDSLHYFAAELKPANLPVTQPFTVGDNKTYNGYWNPPLSPLKSYSIYFQALSKANGETKINCVRLATKGASTQNSNTVEPEKQVDNTVKMAGVIAGLLMFIIILLGVMLTIKRRRNAYSYSYYLKLAKKQKETQSGAQREMGPVASADKPTTKLSASRNDEGFSSSSQDVNGFTDGSRGELSQPTLTIQTHPYRTCDPVEMSYPRDQFQPAIRVADLLQHITQMKRGQGYGFKEEYEALPEGQTASWDTAKEDENRNKNRYGNIISYDHSRVRLLVLDGDPHSDYINANYIDGYHRPRHYIATQGPMQETVKDFWRMIWQENSASIVMVTNLVEVGRVKCVRYWPDDTEVYGDIKVTLIETEPLAEYVIRTFTVQKKGYHEIRELRLFHFTSWPDHGVPCYATGLLGFVRQVKFLNPPEAGPIVVHCSAGAGRTGCFIAIDTMLDMAENEGVVDIFNCVRELRAQRVNLVQTEEQYVFVHDAILEACLCGNTAIPVCEFRSLYYNISRLDPQTNSSQIKDEFQTLNIVTPRVRPEDCSIGLLPRNHDKNRSMDVLPLDRCLPFLISVDGESSNYINAALMDSHKQPAAFVVTQHPLPNTVADFWRLVFDYNCSSVVMLNEMDTAQFCMQYWPEKTSGCYGPIQVEFVSADIDEDIIHRIFRICNMARPQDGYRIVQHLQYIGWPAYRDTPPSKRSLLKVVRRLEKWQEQYDGREGRTVVHCLNGGGRSGTFCAICSVCEMIQQQNIIDVFHIVKTLRNNKSNMVETLEQYKFVYEVALEYLSSF

SEQ ID NO: 170034 - protein, 1444 aa, Artificial Sequence
  derived and/or modified sequence
MASLAALALSLLLRLQLPPLPGARAQSAAGGCSFDEHYSNCGYSVALGTNGFTWEQINTWEKPMLDQAVPTGSFMMVNSSGRASGQKAHLLLPTLKENDTHCIDFHYYFSSRDRSSPGALNVYVKVNGGPQGNPVWNVSGVVTEGWVKAELAISTFWPHFYQVIFESVSLKGHPGYIAVDEVRVLAHPCRKAPHFLRLQNVEVNVGQNATFQCIAGGKWSQHDKLWLQQWNGRDTALMVTRVVNHRRFSATVSVADTAQRSVSKYRCVIRSDGGSGVSNYAELIVKEPPTPIAPPELLAVGATYLWIKPNANSIIGDGPIILKEVEYRTTTGTWAETHIVDSPNYKLWHLDPDVEYEIRVLLTRPGEGGTGPPGPPLTTRTKCADPVHGPQNVEIVDIRARQLTLQWEPFGYAVTRCHSYNLTVQYQYVFNQQQYEAEEVIQTSSHYTLRGLRPFMTIRLRLLLSNPEGRMESEELVVQTEEDVPGAVPLESIQGGPFEEKIYIQWKPPNETNGVITLYEINYKAVGSLDPSADLSSQRGKVFKLRNETHHLFVGLYPGTTYSFTIKASTAKGFGPPVTTRIATKISAPSMPEYDTDTPLNETDTTITVMLKPAQSRGAPVSVYQLVVKEERLQKSRRAADIIECFSVPVSYRNASSLDSLHYFAAELKPANLPVTQPFTVGDNKTYNGYWNPPLSPLKSYSIYFQALSKANGETKINCVRLATKGASTQNSNTVEPEKQVDNTVKMAGVIAGLLMFIIILLGVMLTIKRRRNAYSYSYYLSQRKLAKKQKETQSGAQREMGPVASADKPTTKLSASRNDEGFSSSSQDVNGFTDGSRGELSQPTLTIQTHPYRTCDPVEMSYPRDQFQPAIRVADLLQHITQMKRGQGYGFKEEYEALPEGQTASWDTAKEDENRNKNRYGNIISYDHSRVRLLVLDGDPHSDYINANYIDGYHRPRHYIATQGPMQETVKDFWRMIWQENSASIVMVTNLVEVGRVKCVRYWPDDTEVYGDIKVTLIETEPLAEYVIRTFTVQKKGYHEIRELRLFHFTSWPDHGVPCYATGLLGFVRQVKFLNPPEAGPIVVHCSAGAGRTGCFIAIDTMLDMAENEGVVDIFNCVRELRAQRVNLVQTEEQYVFVHDAILEACLCGNTAIPVCEFRSLYYNISRLDPQTNSSQIKDEFQTLNIVTPRVRPEDCSIGLLPRNHDKNRSMDVLPLDRCLPFLISVDGESSNYINAALMDSHKQPAAFVVTQHPLPNTVADFWRLVFDYNCSSVVMLNEMDTAQFCMQYWPEKTSGCYGPIQVEFVSADIDEDIIHRIFRICNMARPQDGYRIVQHLQYIGWPAYRDTPPSKRSLLKVVRRLEKWQEQYDGREGRTVVHCLNGGGRSGTFCAICSVCEMIQQQNIIDVFHIVKTLRNNKSNMVETLEQYKFVYEVALEYLSSF

SEQ ID NO: 170035 - DNA, 4326 bp, Artificial Sequence
  derived and/or modified sequence
atggccagcctggccgccctggccctgagcctgctgctgagactgcagctgccccccctgcccggcgccagagcccagagcgccgccggcggctgcagcttcgacgagcactacagcaactgcggctacagcgtggccctgggcaccaacggcttcacctgggagcagatcaacacctgggagaagcccatgctggaccaggccgtgcccaccggcagcttcatgatggtgaacagcagcggcagagccagcggccagaaggcccacctgctgctgcccaccctgaaggagaacgacacccactgcatcgacttccactactacttcagcagcagagacagaagcagccccggcgccctgaacgtgtacgtgaaggtgaacggcggcccccagggcaaccccgtgtggaacgtgagcggcgtggtgaccgagggctgggtgaaggccgagctggccatcagcaccttctggccccacttctaccaggtgatcttcgagagcgtgagcctgaagggccaccccggctacatcgccgtggacgaggtgagagtgctggcccacccctgcagaaaggccccccacttcctgagactgcagaacgtggaggtgaacgtgggccagaacgccaccttccagtgcatcgccggcggcaagtggagccagcacgacaagctgtggctgcagcagtggaacggcagagacaccgccctgatggtgaccagagtggtgaaccacagaagattcagcgccaccgtgagcgtggccgacaccgcccagagaagcgtgagcaagtacagatgcgtgatcagaagcgacggcggcagcggcgtgagcaactacgccgagctgatcgtgaaggagccccccacccccatcgccccccccgagctgctggccgtgggcgccacctacctgtggatcaagcccaacgccaacagcatcatcggcgacggccccatcatcctgaaggaggtggagtacagaaccaccaccggcacctgggccgagacccacatcgtggacagccccaactacaagctgtggcacctggaccccgacgtggagtacgagatcagagtgctgctgaccagacccggcgagggcggcaccggcccccccggcccccccctgaccaccagaaccaagtgcgccgaccccgtgcacggcccccagaacgtggagatcgtggacatcagagccagacagctgaccctgcagtgggagcccttcggctacgccgtgaccagatgccacagctacaacctgaccgtgcagtaccagtacgtgttcaaccagcagcagtacgaggccgaggaggtgatccagaccagcagccactacaccctgagaggcctgagacccttcatgaccatcagactgagactgctgctgagcaaccccgagggcagaatggagagcgaggagctggtggtgcagaccgaggaggacgtgcccggcgccgtgcccctggagagcatccagggcggccccttcgaggagaagatctacatccagtggaagccccccaacgagaccaacggcgtgatcaccctgtacgagatcaactacaaggccgtgggcagcctggaccccagcgccgacctgagcagccagagaggcaaggtgttcaagctgagaaacgagacccaccacctgttcgtgggcctgtaccccggcaccacctacagcttcaccatcaaggccagcaccgccaagggcttcggcccccccgtgaccaccagaatcgccaccaagatcagcgcccccagcatgcccgagtacgacaccgacacccccctgaacgagaccgacaccaccatcaccgtgatgctgaagcccgcccagagcagaggcgcccccgtgagcgtgtaccagctggtggtgaaggaggagagactgcagaagagcagaagagccgccgacatcatcgagtgcttcagcgtgcccgtgagctacagaaacgccagcagcctggacagcctgcactacttcgccgccgagctgaagcccgccaacctgcccgtgacccagcccttcaccgtgggcgacaacaagacctacaacggctactggaacccccccctgagccccctgaagagctacagcatctacttccaggccctgagcaaggccaacggcgagaccaagatcaactgcgtgagactggccaccaagggcgccagcacccagaacagcaacaccgtggagcccgagaagcaggtggacaacaccgtgaagatggccggcgtgatcgccggcctgctgatgttcatcatcatcctgctgggcgtgatgctgaccatcaagagaagaagaaacgcctacagctacagctactacctgaagctggccaagaagcagaaggagacccagagcggcgcccagagagagatgggccccgtggccagcgccgacaagcccaccaccaagctgagcgccagcagaaacgacgagggcttcagcagcagcagccaggacgtgaacggcttcaccgacggcagcagaggcgagctgagccagcccaccctgaccatccagacccacccctacagaacctgcgaccccgtggagatgagctaccccagagaccagttccagcccgccatcagagtggccgacctgctgcagcacatcacccagatgaagagaggccagggctacggcttcaaggaggagtacgaggccctgcccgagggccagaccgccagctgggacaccgccaaggaggacgagaacagaaacaagaacagatacggcaacatcatcagctacgaccacagcagagtgagactgctggtgctggacggcgacccccacagcgactacatcaacgccaactacatcgacggctaccacagacccagacactacatcgccacccagggccccatgcaggagaccgtgaaggacttctggagaatgatctggcaggagaacagcgccagcatcgtgatggtgaccaacctggtggaggtgggcagagtgaagtgcgtgagatactggcccgacgacaccgaggtgtacggcgacatcaaggtgaccctgatcgagaccgagcccctggccgagtacgtgatcagaaccttcaccgtgcagaagaagggctaccacgagatcagagagctgagactgttccacttcaccagctggcccgaccacggcgtgccctgctacgccaccggcctgctgggcttcgtgagacaggtgaagttcctgaacccccccgaggccggccccatcgtggtgcactgcagcgccggcgccggcagaaccggctgcttcatcgccatcgacaccatgctggacatggccgagaacgagggcgtggtggacatcttcaactgcgtgagagagctgagagcccagagagtgaacctggtgcagaccgaggagcagtacgtgttcgtgcacgacgccatcctggaggcctgcctgtgcggcaacaccgccatccccgtgtgcgagttcagaagcctgtactacaacatcagcagactggacccccagaccaacagcagccagatcaaggacgagttccagaccctgaacatcgtgacccccagagtgagacccgaggactgcagcatcggcctgctgcccagaaaccacgacaagaacagaagcatggacgtgctgcccctggacagatgcctgcccttcctgatcagcgtggacggcgagagcagcaactacatcaacgccgccctgatggacagccacaagcagcccgccgccttcgtggtgacccagcaccccctgcccaacaccgtggccgacttctggagactggtgttcgactacaactgcagcagcgtggtgatgctgaacgagatggacaccgcccagttctgcatgcagtactggcccgagaagaccagcggctgctacggccccatccaggtggagttcgtgagcgccgacatcgacgaggacatcatccacagaatcttcagaatctgcaacatggccagaccccaggacggctacagaatcgtgcagcacctgcagtacatcggctggcccgcctacagagacaccccccccagcaagagaagcctgctgaaggtggtgagaagactggagaagtggcaggagcagtacgacggcagagagggcagaaccgtggtgcactgcctgaacggcggcggcagaagcggcaccttctgcgccatctgcagcgtgtgcgagatgatccagcagcagaacatcatcgacgtgttccacatcgtgaagaccctgagaaacaacaagagcaacatggtggagaccctggagcagtacaagttcgtgtacgaggtggccctggagtacctgagcagcttctag

SEQ ID NO: 170036 - DNA, 4335 bp, Artificial Sequence
  derived and/or modified sequence
atggccagcctggccgccctggccctgagcctgctgctgagactgcagctgccccccctgcccggcgccagagcccagagcgccgccggcggctgcagcttcgacgagcactacagcaactgcggctacagcgtggccctgggcaccaacggcttcacctgggagcagatcaacacctgggagaagcccatgctggaccaggccgtgcccaccggcagcttcatgatggtgaacagcagcggcagagccagcggccagaaggcccacctgctgctgcccaccctgaaggagaacgacacccactgcatcgacttccactactacttcagcagcagagacagaagcagccccggcgccctgaacgtgtacgtgaaggtgaacggcggcccccagggcaaccccgtgtggaacgtgagcggcgtggtgaccgagggctgggtgaaggccgagctggccatcagcaccttctggccccacttctaccaggtgatcttcgagagcgtgagcctgaagggccaccccggctacatcgccgtggacgaggtgagagtgctggcccacccctgcagaaaggccccccacttcctgagactgcagaacgtggaggtgaacgtgggccagaacgccaccttccagtgcatcgccggcggcaagtggagccagcacgacaagctgtggctgcagcagtggaacggcagagacaccgccctgatggtgaccagagtggtgaaccacagaagattcagcgccaccgtgagcgtggccgacaccgcccagagaagcgtgagcaagtacagatgcgtgatcagaagcgacggcggcagcggcgtgagcaactacgccgagctgatcgtgaaggagccccccacccccatcgccccccccgagctgctggccgtgggcgccacctacctgtggatcaagcccaacgccaacagcatcatcggcgacggccccatcatcctgaaggaggtggagtacagaaccaccaccggcacctgggccgagacccacatcgtggacagccccaactacaagctgtggcacctggaccccgacgtggagtacgagatcagagtgctgctgaccagacccggcgagggcggcaccggcccccccggcccccccctgaccaccagaaccaagtgcgccgaccccgtgcacggcccccagaacgtggagatcgtggacatcagagccagacagctgaccctgcagtgggagcccttcggctacgccgtgaccagatgccacagctacaacctgaccgtgcagtaccagtacgtgttcaaccagcagcagtacgaggccgaggaggtgatccagaccagcagccactacaccctgagaggcctgagacccttcatgaccatcagactgagactgctgctgagcaaccccgagggcagaatggagagcgaggagctggtggtgcagaccgaggaggacgtgcccggcgccgtgcccctggagagcatccagggcggccccttcgaggagaagatctacatccagtggaagccccccaacgagaccaacggcgtgatcaccctgtacgagatcaactacaaggccgtgggcagcctggaccccagcgccgacctgagcagccagagaggcaaggtgttcaagctgagaaacgagacccaccacctgttcgtgggcctgtaccccggcaccacctacagcttcaccatcaaggccagcaccgccaagggcttcggcccccccgtgaccaccagaatcgccaccaagatcagcgcccccagcatgcccgagtacgacaccgacacccccctgaacgagaccgacaccaccatcaccgtgatgctgaagcccgcccagagcagaggcgcccccgtgagcgtgtaccagctggtggtgaaggaggagagactgcagaagagcagaagagccgccgacatcatcgagtgcttcagcgtgcccgtgagctacagaaacgccagcagcctggacagcctgcactacttcgccgccgagctgaagcccgccaacctgcccgtgacccagcccttcaccgtgggcgacaacaagacctacaacggctactggaacccccccctgagccccctgaagagctacagcatctacttccaggccctgagcaaggccaacggcgagaccaagatcaactgcgtgagactggccaccaagggcgccagcacccagaacagcaacaccgtggagcccgagaagcaggtggacaacaccgtgaagatggccggcgtgatcgccggcctgctgatgttcatcatcatcctgctgggcgtgatgctgaccatcaagagaagaagaaacgcctacagctacagctactacctgagccagagaaagctggccaagaagcagaaggagacccagagcggcgcccagagagagatgggccccgtggccagcgccgacaagcccaccaccaagctgagcgccagcagaaacgacgagggcttcagcagcagcagccaggacgtgaacggcttcaccgacggcagcagaggcgagctgagccagcccaccctgaccatccagacccacccctacagaacctgcgaccccgtggagatgagctaccccagagaccagttccagcccgccatcagagtggccgacctgctgcagcacatcacccagatgaagagaggccagggctacggcttcaaggaggagtacgaggccctgcccgagggccagaccgccagctgggacaccgccaaggaggacgagaacagaaacaagaacagatacggcaacatcatcagctacgaccacagcagagtgagactgctggtgctggacggcgacccccacagcgactacatcaacgccaactacatcgacggctaccacagacccagacactacatcgccacccagggccccatgcaggagaccgtgaaggacttctggagaatgatctggcaggagaacagcgccagcatcgtgatggtgaccaacctggtggaggtgggcagagtgaagtgcgtgagatactggcccgacgacaccgaggtgtacggcgacatcaaggtgaccctgatcgagaccgagcccctggccgagtacgtgatcagaaccttcaccgtgcagaagaagggctaccacgagatcagagagctgagactgttccacttcaccagctggcccgaccacggcgtgccctgctacgccaccggcctgctgggcttcgtgagacaggtgaagttcctgaacccccccgaggccggccccatcgtggtgcactgcagcgccggcgccggcagaaccggctgcttcatcgccatcgacaccatgctggacatggccgagaacgagggcgtggtggacatcttcaactgcgtgagagagctgagagcccagagagtgaacctggtgcagaccgaggagcagtacgtgttcgtgcacgacgccatcctggaggcctgcctgtgcggcaacaccgccatccccgtgtgcgagttcagaagcctgtactacaacatcagcagactggacccccagaccaacagcagccagatcaaggacgagttccagaccctgaacatcgtgacccccagagtgagacccgaggactgcagcatcggcctgctgcccagaaaccacgacaagaacagaagcatggacgtgctgcccctggacagatgcctgcccttcctgatcagcgtggacggcgagagcagcaactacatcaacgccgccctgatggacagccacaagcagcccgccgccttcgtggtgacccagcaccccctgcccaacaccgtggccgacttctggagactggtgttcgactacaactgcagcagcgtggtgatgctgaacgagatggacaccgcccagttctgcatgcagtactggcccgagaagaccagcggctgctacggccccatccaggtggagttcgtgagcgccgacatcgacgaggacatcatccacagaatcttcagaatctgcaacatggccagaccccaggacggctacagaatcgtgcagcacctgcagtacatcggctggcccgcctacagagacaccccccccagcaagagaagcctgctgaaggtggtgagaagactggagaagtggcaggagcagtacgacggcagagagggcagaaccgtggtgcactgcctgaacggcggcggcagaagcggcaccttctgcgccatctgcagcgtgtgcgagatgatccagcagcagaacatcatcgacgtgttccacatcgtgaagaccctgagaaacaacaagagcaacatggtggagaccctggagcagtacaagttcgtgtacgaggtggccctggagtacctgagcagcttctag

SEQ ID NO: 170037 - DNA, 4326 bp, Artificial Sequence
  derived and/or modified sequence
atggcgagcctcgcggcgctcgcactaagcttgcttctgaggctacagctgccacccctccccggcgcacgagctcaatcagccgccggcggttgctccttcgatgaacactattccaattgcggttactccgtggcattaggtaccaatggattcacctgggagcaaattaacacatgggagaagcccatgctagaccaggccgttcctaccggatcctttatgatggtgaacagtagcggcagggcttccggacaaaaggcccatctcctgcttcctaccctcaaggagaacgacacccactgtatcgattttcactattacttcagctcgagggacaggagcagccccggcgccctcaatgtctacgtgaaagtgaatggcggaccccaggggaacccggtctggaatgtcagtggtgtggtgaccgagggatgggtgaaggcggaacttgcgatcagcaccttctggccacacttttaccaagtcatttttgagtccgtgagtctgaaaggccaccccgggtacattgcagtggatgaagtgagagttctagctcacccatgccggaaggctcctcatttcttaagactgcagaatgtggaggtaaacgttggccagaatgccactttccaatgcatagctggggggaagtggtcgcagcacgacaaactgtggctacagcaatggaatggccgggacactgcactgatggtgacaagagtggtgaaccacagaagattttcagcaacagtgagtgtggccgacactgctcagagaagtgtgtccaaatatcgctgtgtgatacgcagcgatggcgggtcaggggtgtccaattacgccgaactcatcgtgaaagaaccaccaaccccaatagcccccccggaactgcttgctgtaggcgccacctatctgtggataaaacccaacgccaatagtatcataggtgacggaccaattattcttaaagaagtggaatatcggaccaccactggaacctgggctgagacacacattgtcgactctcccaactacaaactgtggcacctagatcctgatgtcgagtatgaaatccgcgttttattaacaagacccggggagggtggcacgggcccgcccggcccgccattgacgacgaggaccaagtgcgcggaccctgtccacggcccccagaatgtggagatcgtcgatatccgagccaggcagctgacgttgcagtgggagccattcggatatgctgtcactaggtgtcacagctacaacctcacagtccagtaccagtacgtgtttaaccagcagcagtacgaagccgaggaggtcatccaaacttcaagccactacaccctgcgaggcctgcgccctttcatgaccatacggctgagattgttgttaagtaatcctgaggggcgcatggagagcgaggagctagtagtgcagacggaggaggacgtgccgggagcagttcctcttgagtctatacaagggggaccattcgaagaaaagatttacatccagtggaagcccccgaatgagaccaatggtgttatcaccttgtacgagatcaattataaggctgtgggaagcctcgatccttcagcggatttatccagtcaacgcgggaaagtcttcaaattgaggaatgagactcaccacctgttcgttggcctctatcccggaactacttattctttcacaatcaaagctagcacagcaaagggctttgggcctcccgttaccactcgtattgccactaaaataagtgcaccaagtatgccagagtacgacaccgacactcctcttaatgagaccgatactacaattactgtgatgctcaagcccgcgcaaagcagaggagcacccgtgagcgtgtaccagttagtggtgaaagaggagcgcctccagaaatctagaagggccgccgatattattgagtgtttctctgtgcctgtgagttatcggaacgcctcctccctagactccctgcattacttcgccgctgaattgaagccagctaacctgccagtgacccagccgttcacagtcggggacaataaaacgtataatggttattggaacccacctctttcgcctctcaagtcctactcaatatattttcaggctttatcaaaggctaacggagagaccaagataaactgtgtcaggttagctactaaaggtgctagcacccagaatagcaacacagtcgaacctgagaagcaggtggacaacacggtgaaaatggccggcgttatcgcaggactcctgatgtttattataatacttctcggggttatgctgaccatcaagcgcaggaggaatgcctattcatacagctactatctcaaacttgccaagaaacagaaggagacccaatctggggctcaaagagagatgggacctgtggcctcagccgataaaccgaccacaaagctgtctgctagccgaaatgacgagggcttctcctcttcatctcaggacgtcaatggttttaccgatgggtcaagaggcgagctgtcacagccaacactgaccattcagacccatccctaccgaacctgcgacccagttgagatgtcttaccctagagatcagtttcagccagccatacgagtggccgatctgctccagcacatcactcagatgaagcgcggacagggatacggctttaaggaagagtatgaagcattaccagagggacagaccgcctcctgggacaccgcaaaggaggacgagaaccggaataaaaatagatacggtaacatcattagctatgaccatagcagagtaagactgcttgtgctggatggagacccgcatagcgactatattaatgctaattacattgacggataccacagacctcgacactacatcgcaactcagggcccaatgcaggaaaccgtgaaagatttttggcgaatgatttggcaagagaactcggcttccattgtgatggtgaccaacttggtggaggttggccgtgtgaagtgtgttaggtattggcccgatgataccgaggtctatggcgacatcaaagttactcttatagaaaccgaaccactagccgaatacgtcatcaggacatttacagtgcagaaaaaaggttaccatgaaatacgcgaacttaggctgttccatttcacctcatggcccgatcacggcgtcccttgttatgcaactggcctgctgggattcgttcggcaggtgaaattcctgaatccaccagaggctgggcctatcgtggtgcattgctcagcaggcgccggccgtacagggtgcttcatagcaatcgatactatgctggacatggctgagaacgaaggtgtggttgatattttcaactgcgtgagggagctgagagcacagcgcgtgaatctggtccaaactgaggagcagtatgtgtttgtacacgacgcgatcttagaagcttgtctgtgtggcaacactgccatacccgtctgtgagtttcgatcgctgtactacaacatcagtcgcctggaccctcagaccaattctagccagattaaggatgaattccaaaccctgaatattgtgacacctcgcgtgagaccagaagattgcagcataggtctgttaccccgaaatcacgataagaatcgaagcatggatgtgctgccactagacaggtgcttgccgttcttaatttcagtcgacggagagtcatccaattatattaacgcagcactgatggactcccacaagcagccagccgcattcgtcgtgacacaacaccccttaccaaatactgttgccgacttctggcggctggtatttgactataactgctccagtgtggtcatgctcaacgagatggacaccgcacagttttgcatgcagtattggcctgagaagacaagtggctgctacggaccgatccaggtggagtttgtctctgcggacatcgatgaggatatcatccaccgcatttttcgtatctgcaatatggcccgcccacaggacggttacaggatcgtacagcaccttcagtatataggttggccagcgtatcgagacacacccccgtccaaaaggtcactgctgaaggttgtgcgacgattggaaaagtggcaagagcagtacgatggacgagagggaagaaccgtggtgcactgtctgaacggaggaggcagaagtgggactttttgcgctatttgctccgtctgtgagatgattcagcagcagaatatcatagatgttttccatattgtcaaaaccttgaggaataataagtctaatatggttgagacgctagaacagtacaaattcgtctatgaggtggccctggaatacctaagttcgttttag

SEQ ID NO: 170038 - DNA, 4335 bp, Artificial Sequence
  derived and/or modified sequence
atggctagcttagctgcattggcattatccctgctgctgcgactccaactcccccccctgcctggggcaagagctcaaagcgctgccggggggtgctcttttgatgagcactactctaactgcggctattccgtggccctgggcaccaacgggtttacttgggaacagatcaatacctgggagaagcccatgctggatcaggcagtgcctacaggcagcttcatgatggttaatagcagcggccgagccagcgggcagaaagctcacctgctattgcctactctgaaggagaatgacactcactgcatagattttcactattacttttccagccgagacagatcctctcccggcgccctgaacgtttacgtcaaagtaaatgggggcccgcagggaaaccccgtttggaatgtcagtggcgttgtgacggagggctgggttaaggccgaacttgcgatctctactttctggccccatttctatcaagtgattttcgaaagcgtttctcttaaaggccatcctggttacattgccgtggatgaagtgagagttctggcacatccctgccgtaaggcaccgcatttccttaggctgcagaacgtggaggtcaacgtcgggcagaacgccaccttccagtgtatagcagggggcaagtggtcacaacacgacaagctgtggctgcagcaatggaatggacgcgacaccgcacttatggttacaagagtggtaaatcatcgccgcttctccgctaccgtaagtgttgctgataccgcgcagcggagcgtgagtaagtaccgctgcgtcattcggtctgatggcggatccggggtgagcaattatgctgaactcattgttaaagagccccccacaccaattgccccgcccgagctgctggccgtcggtgctacctacctgtggattaagcccaatgcgaacagtattatcggagacggacccataattctcaaagaggtagaataccgcactacaaccggtacatgggccgagacccatattgtcgattctcccaactataaactttggcacttggacccagacgtcgagtacgagatcagggtcctactcacacgccccggggaaggcggcacagggccccccggccctcccctgacaactcgtactaaatgcgccgaccccgtgcatggccctcagaatgtagagatcgttgatatccgggcccgccagttgacccttcaatgggaacccttcgggtatgcggtgacaagatgccacagctacaacttaacagtacagtatcagtacgtgtttaatcagcagcagtacgaagccgaagaagtgattcagacttctagccactatactctgcggggactgaggccgttcatgacaatacgacttcgactgctactgagtaacccggaaggacggatggagtctgaagagctggtggtacagaccgaagaggacgtccctggagcggtgcccttagaatcaattcaggggggtccttttgaggagaaaatctacattcagtggaagcctccaaatgaaaccaacggcgtgattaccctttacgaaatcaattacaaggctgtgggcagcttagaccctagcgccgatctatcctcgcagagaggcaaggtgtttaaactacgtaatgagactcaccacctgtttgtcgggctctacccagggacaacatatagttttactattaaagctagtaccgccaagggcttcggtccaccagtgactacgaggatcgcaacgaagatctccgctccctcgatgcctgagtatgacaccgatacccccctgaacgagacagacaccactatcaccgtcatgctgaagcctgcccaaagcaggggtgcccccgtgagcgtgtaccagctggtggttaaggaggagcggttgcaaaagagcagacgcgccgcagacattattgaatgttttagtgtgcccgtgagctataggaatgcatccagcctggactccttgcattacttcgccgcagaacttaagcctgctaacttgcctgtgacgcaacccttcacagtgggggacaataagacatataatggctactggaaccccccccttagtcccctcaaatcgtacagtatttacttccaggccctgagcaaggctaatggagagaccaagattaactgcgtgcgcctcgctaccaaaggcgcttccacgcaaaattctaacaccgtcgaaccagagaagcaggttgacaacacagttaagatggcaggagttattgctggcttgctgatgttcatcattattctcctcggagtgatgctgactattaaaaggcgaagaaatgcttattcttatagctactatctgagtcaacggaaactggctaagaagcagaaggagacccaaagcggcgcccaacgcgaaatgggcccagtcgccagcgcagacaaaccaacaaccaaactcagtgccagcagaaacgacgagggattttcttctagcagccaggatgtcaacggatttacagacggatcaagaggagagctctctcagccaaccctgaccatacagactcacccctatagaacgtgtgatcccgtggagatgagctatccccgcgatcagttccaaccagccattagggtcgccgacctgctgcagcacataacccagatgaagaggggacagggctatggattcaaagaggagtacgaagccctccctgaggggcagacagcttcttgggatacagcaaaagaagatgagaatcggaataaaaataggtatggtaatatcatctcttacgaccattcacgtgtacgactcctagtgcttgatggtgacccccacagcgactacatcaatgcgaactacattgatgggtaccaccgcccccgccactacatcgccacgcaaggaccgatgcaagagacagtgaaggacttttggaggatgatctggcaggagaactcagctagcatcgtgatggtcaccaacctggtggaggtgggccgcgtgaaatgtgtgagatactggccggacgacactgaggtgtacggtgacatcaaagtaaccctgatcgagactgagcctctggcagagtatgtcatccgcactttcacagtacaaaaaaaaggatatcacgaaattcgggagctgaggctttttcatttcactagctggccagatcacggtgtgccctgttacgccacaggcctgctggggtttgtgcggcaggtgaaatttttgaacccccctgaggccggcccgatcgtggtgcattgtagtgccggtgccgggagaacaggatgctttatagcaattgatacaatgttggacatggccgagaatgagggggtggtcgatattttcaactgtgttagggagctaagagcccagcgggtgaatctggtccaaaccgaggaacagtatgtcttcgttcatgatgccatcctggaggcctgcctgtgcggaaatactgctatacctgtgtgcgaatttagaagcctgtattataatatcagtcggctggatccccagaccaattcttctcagattaaagatgagttccaaacactgaatattgttaccccacgggtcagaccagaagactgttcaatcgggttattgcctagaaaccacgacaaaaacagatccatggatgtgctgccactggacagatgtctgccattcctaatttccgtggatggtgagagctctaactacatcaacgctgccctgatggacagtcataaacaacctgcggcgttcgtggtgacacaacaccccctgccaaatacagttgccgacttttggagactggtgttcgattataattgctcctccgtagtgatgctaaatgaaatggacacagcacaattttgcatgcaatactggcctgaaaagacaagcgggtgttacggcccaattcaagttgagttcgtgtcagccgacatcgacgaagacatcattcataggattttccgaatctgcaatatggcaagaccccaagatggctacagaattgtccaacacctgcagtacatcggctggccggcttaccgcgacactcccccaagtaaacggagcctgctgaaagtggtcaggaggctggaaaaatggcaggaacagtacgacgggcgtgaggggagaaccgttgtgcactgcctgaatggcggggggcgctcaggtactttttgtgccatttgtagcgtgtgtgagatgatccagcagcaaaatatcatcgacgtgtttcatatagtcaagacacttcggaacaataaatccaacatggttgaaacactggagcagtacaagtttgtttacgaagtggctctagaatatctcagctctttttag

SEQ ID NO: 170039 - DNA, 4326 bp, Artificial Sequence
  derived and/or modified sequence
atggccagcctggccgccctggccctgagcctgctgctgcggctgcagctgccccccctgcccggggcccgggcccagagcgctgctgggggctgcagctttgatgagcactacagcaactgtggctacagcgtggccctgggcaccaacggcttcacctgggagcagatcaacacctgggagaagcccatgctggaccaggccgtgcccaccggcagcttcatgatggtgaacagcagcggccgggccagcggccagaaggcccacctgctgctgcccaccctgaaggaaaatgacacccactgcatcgacttccactactacttcagcagccgggacaggagcagccctggggccctgaatgtgtatgtgaaggtgaatggaggcccccagggcaaccctgtgtggaatgtgtctggagtggtgacagagggctgggtgaaggccgagctggccatcagcaccttctggccccacttctaccaggtgatctttgaatctgtgtccctgaagggccaccctggctacatcgctgtggatgaggtgcgggtgctggcccacccctgcaggaaggccccccacttcctgcggctgcagaatgtggaggtgaatgtgggccagaatgccaccttccagtgcatcgccggcggcaagtggagccagcacgacaagctgtggctgcagcagtggaatggccgggacacagccctgatggtgaccagggtggtgaaccaccggcgcttcagcgccaccgtgtctgtggccgacacagcccagaggtctgtgtccaagtaccgctgtgtgatccgcagtgatggcggcagcggcgtgagcaactatgcagagctgattgtgaaggagccccccacccccatcgcccctcctgagctgctggccgtgggcgccacctacctgtggatcaagcccaatgccaacagcatcattggagatggccccatcatcctgaaggaggtggagtaccgcaccaccaccggcacctgggccgagacccacatcgtggacagccccaactacaagctgtggcacctggaccctgatgtggagtatgagatccgggtgctgctgaccaggcctggagagggcggcaccggccccccaggcccccccctgaccaccaggaccaagtgtgccgaccctgtgcacggcccccagaatgtggagatcgtggacatccgggcccggcagctgaccctgcagtgggagcccttcggctatgctgtgacccgctgccacagctacaacctgactgtgcagtaccagtatgtgttcaaccagcagcagtatgaagctgaggaggtgatccagaccagcagccactacaccctgcggggcctgcggcccttcatgaccatccggctgcggctgctgctgagcaaccctgagggccgcatggagagcgaggagctggtggtgcagacagaggaggatgtgcctggagctgtgcccctggagagcatccagggcggcccctttgaggagaagatctacatccagtggaagcccccaaatgagaccaatggagtcatcaccctgtatgagatcaactacaaggctgtgggcagcctggaccccagcgctgacctgagcagccagaggggcaaggtgttcaagctgagaaatgagacccaccacctgtttgtgggcctgtacccaggcaccacctacagcttcaccatcaaggccagcacagccaagggcttcggcccccctgtgaccacccgcatcgccaccaagatcagcgcccccagcatgccagaatatgacacagacacccccctgaatgaaacagacaccaccatcaccgtgatgctgaagccagcccagagcagaggagcccctgtgtctgtgtaccagctggtggtgaaggaggagcggctgcagaagagcagaagagctgctgacatcatcgagtgcttctctgtgcctgtgtcctacagaaatgccagcagcctggacagcctgcactactttgctgctgagctgaagccagccaacctgcctgtgacccagcccttcaccgtgggggacaacaagacctacaacggctactggaacccccccctgagccccctgaagagctacagcatctacttccaggccctgagcaaggccaacggggagaccaagatcaactgtgtgcggctggccaccaagggggccagcacccagaacagcaacacagtggagcctgagaagcaggtggacaacacagtgaagatggccggcgtgattgctggcctgctgatgttcatcatcatcctgctgggcgtgatgctgaccatcaagagaagaagaaatgcctacagctacagctactacctgaagctggccaagaagcagaaggagacccagagcggggcccagcgggagatgggccctgtggccagcgctgacaagcccaccaccaagctgagcgccagcagaaatgatgagggcttcagcagcagcagccaggatgtgaatggcttcacagatggcagcagaggagagctgagccagcccaccctgaccatccagacccacccctaccgcacctgtgaccctgtggagatgagctacccccgggaccagttccagcctgccatccgggtggccgacctgctgcagcacatcacccagatgaagaggggccagggctacggcttcaaggaggagtatgaggccctgcctgagggccagacagcctcctgggacacagccaaggaggatgaaaatagaaacaagaacagatatggcaacatcatctcctatgaccacagccgggtgcggctgctggtgctggatggagacccccacagcgactacatcaatgccaactacattgatggctaccaccggcccaggcactacatcgccacccagggccccatgcaggagaccgtgaaggacttctggaggatgatctggcaggagaacagcgccagcatcgtgatggtgaccaacctggtggaggtgggccgggtgaagtgtgtgcgctactggccagatgacacagaggtgtatggagacatcaaggtgaccctcatcgagacagagcccctggccgagtatgtgatccgcaccttcaccgtgcagaagaagggctaccacgagatccgggagctgcggctcttccacttcacctcctggccagaccatggagtgccctgctacgccaccggcctgctgggctttgtgcggcaggtgaagttcctgaaccccccagaggccggccccatcgtggtgcactgcagcgctggggccggccgcacaggctgcttcatcgccatcgacaccatgctggacatggctgaaaatgaaggagtggtggacatcttcaactgtgtgcgggagctgcgggcccagagggtgaacctggtgcagacagaggagcagtatgtgtttgtgcatgatgccatcctggaggcctgcctgtgtggcaacacagccatccctgtgtgtgagttccgcagcctgtactacaacatcagccggctggacccccagaccaacagcagccagatcaaggatgagttccagaccctgaacatcgtgaccccccgggtgcggcctgaggactgcagcatcggcctgctgcccagaaatcatgacaagaacagatccatggatgtgctgcccctggaccgctgcctgcccttcctgatctctgtggatggagagagcagcaactacatcaatgctgccctgatggacagccacaagcagcctgctgcctttgtggtgacccagcaccccctgcccaacacagtggccgacttctggaggctggtgtttgactacaactgcagctctgtggtgatgctgaatgagatggacacagcccagttctgcatgcagtactggccagagaagaccagcggctgctacggccccatccaggtggagtttgtgtctgctgacattgatgaggacatcatccaccgcatcttccgcatctgcaacatggcccggccccaggacggctacagaattgtgcagcacctgcagtacatcggctggccagcctacagagacaccccacccagcaagaggagcctgctgaaggtggtgcggcggctggagaagtggcaggagcagtatgatggccgggagggccgcacagtggtgcactgcctgaatggaggcggccgcagcggcaccttctgtgccatctgcagcgtgtgtgagatgatccagcagcagaacatcattgatgtgttccacatcgtgaagaccctgaggaacaacaagagcaacatggtggagaccctggagcagtacaagtttgtgtatgaggtggccctggagtacctgagcagcttctag

SEQ ID NO: 170040 - DNA, 4335 bp, Artificial Sequence
  derived and/or modified sequence
atggccagcctggccgccctggccctgagcctgctgctgcggctgcagctgccccccctgcccggggcccgggcccagagcgctgctgggggctgcagctttgatgagcactacagcaactgtggctacagcgtggccctgggcaccaacggcttcacctgggagcagatcaacacctgggagaagcccatgctggaccaggccgtgcccaccggcagcttcatgatggtgaacagcagcggccgggccagcggccagaaggcccacctgctgctgcccaccctgaaggaaaatgacacccactgcatcgacttccactactacttcagcagccgggacaggagcagccctggggccctgaatgtgtatgtgaaggtgaatggaggcccccagggcaaccctgtgtggaatgtgtctggagtggtgacagagggctgggtgaaggccgagctggccatcagcaccttctggccccacttctaccaggtgatctttgaatctgtgtccctgaagggccaccctggctacatcgctgtggatgaggtgcgggtgctggcccacccctgcaggaaggccccccacttcctgcggctgcagaatgtggaggtgaatgtgggccagaatgccaccttccagtgcatcgccggcggcaagtggagccagcacgacaagctgtggctgcagcagtggaatggccgggacacagccctgatggtgaccagggtggtgaaccaccggcgcttcagcgccaccgtgtctgtggccgacacagcccagaggtctgtgtccaagtaccgctgtgtgatccgcagtgatggcggcagcggcgtgagcaactatgcagagctgattgtgaaggagccccccacccccatcgcccctcctgagctgctggccgtgggcgccacctacctgtggatcaagcccaatgccaacagcatcattggagatggccccatcatcctgaaggaggtggagtaccgcaccaccaccggcacctgggccgagacccacatcgtggacagccccaactacaagctgtggcacctggaccctgatgtggagtatgagatccgggtgctgctgaccaggcctggagagggcggcaccggccccccaggcccccccctgaccaccaggaccaagtgtgccgaccctgtgcacggcccccagaatgtggagatcgtggacatccgggcccggcagctgaccctgcagtgggagcccttcggctatgctgtgacccgctgccacagctacaacctgactgtgcagtaccagtatgtgttcaaccagcagcagtatgaagctgaggaggtgatccagaccagcagccactacaccctgcggggcctgcggcccttcatgaccatccggctgcggctgctgctgagcaaccctgagggccgcatggagagcgaggagctggtggtgcagacagaggaggatgtgcctggagctgtgcccctggagagcatccagggcggcccctttgaggagaagatctacatccagtggaagcccccaaatgagaccaatggagtcatcaccctgtatgagatcaactacaaggctgtgggcagcctggaccccagcgctgacctgagcagccagaggggcaaggtgttcaagctgagaaatgagacccaccacctgtttgtgggcctgtacccaggcaccacctacagcttcaccatcaaggccagcacagccaagggcttcggcccccctgtgaccacccgcatcgccaccaagatcagcgcccccagcatgccagaatatgacacagacacccccctgaatgaaacagacaccaccatcaccgtgatgctgaagccagcccagagcagaggagcccctgtgtctgtgtaccagctggtggtgaaggaggagcggctgcagaagagcagaagagctgctgacatcatcgagtgcttctctgtgcctgtgtcctacagaaatgccagcagcctggacagcctgcactactttgctgctgagctgaagccagccaacctgcctgtgacccagcccttcaccgtgggggacaacaagacctacaacggctactggaacccccccctgagccccctgaagagctacagcatctacttccaggccctgagcaaggccaacggggagaccaagatcaactgtgtgcggctggccaccaagggggccagcacccagaacagcaacacagtggagcctgagaagcaggtggacaacacagtgaagatggccggcgtgattgctggcctgctgatgttcatcatcatcctgctgggcgtgatgctgaccatcaagagaagaagaaatgcctacagctacagctactacctgagccagaggaagctggccaagaagcagaaggagacccagagcggggcccagcgggagatgggccctgtggccagcgctgacaagcccaccaccaagctgagcgccagcagaaatgatgagggcttcagcagcagcagccaggatgtgaatggcttcacagatggcagcagaggagagctgagccagcccaccctgaccatccagacccacccctaccgcacctgtgaccctgtggagatgagctacccccgggaccagttccagcctgccatccgggtggccgacctgctgcagcacatcacccagatgaagaggggccagggctacggcttcaaggaggagtatgaggccctgcctgagggccagacagcctcctgggacacagccaaggaggatgagaacagaaacaagaacagatatggcaacatcatctcctatgaccacagccgggtgcggctgctggtgctggatggagacccccacagcgactacatcaatgccaactacattgatggctaccaccggcccaggcactacatcgccacccagggccccatgcaggagaccgtgaaggacttctggaggatgatctggcaggagaacagcgccagcatcgtgatggtgaccaacctggtggaggtgggccgggtgaagtgtgtgcgctactggccagatgacacagaggtgtatggagacatcaaggtgaccctgattgaaacagagcccctggccgagtatgtgatccgcaccttcaccgtgcagaagaagggctaccacgagatccgggagctgcggctcttccacttcacctcctggccagaccacggcgtgccctgctacgccaccggcctgctgggctttgtgcggcaggtgaagttcctgaaccccccagaggccggccccatcgtggtgcactgcagcgctggagctggccgcacaggctgcttcatcgccatcgacaccatgctggacatggccgagaatgaaggagtggtggacatcttcaactgtgtgcgggagctgcgggcccagagggtgaacctggtgcagacagaggagcagtatgtgtttgtgcatgatgccatcctggaggcctgcctgtgtggcaacacagccatccctgtgtgtgagttccgcagcctgtactacaacatcagccggctggacccccagaccaacagcagccagatcaaggatgagttccagaccctgaacatcgtgaccccccgggtgcggcctgaggactgcagcatcggcctgctgcccaggaaccacgacaagaacagatccatggatgtgctgcccctggaccgctgcctgcccttcctgatctctgtggatggagagagcagcaactacatcaatgctgccctgatggacagccacaagcagcctgctgcctttgtggtgacccagcaccccctgcccaacacagtggccgacttctggaggctggtgtttgactacaactgcagctctgtggtgatgctgaatgagatggacacagcccagttctgcatgcagtactggccagagaagaccagcggctgctacggccccatccaggtggagtttgtgtctgctgacattgatgaggacatcatccaccgcatcttccgcatctgcaacatggcccggccccaggacggctaccgcatcgtgcagcacctgcagtacatcggctggccagcctacagagacaccccacccagcaagaggagcctgctgaaggtggtgcggcggctggagaagtggcaggagcagtatgatggccgggagggccgcacagtggtgcactgcctgaatggaggcggccgcagcggcaccttctgtgccatctgcagcgtgtgtgagatgatccagcagcagaacatcattgatgtgttccacatcgtgaagaccctgaggaacaacaagagcaacatggtggagaccctggagcagtacaagtttgtgtatgaggtggccctggagtacctgagcagcttctag

SEQ ID NO: 170041 - DNA, 4326 bp, Artificial Sequence
  derived and/or modified sequence
atggccagcctggccgccctggccctgagcctgctgctgcggctgcagctgcctcctttacccggcgccagggcacagagtgctgctgggggatgttcgtttgacgaacactactccaattgtggatactctgtggcattggggactaatggtttcacctgggagcaaattaacacttgggaaaaacctatgttggaccaagcagttcctactggctccttcatgatggtgaattctagcgggagggcatccgggcagaaggcccatctcctattaccaactctgaaagaaaacgatacacactgcatcgatttccactattattttagttctcgtgacagatctagccctggggctctgaacgtttatgtgaaggttaacgggggcccccagggcaatccagtttggaacgttagcggcgtggtcacagagggttgggttaaagccgagctagccatatcaacattctggccccacttctatcaggtcattttcgaaagcgtctccctgaaaggacaccccggttacatcgctgtggatgaggtgcgagtgctggcacacccttgtcgcaaggctcctcacttcctccgtttacagaacgtcgaggtaaacgtaggccaaaacgctacctttcagtgtattgccggaggaaagtggtcccagcatgacaaattgtggttgcagcagtggaacggtcgtgatactgcattgatggtgactcgggtggtgaaccaccgtagatttagcgccactgtgtcagtagccgacaccgcccagcgttcagtgagcaaatatcggtgtgtcatccggtcggacggcggtagtggagtttccaactatgctgagctaattgtcaaagaaccgccaacgccgatcgccccccccgaacttttagccgttggggccacctacctctggattaagccaaacgccaattccatcatcggcgacggaccaattatattgaaggaagtcgaataccgaacaactactggtacatgggcagaaacacacattgtggactctcccaattacaaactctggcatcttgacccggatgtagaatacgagattcgcgtactgttgacacgacccggagagggcgggactggtccccctggccccccactgacaacaaggacaaagtgcgccgatcccgtgcacggcccgcagaacgtggaaatagtggatatccgagctagacagctgaccctacagtgggaacccttcgggtacgcagtgacccgttgtcacagctataacctaacagtgcaataccagtatgtgttcaaccagcagcaatatgaggcagaagaagtgatccagacctcctcacactacacactgcgagggctgcgccccttcatgacaatccgcctcagactgttgctcagcaatcccgagggaaggatggaatcagaagagctggtggtccagaccgaggaagacgttcccggtgcggtgcctctagaatcaattcagggaggaccctttgaggagaagatttatattcagtggaagcccccgaacgagaccaacggtgttataactctctatgagatcaactacaaagctgtgggctcactggatcctagcgccgacctctcaagccagcgaggaaaagtcttcaaactgaggaatgagacccaccacctcttcgttggtctataccccggaacaacttactccttcaccatcaaggcctcaactgccaaggggttcggaccccctgtcaccactaggatagctacaaaaataagcgccccctctatgcccgaatacgacaccgatacgccactgaatgagacggataccacaattaccgtgatgctaaagccagcccagagccgaggcgcacctgtctccgtatatcaactggtggtgaaagaggaacggctgcagaagagtaggagagctgccgatatcatcgagtgcttttcagttcctgtctcctatcgaaatgcctctagcttagactccctgcactattttgccgccgagctgaaacctgccaacctaccagtcacacagccctttaccgtgggcgacaacaagacgtacaacggatattggaatcccccattatctccacttaagagttactccatttacttccaggccttaagcaaagctaatggtgaaactaaaataaactgcgtcaggctggccactaagggagcatccacacagaacagcaataccgtggaacctgagaagcaagtcgacaacacagtcaagatggcaggcgtcattgctggactgctcatgttcataataattctgcttggagtcatgctgaccattaagagacggaggaatgcctactcatattcctattatttaaagttagcaaagaaacagaaggaaacccagagtggagcccaaagggaaatggggcctgtggcctctgccgacaagcctactacaaagcttagtgcatctcggaatgatgaggggttttcctcatcgagccaagacgtcaacggcttcacagacggttcccgcggtgaattgtctcagcctacactgacgatccaaacgcacccttaccgcacatgcgacccagtggagatgtcataccctcgcgaccagttccagcccgccatccgtgtggccgatctgctgcagcatatcacgcagatgaaacgcggccagggttatgggttcaaggaggagtatgaagccctgccagagggacagacagccagctgggacaccgctaaggaagacgagaatcgaaacaagaatcggtatgggaatatcatttcttacgaccattcaagagtccgattattggtgctcgacggcgacccccacagtgattacatcaacgccaattacatcgatgggtatcaccgcccccgccattacattgcaacgcagggtcctatgcaggaaacggtcaaggatttctggaggatgatttggcaagaaaacagcgccagcatcgtgatggtcacaaatctggtcgaggtagggcgagttaagtgtgtgcgatattggccagatgataccgaggtatacggcgacatcaaggtgaccctgatcgaaaccgaacccctcgccgaatacgtgatcaggaccttcaccgtgcagaagaaaggatatcacgagattagggaacttcgactgttccacttcacatcttggcccgaccatggggtgccgtgctacgccaccggtctcctgggctttgttaggcaggtcaagttccttaaccctcccgaggccggcccaatagtggttcactgctcagcaggggcaggacgcacggggtgtttcattgccatagacaccatgcttgatatggccgaaaacgaaggcgtcgtggacatcttcaactgcgttcgagaactccgtgcccagagagtgaatcttgtgcagacggaggaacaatatgtgttcgtacatgacgccattttggaggcgtgcctctgtggaaatactgcaattccagtttgcgagtttcgcagtttgtactataatatcagccgccttgacccccagaccaattcgtcccagataaaggatgaatttcaaacgctcaacatcgttacgccccgcgtccgcccggaggactgctccattggcctgctccctcggaaccatgacaagaatagaagcatggacgtgctgccactcgaccggtgcctgcccttcctcatctccgttgacggtgagtctagtaattatatcaatgccgccctgatggacagccacaaacagcctgctgcttttgtggtcacccagcaccccctacctaacactgtcgccgacttctggaggctggtattcgattacaactgctcttccgtggtgatgctgaacgagatggacacagctcaattctgcatgcagtactggcccgagaaaactagtgggtgttatggtcctatccaggtcgagttcgttagtgctgatattgacgaggacatcattcacaggatttttcgcatttgtaatatggccagacctcaggacgggtacagaatagtgcagcacttacagtatattggatggccggcgtatcgcgatacccctccaagtaagagatcattactgaaagtggtgcggcgtctggagaaatggcaagagcaatatgacggccgcgagggtcggaccgtggtgcattgtctcaatgggggtggcagatctgggactttttgtgctatatgctccgtgtgcgaaatgatccagcagcaaaatatcatcgacgtgttccacatcgtgaaaacactgcgcaataataaatcgaatatggttgaaaccctggagcagtacaagttcgtatatgaggtcgctctcgagtatttgtcctcattttag

SEQ ID NO: 170042 - DNA, 4335 bp, Artificial Sequence
  derived and/or modified sequence
atggccagcctggccgccctggccctgagcctgctgctgcggctgcagctaccccccctgccaggcgcacgagctcaatccgccgccggcggctgtagtttcgatgaacactacagtaattgcggttatagcgtagcacttgggaccaatggcttcacatgggaacagattaatacttgggagaaacctatgctagatcaggccgtccccactggaagcttcatgatggttaatagctccgggagagcatcaggacagaaggcacatctgttactgccaactcttaaggagaatgatacacactgtattgattttcactattatttctcatctagagacagaagctcacccggagccctaaacgtttacgtgaaagtgaacggcggaccacagggcaatcccgtttggaacgtctctggcgtcgtgaccgaggggtgggttaaagccgagctggccatttccaccttctggcctcacttctatcaagtgattttcgagtctgtctcgctaaaagggcatccgggatacattgcagtggacgaagtcagggtcctcgctcatccttgtaggaaggctccgcactttctgcgcctccagaacgtcgaagtgaatgtaggccagaatgccacattccagtgtattgctggaggaaaatggagtcaacacgacaaactgtggctgcaacaatggaacggtcgggacaccgctctcatggttacacgggtcgtcaaccaccggaggtttagcgccacagtctctgtagccgacacggcccagagatctgtctctaaatatcggtgtgtgattcggagcgatggcggcagcggcgtgtctaactacgccgaactgatagttaaggagccaccaactcccatagctcctcctgagctgttagcagtgggagctacatatctgtggattaaacctaacgccaatagcatcatcggcgacgggccaattattctgaaggaggtggaatacaggaccaccacgggcacttgggctgagacgcatatcgttgacagcccaaactataagctttggcacctggatccggatgtcgaatacgagattagggtactactcacccgtcctggtgagggtgggacagggccccctggcccacctctcacaaccagaaccaaatgtgctgatcctgtgcacggcccccagaacgtcgagattgttgacatccgggctcgacagcttaccctgcagtgggaaccattcgggtacgctgtgacaaggtgccatagctacaatctgacagtccaataccaatacgtgttcaaccaacagcaatacgaggccgaagaagtgatacagactagcagtcactatacactgagaggacttaggcccttcatgactattaggctgcggctgctgctcagtaaccccgagggccgtatggaaagtgaagagctcgtggtgcagaccgaagaggacgtcccaggtgcagttcctttggaatctatccaggggggccccttcgaagaaaaaatttatattcagtggaagccccctaatgaaacaaatggcgtaatcacattatacgaaatcaactacaaagccgtggggagtctggatccttctgccgacctcagttctcagcgcgggaaggtcttcaagctcaggaacgaaactcatcatctatttgtgggtttgtaccccggcacgacctattctttcaccatcaaggctagcacggccaaaggctttggaccccctgtcacaacacgcatcgcaacaaagatcagcgctccatcaatgcctgaatatgacacagacacacctcttaacgagacagacaccaccattacagtaatgctgaagcccgcccagtcacgcggagcacccgtaagtgtataccagttggtcgttaaggaggaaagactccagaagtctaggagggccgcagatattatcgaatgctttagcgtacctgtctcctaccgcaacgcttcgtcactggacagcttgcactactttgctgctgaacttaagccagccaatctgcctgttacacagccttttactgtgggagataacaaaacctacaatgggtattggaacccaccgctcagcccacttaagtcttacagcatctacttccaggctctgagtaaggccaatggagagacaaaaatcaattgcgttcggctggccactaaaggcgcctctacccagaatagcaataccgtcgagccagagaagcaggtcgacaataccgtcaagatggctggcgttatcgccggactgctgatgttcataatcatcctgttgggcgtcatgctaacaattaaacggaggaggaatgcgtacagttatagttactatctgtctcagcgaaaattggcaaagaagcagaaggaaacacaaagcggcgcacagagagagatgggtccagtggcttccgccgataagcccacaacaaagctctccgcatctagaaacgacgaaggattcagcagctccagccaggacgtcaacggatttaccgatggaagcagaggggagttgtctcagccaacacttaccatccagacacatccctacaggacctgtgatcccgtggagatgagttacccgagggatcagttccagccagcgatccgtgttgcggatctgttacagcacatcacccagatgaaaaggggacaaggatacggcttcaaagaagagtacgaagcactgcccgagggacagacggcaagctgggacacggcgaaagaggatgagaaccgcaataagaatcggtatggaaatatcatttcctacgatcactcacgcgtgaggctcctggtgcttgacggcgatccccatagcgactacatcaacgcgaactatatcgacggctaccataggccacgccactacatcgccactcaagggcccatgcaggagacggtcaaagatttttggcgaatgatttggcaggagaattccgcatcaatcgtgatggtcacgaacctcgtcgaggtcgggcgtgtgaaatgcgtcaggtactggcctgacgataccgaagtctatggggatatcaaagtcacattaatagagacagaaccactcgcagagtacgtcattcgcacctttaccgtccagaaaaaagggtatcacgagattcgcgagctgcgcttattccatttcacatcctggcctgatcatggagtgccttgttatgccactggcttgcttggattcgttaggcaggttaaatttttgaatccacctgaagcgggtccaatcgttgtgcattgtagtgccggcgcagggcgcacaggctgcttcatcgccatcgatacgatgctagatatggccgagaatgagggagttgtcgatatcttcaactgcgtgcgagagctgcgcgcgcagcgcgtaaatctggtacaaaccgaagagcaatacgtgttcgtccacgacgccatccttgaggcatgtctatgtggtaacaccgcaatacccgtgtgtgagttcagatccctctactacaatatatcacgcctagatccgcagactaattcatctcagatcaaggatgagttccaaaccctgaatattgtgacaccacgcgtgcggccagaggattgtagcatcggactgctgccacgcaatcacgacaagaaccggagcatggacgtgctgcccttagacagatgtctgccgttcctcatctccgtagatggggagtcctccaactatatcaatgctgctctgatggacagtcataaacagcccgcagcctttgtggtgacacagcaccctttacctaatacggtcgccgacttctggagactggtgtttgattataactgtagctctgtggtgatgcttaacgagatggataccgcccagttttgcatgcagtactggcctgagaagacatctggttgctacggccccattcaggtggagtttgtgagtgcagacatcgacgaagatatcattcaccgtatttttagaatttgtaatatggcgcggccccaggacggctatagaatagtacagcacttgcagtacataggctggcctgcctatcgtgatacccctccctctaaaagaagtcttctcaaggtagtgaggaggctagagaaatggcaggaacagtatgatggaagggagggcagaactgtggtgcactgcctgaacggaggcgggcgcagtggtactttctgcgcaatctgctcagtgtgtgaaatgatccagcagcaaaacatcatcgacgtatttcacattgtcaaaacattgagaaataataagagcaacatggtggaaactttggaacagtacaagtttgtgtacgaagtggccttagagtacctgtcatctttttag

SEQ ID NO: 170043 - DNA, 12453 bp, Artificial Sequence
  derived and/or modified sequence
atggcgagcctcgccgcgctcgccctcagcctgctcctgaggctgcagctgccgccactgcccggcgcccgggctcagagcgccgcaggtggctgttcctttgatgagcactacagcaactgtggttatagtgtggctctagggaccaatgggttcacctgggagcagattaacacatgggagaaaccaatgctggaccaggcagtgcccacaggatctttcatgatggtgaacagctctgggagagcctctggccagaaggcccaccttctcctgccaaccctgaaggagaatgacacccactgcatcgacttccattactacttctccagccgtgacaggtccagcccaggggccttgaacgtctacgtgaaggtgaatggtggcccccaagggaaccctgtgtggaatgtgtccggggtcgtcactgagggctgggtgaaggcagagctcgccatcagcactttctggccacatttctatcaggtgatatttgaatccgtctcattgaagggtcatcctggctacatcgccgtggacgaggtccgggtccttgctcatccatgcagaaaagcacctcattttctgcgactccaaaacgtggaggtgaatgtggggcagaatgccacatttcagtgcattgctggtgggaagtggtctcagcatgacaagctttggctccagcaatggaatggcagggacacggccctgatggtcacccgtgtggtcaaccacaggcgcttctcagccacagtcagtgtggcagacactgcccagcggagcgtcagcaagtaccgctgtgtgatccgctctgatggtgggtctggtgtgtccaactacgcggagctgatcgtgaaagagcctcccacgcccattgctcccccagagctgctggctgtgggggccacatacctgtggatcaagccaaatgccaactccatcatcggggatggccccatcatcctgaaggaagtggaatatcgcaccaccacaggcacgtgggcagagacccacatagtcgactctcccaactataagctgtggcatctggaccccgatgttgagtatgagatccgagtgctcctcacacgaccaggtgaggggggtacgggaccgccagggcctcccctcaccaccaggaccaagtgtgcagatccggtacatggcccacagaacgtggaaatcgtagacatcagagcccggcagctgaccctgcagtgggagcccttcggctacgcggtgacccgctgccatagctacaacctcaccgtgcagtaccagtatgtgttcaaccagcagcagtacgaggccgaggaggtcatccagacctcctcccactacaccctgcgaggcctgcgccccttcatgaccatccggctgcgactcttgctgtctaaccccgagggccgaatggagagcgaggagctggtggtgcagactgaggaagacgttccaggagctgttcctctagaatccatccaaggggggccctttgaggagaagatctacatccagtggaaacctcccaatgagaccaatggggtcatcacgctctacgagatcaactacaaggctgtcggctcgctggacccaagtgctgacctctcgagccagagggggaaagtgttcaagctccggaatgaaacccaccacctctttgtgggtctgtacccagggaccacctattccttcaccatcaaggccagcacagcaaagggctttgggccccctgtcaccactcggattgccaccaaaatttcagctccatccatgcctgagtacgacacagacaccccattgaatgagacagacacgaccatcacagtgatgctgaaacccgctcagtcccggggagctcctgtcagtgtttatcagctggttgtcaaggaggagcgacttcagaagtcacggagggcagctgacattattgagtgcttttcggtgcccgtgagctatcggaatgcctccagcctcgattctctacactactttgctgctgagttgaagcctgccaacctgcctgtcacccagccatttacagtgggtgacaataagacatacaatggctactggaaccctcctctctctcccctgaaaagctacagcatctacttccaggcactcagcaaagccaatggagagaccaaaatcaactgtgttcgtctggctacaaaaggtgcctccacccagaattctaacactgtggagccagagaagcaggtggacaacaccgtgaagatggctggcgtgatcgctggcctcctcatgttcatcatcattctcctgggcgtgatgctcaccatcaaaaggagaagaaatgcttattcctactcctattacttgaagctggccaagaagcagaaggagacccagagtggagcccagagggagatggggcctgtggcctctgccgacaaacccaccaccaagctcagcgccagccgcaatgatgaaggcttctcttctagttctcaggacgtcaacggattcacagatggcagccgcggggagctttcccagcccaccctcacgatccagactcatccctaccgcacctgtgaccctgtggagatgagctacccccgggaccagttccaacccgccatccgggtggctgacttgctgcagcacatcacgcagatgaagagaggccagggctacgggttcaaggaggaatacgaggccttaccagaggggcagacagcttcgtgggacacagccaaggaggatgaaaaccgcaataagaatcgatatgggaacatcatatcctacgaccattcccgggtgaggctgctggtgctggatggagacccgcactctgactacatcaatgccaactacattgacggataccatcgacctcggcactacattgcgactcaaggtccgatgcaggagactgtaaaggacttttggagaatgatctggcaggagaactccgccagcatcgtcatggtcacaaacctggtggaagtgggcagggtgaaatgtgtgcgatactggccagatgacacggaggtctacggagacattaaagtcaccctgattgaaacagagcccctggcagaatacgtcatacgcaccttcacagtccagaagaaaggctaccatgagatccgggagctccgcctcttccacttcaccagctggcctgaccacggcgttccctgctatgccactggccttctgggcttcgtccgccaggtcaagttcctcaaccccccggaagctgggcccatagtggtccactgcagtgctggggctgggcggactggctgcttcattgccattgacaccatgcttgacatggccgagaatgaaggggtggtggacatcttcaactgcgtgcgtgagctccgggcccaaagggtcaacctggtacagacagaggagcaatatgtgtttgtgcacgatgccatcctggaagcgtgcctctgtggcaacactgccatccctgtgtgtgagttccgttctctctactacaatatcagcaggctggacccccagacaaactccagccaaatcaaagatgaatttcagaccctcaacattgtgacaccccgtgtgcggcccgaggactgcagcattgggctcctgccccggaaccatgataagaatcgaagtatggacgtgctgcctctggaccgctgcctgcccttccttatctcagtggacggagaatccagcaattacatcaacgcagcactgatggatagccacaagcagcctgccgccttcgtggtcacccagcaccctctacccaacaccgtggcagacttctggaggctggtgttcgattacaactgctcctctgtggtgatgctgaatgagatggacactgcccagttctgtatgcagtactggcctgagaagacctccgggtgctatgggcccatccaggtggagttcgtctccgcagacatcgacgaggacatcatccacagaatattccgcatctgtaacatggcccggccacaggatggttatcgtatagtccagcacctccagtacattggctggcctgcctaccgggacacgcccccctccaagcgctctctgctcaaagtggtccgacgactggagaagtggcaggagcagtatgacgggagggagggacgtactgtggtccactgcctaaatgggggaggccgtagtggaaccttctgtgccatctgcagtgtgtgtgagatgatccagcagcaaaacatcattgacgtgttccacatcgtgaaaacactgcgtaacaacaaatccaacatggtggagaccctggaacagtataaatttgtatacgaggtggcactggaatatttaagctccttttagctcaatgggatggggaacctgccggagtccagaggctgctgtgaccaagcccccttttgtgtgaatggcagtaactgggctcaggagctctgaggtggcaccctgcctgactccaaggagaagactggtggccctgtgttccacggggggctctgcaccttctgaggggtctcctgttgccgtgggagatgctgctccaaaaggcccaggcttccttttcaacctaaccagccacagccaagggcccaagcagaagtacacccacaagcaaggccttggatttctggctcccagaccacctgcttttgttctgagtttgtggatctcttggcaagccaactgtgcaggtgctggggagtgggaggctcccctgccctccttctccttaggagtggaggagatgtgtgttctgctcctctacgtcatggaaaagattgaggctcttgggggtcactgctctgctgccccctgcaacctccttcaggggcctctggcaccagacatttgcagtctggaccagtgtgaccttacgatgttccctaggccacaagagaggccccccatcctcacacctaacctgcatggggcttcgcccacaaccattctgtaccccttccccagcctgggccttgaccgtccagcattcactggccggccagctgtgtccacagcagtttttgataaaggtgttctttgcttttttgtgtggtcagtgggagggggtggaactgcagggaacttctctgctcctccttgtctttgtaaaaagggaccacctccctggggcagggcttgggctgacctgtaggatgtaacccctgtgtttctttggtggtagctttctttggaagagacaaacaagataagatttgattattttccaaagtgtatgtgaaaagaaactttcttttggagggtgtaaaatcttagtctcttatgtcaaaaagaagggggcgggggagtttgagtatgtacctctaagacaaatctctcgggccttttattttttcctggcaatgtccttaaaagctcccaccctgggacagcatgccactgagcaaggagagatgggtgagcctgaagatggtccctttggtttctggggcaaatagagcaccagctttgtgcataatttggatgtccaaatttgaactccttcctaaagaaacccagcagccaccttgaaaaaggccattgtggagcccattatactttgatttaaaataggccaagagaatcaggcctggagatctagggtcttgtccaaagtgtgagtgagtcaatgagagggaaccaacatttgctaagtctctactgtatgccagggatcatgcttggcactttccataggacatttcacacagtccttagaacccccaggagagagctactgacttgttatcatctccatttgatcatctcctccaatgaggaaacccacgcaccttccttagtaatgaaatcctgggttccaaaggggcaggtaatggcaatgagacttctccgtgctgttttcttcatcttctctaagccaagcaattattttatggagggaaaataaggccagaaacttctgagcagataactccacaaatggaaatttagtactttcttcctgatgccagttcttctgggaagcgcagaatttcagatatattttagtaacacattcccagctccccaggaaagccagtctcatctaatttcttagtcagtaaaaacaattccctgttccttcaggctatgaatggaccagccagggaaactctcgaccttgatctctagccagtgcttaggcccaatatctgacagcctcaggtgggctgggacctaggaagctccatcttgaaggctggtctagccccagacagggcatgaggggcagagaattcaagaaggtacagctttggccctcaagagcccactgtatgctggggaaatggaaccatggtgcagtagtgtggagtggatgagtgttccatgagcctaggagcaagaaagtctcttcggcctcgggcttcctggagaaggggacgtccattcctgctgggtcttaacaagcataaaaaggaaaaaaaggaaactcaggcaaagggatccatatgtgcaatggcaaagaaatgtgaaaaggcattgggagaagcagtctgggggaggccagcccagtgcgggcacagcacaacacggggagcagcaagagatgagccagggtccaggagacagatgcccatcgcgagtacagactttgtcctattggcaacaaggagtccatggagctttagagagatgcactcagcttcgtgttggccaagactccttctgggccaatggggctgcctcttttcctttcatcagacactgtgaaaacattcccttaagcgtgcactttttaatatcacatctatttgtctgtctgctcattgttttgttgctggaactaaatatgcaatggatcatgagactcagattctatgagaaacccagggtctctgctttaccacggagcagggtcaccaacccagatctccaggcccatgaggatggaacatgaaaggagccgacaaaagttgcttccattggcatgggctctggagctgtccagaagtccagggacaccagacttgatcaaggaagggctgtcactttagaggttcaaaaggaagtgcctcaaagcaaaggcaagcaaaggaaccccacgatgaacttgctcttttcctttgatgagcctctccccaggtgtatttcagcagaccccggggacccacccccactgggcctgctggcctccctcggctccagcccaatgccccagctggccttccccagcctgcaaggagcctgtagcatggcaaatctgcctgctgtatgctattttcttagatcttggtacatccagacaggatgagggtggagggagagctatttaacacaaatcctaagatttttttctgctcaggaaggggtgaaatagctggcagatacaaaagacagtggcttttatcattttaaatggtaggaatttaaggtgtgacttcagggagaaacaaacttgcaaaaaaaaaaaatctcaggccatgttggggtaacccagcaagggccagtgatgatttcccccagctcatccccttattttcccacaacccaaccattctctaaagcaggacagtgaataggtcttaggccagtgcacacaggaagaaattgaggcttatggatggggatgacttccctaagatcccatgggacaaggatgtggcaaggcttggatgagatggggcaccagtgcccaggaatttgaacattttcctttacccaggaaatctccggagccaacaccaccacccccagggggtctccccaccccaccccatttacagggtgagctcagcctgtcatgagcagaggaaaatattattaatgctctctgagtctttacaacaggagctcttacctcatagatgtgggctctgtttggggaagatgcaaggaagtaatgagaagcccaggaaatttctccacctgtgtttatggcctaaatagcttcaggatgtatcttagctgcactccaacattgcatcctttctggggtgaagaatctgggccaaccaggggtccttgggcctctagaaggccacagtaggcctctctttgtgggaatggaaggggacagtttgcttttagtgctggccctctctgtgggtgtggcctgcaaaggaaccaacagaccctatgctggggactctaacatgtgagctcattaaattcttccagcattctaaaggagggtttgtgattgtcaccatttactgatgaggaaactaaggctcctaggggagaaatcacttgcccacagttccacagctagtgagtgaatgaaccaggatttaaaccggttttttctcactacagagacaatatttttccaccattgtatctcacatttttcccaggaggttacccataacagaagagactagagtggaacagatacgtcagtggataaagctcaaagcaaacaacagtaagcttaaaattccttcatagtctcatgttttacgttcacaattcatgcaaaatttgcattccactttctgatttagccttgttggttttaatatgactctatgaatatttcaaaaaaaaatgtgctctgttcctcatgttgttctgttctgttcaccccgctatgacggaccctaggtcagctggtcttcagcttgaccctagaattgactctaggagcagtgaccctgctgcctcccagagccagttataggctcaagatcaagaccaactgaccttctcctaggcagctcctttggtgtgtgggtgctctgacctcactgttcatgaggggacctcaactaaggcatcttccagttgggtgctggaaggaacccattaactcacactagaatgatgaggatttgctcatctggcgtggagaaggatgagcccacaaaaccctaaagggaaaagagaagctggacacagctgtactcagcagattcctgaatgctaggctggaaagtggtgcctgttgtccaagtggagtcacatggttgctaatgtgggcaagtctgaggacacacttcatgagcagctggggtctggaaggctcctcactttaccctagccacacataattactgggtgcctacagcacctagcaccttggagggggcactattaggaaatcgagattactatggcacaattaattcctgggtaaggcatggggttgtggtggacagagctcagtctttagtttgaacgaaaacatacatacatgaaaaacatacatgaaaaaaggaccctcatcaacattagaaggggtagatttggagcactttaggcaggaaaacaggaacgcaaggccaggaaactggaacccagtgaatactcagaaccgaggatgcagatgacttatttagcaaaatggtcacttctgtgacatagctggagaaaggatgggtaacagcttgccagagccacttggaacaagggcaaatctcagtgtctggggcaaaagatgatgcatttccctctgacccatcatgtttattcatcctccactccccattgccacactagctcttgctgtaagtcctcaccaggatctacatttcctcgtcgctggtgggaaccccttagagtacatagaggtatcagtccagtaagactgctctacacaacagaagtgaggcccagggagtagcagccaggcccttatcctgttacctctgcaggagtgactgcccaacccagatccagagacattgaaggaaatgataattccttggtacctcactgccttgggacaaaatgaagaaagccacccttccttaggctgcagcttgccactcctgggctgggtaaacaggtcatcagcaccaagctcaaccaggagtaacactctggaagacatgggtgagcccaagaggaagcatgaacaggacgctgttcctaagtcatgtcaacaggttgtgctgggccaggatccccagggaaaaaaatggtcaacccaactggagggtaggttagaagaaaaaaaacataaacgtggatagtcatgtcatctcaaatccctgacttggcttccccattacttaacagtctgagctccttcttagcctgtgaccagcttcaaatcacagccaagtaaaacaaggaaataggaaaagtaaatccaactagaagagacaagctgagattcagatttgtttactcctcccatgcaaagtttccctgttggaggttttccatgtatacatgtctagaagtgatagaatgcaaggccttggctttgtcttgcagggatctgcctttgaggtcatagactgaacagcagggagagaggttagtggtggagtgtggggggagctgttctagctccagtttcttctgacacatttttcaggatcatggatctgatcctccgaagcacagcagagatatctaagccatatttgtgcacatgagcagactcttctagttttttagtaaccagggatgggcttttgcatggcactgactatagagatgtcttgtagagatcaagccagtcttttgcatcccacctgcccacctccagaagagatgggaaaaggtcatcaaagggcattcaccaactgaaatccactcatgaatgttaggtctctaaaaggaggcatcaacactcacaatggtagcctccaaacctagcatcccacctatctaagagctcaggggtggtccactggggcagatacaagggaagtgcaagggctcaggatgaaagaaaatctattgggaagagttttaggggcttgatcattatggggcttccttctatatctgagaactgctctgggtggtgagatgtggactctgatccttaattggaatgttcggagaatgagtgtctggtggccttgaagtgttggacagaaaagtatcagtataaaagcctggagctcagggtaattaatgtagttcatggttccttagtgagcaggactcttggatgtggaggagaaagggtcataggaagtaaaccaccaaaattacaaaattgagtctctgtacaattacttcagtgcctttgggcttatgaatacaaatcagtgggccttctctatgatggtccaacaaactctcagtgtccaccctgtccctgtatctcccatggaagatgaataatgtcaggtgttctttgggtcaaaggccccagggcagtctggaggcttagagggcagagtggtgtcattccatgtaaagttaggcttctgaggggtcaggcagaatatggtgtccatatcttccatagctctgcagattcttggatgaagtcaagcacagtttgctagacccaggtcactcctctgagtataactaggacccatgagtgaaacttaatagctgtaaggaagaacctgctgtctgccagagaggataagctgcccatctcagcagctgtctaaaagaaggcaggtgtctctttaaagggaagagaagcattggtgaaatggatttcaggtcacttccattccagatgggtgagatcttgtggagctgggatcatgtttgaactcattcatacctgtagagcacgaatccaagtagattgtgtttggtctgtacaggctgaagccccctgctctcccacccaagtgcccccactgagcaggccaacatgctgttgtggccacatatactgggctgatccaggctggttatcaccaaacagcaaaccatagggaacagctgctttgccatagacccaatacccatgtagatctctcatgagagcagccataactcagacccactgaccaacagggccatgagtgacagccagaaccagtgaaggtccaagtaggacacagagcagggcttttcttaccatacacattatctccagaggttatttctaccccactccctattcaaggcctgttggagcacactgcaaaagcaaaagcacagtaactcaatttacacatgattataatcatttccagtgcacacatttcatcaccaggtggatcctgagctagcccatgtaaatccgggttaacccatattggtaatcatactcaaaagcacttttcaccctacattctactagccaatcaaagacaaagagttgtggcctctaccattgccttggcttctggacaccctcacaagctatcccaaggttcccgctcaactccagggaggctgacatcttcacatccactgggcatataatattgcatgagaccaaagtctccacactctttgcagcctcctccatgaatcccaatggcctgcacttgtacagtttgggtgtttgatagataaagcacgtatgagaagagaaaacaaaataaatcaactttttaaaaaagccagcactgtgctgtcaatgttttttttttcttttcaattctagctcagaaaagcagaaggtaaataatgtcaggtcaatgaatatcagatatattttttgactgtacattacagtgaagtgtaatctttttacacctgcaagtccatcttatttattcttgtaaatgttccctgacaatgtttgtaacatggctgtgttaaaaaatctatacaataaagctgtgaccctgagattcatgttttcctaagata

SEQ ID NO: 170044 - DNA, 12646 bp, Artificial Sequence
  derived and/or modified sequence
cctcccgcctcagttcgcgccgcgcctcggcttggaacgcaggagcgccggctccgggagcccgagcggagccagccgcgcgcacagccagcggccgcgccggcgatgcggggccaccccgcgcccgccccagtcccggccccggcccccgcgggaaggggctgagctgcccgccgccgcccggatggcgagcctcgccgcgctcgccctcagcctgctcctgaggctgcagctgccgccactgcccggcgcccgggctcagagcgccgcaggtggctgttcctttgatgagcactacagcaactgtggttatagtgtggctctagggaccaatgggttcacctgggagcagattaacacatgggagaaaccaatgctggaccaggcagtgcccacaggatctttcatgatggtgaacagctctgggagagcctctggccagaaggcccaccttctcctgccaaccctgaaggagaatgacacccactgcatcgacttccattactacttctccagccgtgacaggtccagcccaggggccttgaacgtctacgtgaaggtgaatggtggcccccaagggaaccctgtgtggaatgtgtccggggtcgtcactgagggctgggtgaaggcagagctcgccatcagcactttctggccacatttctatcaggtgatatttgaatccgtctcattgaagggtcatcctggctacatcgccgtggacgaggtccgggtccttgctcatccatgcagaaaagcacctcattttctgcgactccaaaacgtggaggtgaatgtggggcagaatgccacatttcagtgcattgctggtgggaagtggtctcagcatgacaagctttggctccagcaatggaatggcagggacacggccctgatggtcacccgtgtggtcaaccacaggcgcttctcagccacagtcagtgtggcagacactgcccagcggagcgtcagcaagtaccgctgtgtgatccgctctgatggtgggtctggtgtgtccaactacgcggagctgatcgtgaaagagcctcccacgcccattgctcccccagagctgctggctgtgggggccacatacctgtggatcaagccaaatgccaactccatcatcggggatggccccatcatcctgaaggaagtggaatatcgcaccaccacaggcacgtgggcagagacccacatagtcgactctcccaactataagctgtggcatctggaccccgatgttgagtatgagatccgagtgctcctcacacgaccaggtgaggggggtacgggaccgccagggcctcccctcaccaccaggaccaagtgtgcagatccggtacatggcccacagaacgtggaaatcgtagacatcagagcccggcagctgaccctgcagtgggagcccttcggctacgcggtgacccgctgccatagctacaacctcaccgtgcagtaccagtatgtgttcaaccagcagcagtacgaggccgaggaggtcatccagacctcctcccactacaccctgcgaggcctgcgccccttcatgaccatccggctgcgactcttgctgtctaaccccgagggccgaatggagagcgaggagctggtggtgcagactgaggaagacgttccaggagctgttcctctagaatccatccaaggggggccctttgaggagaagatctacatccagtggaaacctcccaatgagaccaatggggtcatcacgctctacgagatcaactacaaggctgtcggctcgctggacccaagtgctgacctctcgagccagagggggaaagtgttcaagctccggaatgaaacccaccacctctttgtgggtctgtacccagggaccacctattccttcaccatcaaggccagcacagcaaagggctttgggccccctgtcaccactcggattgccaccaaaatttcagctccatccatgcctgagtacgacacagacaccccattgaatgagacagacacgaccatcacagtgatgctgaaacccgctcagtcccggggagctcctgtcagtgtttatcagctggttgtcaaggaggagcgacttcagaagtcacggagggcagctgacattattgagtgcttttcggtgcccgtgagctatcggaatgcctccagcctcgattctctacactactttgctgctgagttgaagcctgccaacctgcctgtcacccagccatttacagtgggtgacaataagacatacaatggctactggaaccctcctctctctcccctgaaaagctacagcatctacttccaggcactcagcaaagccaatggagagaccaaaatcaactgtgttcgtctggctacaaaaggtgcctccacccagaattctaacactgtggagccagagaagcaggtggacaacaccgtgaagatggctggcgtgatcgctggcctcctcatgttcatcatcattctcctgggcgtgatgctcaccatcaaaaggagaagaaatgcttattcctactcctattacttgtcccaaaggaagctggccaagaagcagaaggagacccagagtggagcccagagggagatggggcctgtggcctctgccgacaaacccaccaccaagctcagcgccagccgcaatgatgaaggcttctcttctagttctcaggacgtcaacggattcacagatggcagccgcggggagctttcccagcccaccctcacgatccagactcatccctaccgcacctgtgaccctgtggagatgagctacccccgggaccagttccaacccgccatccgggtggctgacttgctgcagcacatcacgcagatgaagagaggccagggctacgggttcaaggaggaatacgaggccttaccagaggggcagacagcttcgtgggacacagccaaggaggatgaaaaccgcaataagaatcgatatgggaacatcatatcctacgaccattcccgggtgaggctgctggtgctggatggagacccgcactctgactacatcaatgccaactacattgacggataccatcgacctcggcactacattgcgactcaaggtccgatgcaggagactgtaaaggacttttggagaatgatctggcaggagaactccgccagcatcgtcatggtcacaaacctggtggaagtgggcagggtgaaatgtgtgcgatactggccagatgacacggaggtctacggagacattaaagtcaccctgattgaaacagagcccctggcagaatacgtcatacgcaccttcacagtccagaagaaaggctaccatgagatccgggagctccgcctcttccacttcaccagctggcctgaccacggcgttccctgctatgccactggccttctgggcttcgtccgccaggtcaagttcctcaaccccccggaagctgggcccatagtggtccactgcagtgctggggctgggcggactggctgcttcattgccattgacaccatgcttgacatggccgagaatgaaggggtggtggacatcttcaactgcgtgcgtgagctccgggcccaaagggtcaacctggtacagacagaggagcaatatgtgtttgtgcacgatgccatcctggaagcgtgcctctgtggcaacactgccatccctgtgtgtgagttccgttctctctactacaatatcagcaggctggacccccagacaaactccagccaaatcaaagatgaatttcagaccctcaacattgtgacaccccgtgtgcggcccgaggactgcagcattgggctcctgccccggaaccatgataagaatcgaagtatggacgtgctgcctctggaccgctgcctgcccttccttatctcagtggacggagaatccagcaattacatcaacgcagcactgatggatagccacaagcagcctgccgccttcgtggtcacccagcaccctctacccaacaccgtggcagacttctggaggctggtgttcgattacaactgctcctctgtggtgatgctgaatgagatggacactgcccagttctgtatgcagtactggcctgagaagacctccgggtgctatgggcccatccaggtggagttcgtctccgcagacatcgacgaggacatcatccacagaatattccgcatctgtaacatggcccggccacaggatggttatcgtatagtccagcacctccagtacattggctggcctgcctaccgggacacgcccccctccaagcgctctctgctcaaagtggtccgacgactggagaagtggcaggagcagtatgacgggagggagggacgtactgtggtccactgcctaaatgggggaggccgtagtggaaccttctgtgccatctgcagtgtgtgtgagatgatccagcagcaaaacatcattgacgtgttccacatcgtgaaaacactgcgtaacaacaaatccaacatggtggagaccctggaacagtataaatttgtatacgaggtggcactggaatatttaagctccttttagctcaatgggatggggaacctgccggagtccagaggctgctgtgaccaagcccccttttgtgtgaatggcagtaactgggctcaggagctctgaggtggcaccctgcctgactccaaggagaagactggtggccctgtgttccacggggggctctgcaccttctgaggggtctcctgttgccgtgggagatgctgctccaaaaggcccaggcttccttttcaacctaaccagccacagccaagggcccaagcagaagtacacccacaagcaaggccttggatttctggctcccagaccacctgcttttgttctgagtttgtggatctcttggcaagccaactgtgcaggtgctggggagtgggaggctcccctgccctccttctccttaggagtggaggagatgtgtgttctgctcctctacgtcatggaaaagattgaggctcttgggggtcactgctctgctgccccctgcaacctccttcaggggcctctggcaccagacatttgcagtctggaccagtgtgaccttacgatgttccctaggccacaagagaggccccccatcctcacacctaacctgcatggggcttcgcccacaaccattctgtaccccttccccagcctgggccttgaccgtccagcattcactggccggccagctgtgtccacagcagtttttgataaaggtgttctttgcttttttgtgtggtcagtgggagggggtggaactgcagggaacttctctgctcctccttgtctttgtaaaaagggaccacctccctggggcagggcttgggctgacctgtaggatgtaacccctgtgtttctttggtggtagctttctttggaagagacaaacaagataagatttgattattttccaaagtgtatgtgaaaagaaactttcttttggagggtgtaaaatcttagtctcttatgtcaaaaagaagggggcgggggagtttgagtatgtacctctaagacaaatctctcgggccttttattttttcctggcaatgtccttaaaagctcccaccctgggacagcatgccactgagcaaggagagatgggtgagcctgaagatggtccctttggtttctggggcaaatagagcaccagctttgtgcataatttggatgtccaaatttgaactccttcctaaagaaacccagcagccaccttgaaaaaggccattgtggagcccattatactttgatttaaaataggccaagagaatcaggcctggagatctagggtcttgtccaaagtgtgagtgagtcaatgagagggaaccaacatttgctaagtctctactgtatgccagggatcatgcttggcactttccataggacatttcacacagtccttagaacccccaggagagagctactgacttgttatcatctccatttgatcatctcctccaatgaggaaacccacgcaccttccttagtaatgaaatcctgggttccaaaggggcaggtaatggcaatgagacttctccgtgctgttttcttcatcttctctaagccaagcaattattttatggagggaaaataaggccagaaacttctgagcagataactccacaaatggaaatttagtactttcttcctgatgccagttcttctgggaagcgcagaatttcagatatattttagtaacacattcccagctccccaggaaagccagtctcatctaatttcttagtcagtaaaaacaattccctgttccttcaggctatgaatggaccagccagggaaactctcgaccttgatctctagccagtgcttaggcccaatatctgacagcctcaggtgggctgggacctaggaagctccatcttgaaggctggtctagccccagacagggcatgaggggcagagaattcaagaaggtacagctttggccctcaagagcccactgtatgctggggaaatggaaccatggtgcagtagtgtggagtggatgagtgttccatgagcctaggagcaagaaagtctcttcggcctcgggcttcctggagaaggggacgtccattcctgctgggtcttaacaagcataaaaaggaaaaaaaggaaactcaggcaaagggatccatatgtgcaatggcaaagaaatgtgaaaaggcattgggagaagcagtctgggggaggccagcccagtgcgggcacagcacaacacggggagcagcaagagatgagccagggtccaggagacagatgcccatcgcgagtacagactttgtcctattggcaacaaggagtccatggagctttagagagatgcactcagcttcgtgttggccaagactccttctgggccaatggggctgcctcttttcctttcatcagacactgtgaaaacattcccttaagcgtgcactttttaatatcacatctatttgtctgtctgctcattgttttgttgctggaactaaatatgcaatggatcatgagactcagattctatgagaaacccagggtctctgctttaccacggagcagggtcaccaacccagatctccaggcccatgaggatggaacatgaaaggagccgacaaaagttgcttccattggcatgggctctggagctgtccagaagtccagggacaccagacttgatcaaggaagggctgtcactttagaggttcaaaaggaagtgcctcaaagcaaaggcaagcaaaggaaccccacgatgaacttgctcttttcctttgatgagcctctccccaggtgtatttcagcagaccccggggacccacccccactgggcctgctggcctccctcggctccagcccaatgccccagctggccttccccagcctgcaaggagcctgtagcatggcaaatctgcctgctgtatgctattttcttagatcttggtacatccagacaggatgagggtggagggagagctatttaacacaaatcctaagatttttttctgctcaggaaggggtgaaatagctggcagatacaaaagacagtggcttttatcattttaaatggtaggaatttaaggtgtgacttcagggagaaacaaacttgcaaaaaaaaaaaatctcaggccatgttggggtaacccagcaagggccagtgatgatttcccccagctcatccccttattttcccacaacccaaccattctctaaagcaggacagtgaataggtcttaggccagtgcacacaggaagaaattgaggcttatggatggggatgacttccctaagatcccatgggacaaggatgtggcaaggcttggatgagatggggcaccagtgcccaggaatttgaacattttcctttacccaggaaatctccggagccaacaccaccacccccagggggtctccccaccccaccccatttacagggtgagctcagcctgtcatgagcagaggaaaatattattaatgctctctgagtctttacaacaggagctcttacctcatagatgtgggctctgtttggggaagatgcaaggaagtaatgagaagcccaggaaatttctccacctgtgtttatggcctaaatagcttcaggatgtatcttagctgcactccaacattgcatcctttctggggtgaagaatctgggccaaccaggggtccttgggcctctagaaggccacagtaggcctctctttgtgggaatggaaggggacagtttgcttttagtgctggccctctctgtgggtgtggcctgcaaaggaaccaacagaccctatgctggggactctaacatgtgagctcattaaattcttccagcattctaaaggagggtttgtgattgtcaccatttactgatgaggaaactaaggctcctaggggagaaatcacttgcccacagttccacagctagtgagtgaatgaaccaggatttaaaccggttttttctcactacagagacaatatttttccaccattgtatctcacatttttcccaggaggttacccataacagaagagactagagtggaacagatacgtcagtggataaagctcaaagcaaacaacagtaagcttaaaattccttcatagtctcatgttttacgttcacaattcatgcaaaatttgcattccactttctgatttagccttgttggttttaatatgactctatgaatatttcaaaaaaaaatgtgctctgttcctcatgttgttctgttctgttcaccccgctatgacggaccctaggtcagctggtcttcagcttgaccctagaattgactctaggagcagtgaccctgctgcctcccagagccagttataggctcaagatcaagaccaactgaccttctcctaggcagctcctttggtgtgtgggtgctctgacctcactgttcatgaggggacctcaactaaggcatcttccagttgggtgctggaaggaacccattaactcacactagaatgatgaggatttgctcatctggcgtggagaaggatgagcccacaaaaccctaaagggaaaagagaagctggacacagctgtactcagcagattcctgaatgctaggctggaaagtggtgcctgttgtccaagtggagtcacatggttgctaatgtgggcaagtctgaggacacacttcatgagcagctggggtctggaaggctcctcactttaccctagccacacataattactgggtgcctacagcacctagcaccttggagggggcactattaggaaatcgagattactatggcacaattaattcctgggtaaggcatggggttgtggtggacagagctcagtctttagtttgaacgaaaacatacatacatgaaaaacatacatgaaaaaaggaccctcatcaacattagaaggggtagatttggagcactttaggcaggaaaacaggaacgcaaggccaggaaactggaacccagtgaatactcagaaccgaggatgcagatgacttatttagcaaaatggtcacttctgtgacatagctggagaaaggatgggtaacagcttgccagagccacttggaacaagggcaaatctcagtgtctggggcaaaagatgatgcatttccctctgacccatcatgtttattcatcctccactccccattgccacactagctcttgctgtaagtcctcaccaggatctacatttcctcgtcgctggtgggaaccccttagagtacatagaggtatcagtccagtaagactgctctacacaacagaagtgaggcccagggagtagcagccaggcccttatcctgttacctctgcaggagtgactgcccaacccagatccagagacattgaaggaaatgataattccttggtacctcactgccttgggacaaaatgaagaaagccacccttccttaggctgcagcttgccactcctgggctgggtaaacaggtcatcagcaccaagctcaaccaggagtaacactctggaagacatgggtgagcccaagaggaagcatgaacaggacgctgttcctaagtcatgtcaacaggttgtgctgggccaggatccccagggaaaaaaatggtcaacccaactggagggtaggttagaagaaaaaaaacataaacgtggatagtcatgtcatctcaaatccctgacttggcttccccattacttaacagtctgagctccttcttagcctgtgaccagcttcaaatcacagccaagtaaaacaaggaaataggaaaagtaaatccaactagaagagacaagctgagattcagatttgtttactcctcccatgcaaagtttccctgttggaggttttccatgtatacatgtctagaagtgatagaatgcaaggccttggctttgtcttgcagggatctgcctttgaggtcatagactgaacagcagggagagaggttagtggtggagtgtggggggagctgttctagctccagtttcttctgacacatttttcaggatcatggatctgatcctccgaagcacagcagagatatctaagccatatttgtgcacatgagcagactcttctagttttttagtaaccagggatgggcttttgcatggcactgactatagagatgtcttgtagagatcaagccagtcttttgcatcccacctgcccacctccagaagagatgggaaaaggtcatcaaagggcattcaccaactgaaatccactcatgaatgttaggtctctaaaaggaggcatcaacactcacaatggtagcctccaaacctagcatcccacctatctaagagctcaggggtggtccactggggcagatacaagggaagtgcaagggctcaggatgaaagaaaatctattgggaagagttttaggggcttgatcattatggggcttccttctatatctgagaactgctctgggtggtgagatgtggactctgatccttaattggaatgttcggagaatgagtgtctggtggccttgaagtgttggacagaaaagtatcagtataaaagcctggagctcagggtaattaatgtagttcatggttccttagtgagcaggactcttggatgtggaggagaaagggtcataggaagtaaaccaccaaaattacaaaattgagtctctgtacaattacttcagtgcctttgggcttatgaatacaaatcagtgggccttctctatgatggtccaacaaactctcagtgtccaccctgtccctgtatctcccatggaagatgaataatgtcaggtgttctttgggtcaaaggccccagggcagtctggaggcttagagggcagagtggtgtcattccatgtaaagttaggcttctgaggggtcaggcagaatatggtgtccatatcttccatagctctgcagattcttggatgaagtcaagcacagtttgctagacccaggtcactcctctgagtataactaggacccatgagtgaaacttaatagctgtaaggaagaacctgctgtctgccagagaggataagctgcccatctcagcagctgtctaaaagaaggcaggtgtctctttaaagggaagagaagcattggtgaaatggatttcaggtcacttccattccagatgggtgagatcttgtggagctgggatcatgtttgaactcattcatacctgtagagcacgaatccaagtagattgtgtttggtctgtacaggctgaagccccctgctctcccacccaagtgcccccactgagcaggccaacatgctgttgtggccacatatactgggctgatccaggctggttatcaccaaacagcaaaccatagggaacagctgctttgccatagacccaatacccatgtagatctctcatgagagcagccataactcagacccactgaccaacagggccatgagtgacagccagaaccagtgaaggtccaagtaggacacagagcagggcttttcttaccatacacattatctccagaggttatttctaccccactccctattcaaggcctgttggagcacactgcaaaagcaaaagcacagtaactcaatttacacatgattataatcatttccagtgcacacatttcatcaccaggtggatcctgagctagcccatgtaaatccgggttaacccatattggtaatcatactcaaaagcacttttcaccctacattctactagccaatcaaagacaaagagttgtggcctctaccattgccttggcttctggacaccctcacaagctatcccaaggttcccgctcaactccagggaggctgacatcttcacatccactgggcatataatattgcatgagaccaaagtctccacactctttgcagcctcctccatgaatcccaatggcctgcacttgtacagtttgggtgtttgatagataaagcacgtatgagaagagaaaacaaaataaatcaactttttaaaaaagccagcactgtgctgtcaatgttttttttttcttttcaattctagctcagaaaagcagaaggtaaataatgtcaggtcaatgaatatcagatatattttttgactgtacattacagtgaagtgtaatctttttacacctgcaagtccatcttatttattcttgtaaatgttccctgacaatgtttgtaacatggctgtgttaaaaaatctatacaataaagctgtgaccctgagattcatgttttcctaagata

SEQ ID NO: 170045 - DNA, 4325 bp, Artificial Sequence
  derived and/or modified sequence
atggcctccttagccgcactggcactgagcctgctgctgagactccagttacctcctctgcctggagcccgagctcagtccgctgcgggaggttgcagcttcgatgaacattactccaactgcggctactccgttgccttggggactaatggcttcacatgggaacagattaacacatgggagaaaccaatgctggaccaggcagtgccaaccggcagcttcatgatggtgaattcatctggacgagcaagtggacagaaggctcatctgttactgccaacgttaaaggagaatgacactcactgtatagactttcactattatttttcctccagagacaggagtagcccaggagccctgaacgtctacgtcaaagttaatggaggtccccaagggaacccagtgtggaatgtgagtggcgtagtcaccgagggctgggtaaaagccgagctcgccattagcacattctggcctcacttctatcaagtcatctttgaatcagtgagcctcaaagggcaccccggttacattgccgtcgacgaggtgcgggtgctggcacatccatgccgaaaagcaccacattttctccgacttcaaaacgtggaggtgaatgtgggtcagaatgctacttttcaatgcattgctgggggaaagtggtcccaacatgacaagttatggctgcagcagtggaacggtagggatacggccctcatggtaactcgtgtggttaatcatcgcaggttctcagcaacagtttccgtagccgacaccgcacagcgctctgtgtccaagtatagatgtgtgattcggagcgatggaggaagcggagtttcaaattacgccgaattgattgtaaaggaacctcctacaccaattgcgccacccgagctccttgccgttggcgctacatatctttggattaagcccaatgcaaactctataatcggcgatggccctatcattctcaaggaggtcgagtaccgcaccacaaccggtacctgggccgagacccacatcgtggattcccctaactacaaactgtggcatcttgatccggatgtggaatacgaaatccgcgttctgcttacaagacctggcgagggaggcactggtcctccgggtccacccttaaccacccggacaaaatgtgctgatcccgtgcatggtccacaaaatgttgagatcgtggacatcagggcgaggcagctgaccttacagtgggagccgtttggctacgctgtaacgcgctgccacagttataacctgactgtgcagtatcagtacgtattcaaccagcagcagtacgaagcagaggaggtgatacagacctcttctcactacacattgagaggcctccgcccatttatgactatacgcctgagactactattgagcaaccccgaaggacggatggaaagtgaggagctcgtcgtccaaacagaggaggatgtgccaggcgctgtacccctcgaatccatacagggaggtccattcgaggaaaagatctacattcagtggaagcctcctaacgagaccaacggggtaattacattgtatgagattaattacaaagcagtaggttcccttgatccatccgcagacctgagctcccagcgcggaaaggtttttaaactgaggaacgagactcatcacctgtttgttgggctctaccctggtactacctactcctttactatcaaagcatccacagctaaaggctttggtcctccagttactacccggatcgccacaaagatctcagctccatctatgcctgagtacgacactgacaccccattgaacgagacagacacaaccataaccgttatgttaaagcctgcgcagagccggggagcaccagttagcgtgtatcagctcgtggtgaaggaagagagattgcagaagagcaggagagcagctgacatcatcgagtgtttctccgttcctgttagttataggaatgccagcagcctggactcacttcattactttgctgccgaactgaaacctgccaacttacctgtcacacaacccttcacagtgggtgataacaagacctacaacggctactggaacccgcctttgtcaccgttgaaaagttattctatctatttccaggcactgagtaaggccaatggcgagactaagatcaattgcgtgagactcgccactaagggagcaagcacccagaactccaatactgtcgagccagaaaagcaggtcgacaacacagtcaagatggcaggagtgatagccggacttctaatgttcataattattctcctgggggtgatgctgacaatcaagcggagacgtaatgcttatagctattcttactacctgaagttggccaagaagcaaaaggaaacccaatctggggctcagagagaaatgggtcccgttgctagcgctgataagcccactactaagctatctgcaagtcggaatgacgaaggattctcatcctcttcccaggatgtgaatggttttactgatggcagcaggggagaattgtcccagccaacactcacaattcagacccatccttacaggacatgcgatcctgtcgaaatgtcctatccgagagaccagttccagcccgctatcagagtggccgacctgctgcagcatatcacacagatgaaacgcggacagggctacggttttaaggaggagtatgaggccctgccggaaggacagactgccagctgggataccgctaaggaggacgagaaccggaataaaaacagatatggtaatataattagttacgatcacagccgtgtacgtcttttggttcttgacggagaccctcactctgactatatcaatgccaattatattgatggataccatcgcccacgacactacattgcaacacaaggcccaatgcaggagaccgttaaggacttctggcgcatgatctggcaagaaaattcagcttctattgtcatggtgactaatctggtggaggtgggccgagtcaaatgtgtgagatattggcctgatgataccgaggtttacggcgacatcaaggtcacattgatagagactgagccattggctgaatacgtgattcgcacatttaccgtgcaaaagaagggataccacgaaatccgggagctccgtctgtttcattttacatcatggcctgaccacggggttccctgttacgccaccggacttctgggtttcgtcagacaagtcaaatttctgaatcctccagaggcaggccctattgttgtacattgctccgcaggcgctgggagaacagggtgtttcattgccatcgataccatgctggacatggctgagaatgaaggagtggtggacatattcaactgcgtgcgcgagctgcgcgctcagcgcgtgaacctggtacaaaccgaagagcaatatgtgttcgtgcacgatgctatcctggaggcatgtctgtgcggtaacaccgcaataccggtttgcgaatttcggtcattgtattataacatcagccgtttggatcctcagaccaactcatcacagatcaaagatgagtttcagaccctgaacattgtgacccccagggttcggccagaagattgcagcatcgggctactgccaaggaatcacgataagaacagatcaatggacgtgctgcctctggaccgttgcctcccattcttgatatcagtcgacggcgagagctctaactatattaatgcggcattgatggactcccacaagcagcctgctgctttcgtagtgactcagcaccccctcccgaacaccgtggccgacttctggagactcgtgttcgattacaattgctctagcgtcgtgatgctgaacgagatggacactgcccaattctgcatgcaatactggcctgaaaagacaagcggatgctacggccctatccaggtggagtttgtgagcgcagacatcgatgaagacatcatccaccggatttttaggatctgcaacatggcgaggccgcaggatgggtacaggattgtgcaacacctgcagtatatcggttggcccgcttatagggacacaccacctagtaaacgatcccttctgaaggtggtccggagactagagaagtggcaggagcagtatgatgggcgtgagggtcgcacagtcgtgcactgtcttaatggcggtgggagatctggcaccttctgcgccatctgctctgtgtgtgagatgatccaacagcagaacatcatagatgtattccacattgtgaagacattgcgaaacaacaaatcaaatatggtggagacactcgagcagtataaattcgtgtatgaagtagctctggaatatctgagctctttcta

SEQ ID NO: 170046 - DNA, 4334 bp, Artificial Sequence
  derived and/or modified sequence
atggcctctctggctgctctggcgctgtctcttcttctgcgcctccaactcccacccctccccggagcccgagcccaaagcgccgctggaggctgcagcttcgatgaacactattctaactgtggctacagtgtggcacttggcacgaacggcttcacttgggaacagattaatacatgggagaagccaatgttggaccaggctgtgcccacaggctcatttatgatggttaactctagcggacgagcatcggggcagaaagcgcacttactgttaccaactctgaaggagaacgacacacattgcatagactttcactattatttcagctctcgcgatcggagcagtcccggagctctgaatgtctacgtgaaagttaatgggggtccccagggaaacccagtgtggaacgtgagcggagtcgtcacggaaggctgggtcaaagcagaactggcaataagcactttctggccccatttctaccaggtgatattcgaaagtgtgtcgctgaaaggccatcctgggtacattgcggtggacgaagtccgggtgctagctcacccgtgtcgcaaagcgcctcactttctccgtctgcagaacgtcgaagtgaacgtgggccagaatgcgacctttcagtgtattgctggaggtaagtggtctcagcatgacaaactgtggctgcagcagtggaatggaagagacaccgccctcatggtcacccgtgtggtcaatcacaggaggttctctgctaccgtgtccgtagcagacactgcccagcgatccgtttctaaataccgatgcgttattcgcagtgatgggggtagtggcgtgtccaactacgcagagttgatcgtgaaggaaccaccaaccccaatcgcaccccctgagctgttggctgtcggtgctacttacttatggattaagcccaacgcaaacagtattattggcgacgggccaattatactcaaggaggttgagtatcgcactaccactggcacctgggcagagacgcatattgtcgattccccaaattataaactgtggcatctcgatcctgatgtagaatatgaaattagggttctgctgactagacctggagagggcggaaccggaccaccagggcctccacttacaaccagaaccaagtgtgccgatcctgtgcacggtccacaaaacgtcgaaatcgtcgacatccgcgctcggcaattgactttacagtgggagcccttcggatatgctgtcacccgctgccattcctacaatctcaccgtccaatatcagtacgtcttcaaccaacaacagtatgaagcagaggaggtaattcaaacaagcagccactatactttacggggtctgaggccgttcatgaccatacgccttcgactgttgctcagtaatcccgaggggagaatggaatctgaagaactggtcgtgcaaaccgaagaagacgtccccggagccgtcccactggaatcgattcagggcggtccgttcgaggagaagatctacatacagtggaagccacctaatgagactaacggcgtgataaccctgtatgaaattaattacaaggcagttggttcgttagatccttcagcggacctctcaagtcaacgagggaaggtattcaaactgcgcaatgagacccaccatctttttgtgggactgtatcccggaacgacatactccttcacaatcaaagcttctaccgcaaagggattcggccctccggtgacaacccgcattgcaactaaaatctccgcaccaagtatgccagagtacgatacagacacacccctcaacgaaacggatactaccattactgtgatgctgaagcctgcacaatctcgcggtgctccggtctcagtgtaccaactggtagttaaggaggagcggctgcagaaaagcagacgcgctgcagatattatagagtgcttttccgttcctgtttcctatcgcaacgcatccagcctggacagccttcactacttcgcagccgagctgaagcccgctaacctgcccgtgacccagcctttcaccgtcggcgataacaaaacatataacggttattggaacccccctctgagccccctgaaatcctactccatatattttcaagcactctctaaggcaaacggcgaaaccaagattaactgtgtgagactggcaacgaagggcgcttctacccagaactctaacactgtggagcccgagaaacaggtagacaacactgtaaaaatggcaggagtgatagcaggactactcatgttcatcataatcctgctgggggtgatgttgaccattaagagaaggagaaatgcctactcctattcatattacctgtcgcagagaaagctggccaaaaagcagaaggagactcaaagcggagctcaaagggagatgggacctgtggcaagtgccgacaaacccaccaccaagctcagcgcaagtagaaatgatgaaggattcagtagcagctcacaggacgtcaacgggttcactgacggttcacggggtgagcttagccagcctaccctgaccattcagactcacccttatagaacctgcgatcctgtggaaatgagttaccccagagatcagttccagcccgcaattcgcgtcgcagacttactgcagcatatcacccagatgaagcgtggccagggctatggctttaaggaagagtacgaggcactccccgagggccagacagcaagttgggacactgcgaaggaggatgaaaatcgaaataaaaataggtacggcaacatcatctcttacgaccacagccgggtgagactgctcgttttggacggggacccccacagcgactatataaacgccaattatatagacggctatcatagacctcgacactatattgctactcaggggcctatgcaggagacggtgaaagacttctggcgaatgatctggcaggagaatagtgccagcattgttatggtgaccaatcttgtagaagttggacgcgtcaaatgtgtccggtattggcccgatgatacagaagtgtatggggatataaaagtcactttgattgaaactgagccacttgcggaatacgtgatccgtacttttaccgtgcaaaaaaaaggttatcacgagatccgggagctacgcctgttccacttcacctcatggccagaccacggagtgccatgctacgccaccggcctactggggtttgtccggcaagttaagtttctaaaccctccggaagccggacccattgtggtgcactgcagcgccggagctggcaggaccggttgctttatcgccatcgatacgatgctggatatggcagagaatgagggagttgtggatatctttaactgcgtccgggagctgagagcccaacgagtcaatcttgtacagaccgaggaacagtatgtgtttgttcatgatgccatacttgaagcatgcctttgcggaaatactgccatacctgtgtgcgagttcagatcactatactataacatttctcgactcgatcctcagacaaatagctctcagataaaagacgagtttcaaactctgaacattgtaactccacgagtgcggccagaggactgctccatcggcctcctgcctaggaaccacgataagaaccggtctatggacgtgctaccactggacaggtgcctgccattcctgatctccgtggatggcgaaagcagtaattacataaatgctgcgttgatggactcacacaaacaaccggctgcatttgtggtgactcagcaccccctgcctaacaccgtcgccgatttctggcgtctggtgtttgattacaattgcagcagcgttgtcatgctgaacgagatggacacagctcagttctgcatgcagtactggcctgagaagacatcaggttgctacgggcctatccaggtcgaattcgtgtccgccgacattgatgaggatataatccaccgaatttttcggatctgtaacatggcaagaccacaggacggatacagaatcgttcagcacctgcagtacattggatggccggcttaccgggacacccccccttctaagagaagtctcctgaaggtcgtccggcgtctggagaagtggcaggagcagtatgatggaagggagggcaggacggtggtacactgcctgaatggcggtggaagaagcggtaccttttgtgcgatttgtagtgtttgcgagatgatccagcaacagaatattatcgatgtgtttcacattgtgaagacattacgcaataacaagtccaacatggtggaaacattggagcagtataagtttgtctacgaggttgccttagagtacctgtcaagcttcta

SEQ ID NO: 170047 - protein, 179 aa, Artificial Sequence
  derived and/or modified sequence
MNKRGFSMEVGQYIFVNCPSISLLEWHPFTLTSAPEEDFFSIHIRAAGDWTENLIRAFEQQYSPIPRIEVDGPFGTASEDVFQYEVAVLVGAGIGVTPFASILKSIWYKFQCADHNLKTKKIYFYWICRETGAFSWFNNLLTSLEQEMEELGKSLRKCCHRYSSLDPRKVQFYFNKENF

SEQ ID NO: 170048 - protein, 564 aa, Artificial Sequence
  derived and/or modified sequence
MGNWVVNHWFSVLFLVVWLGLNVFLFVDAFLKYEKADKYYYTRKILGSTLACARASALCLNFNSTLILLPVCRNLLSFLRGTCSFCSRTLRKQLDHNLTFHKLVAYMICLHTAIHIIAHLFNFDCYSRSRQATDGSLASILSSLSHDEKKGGSWLNPIQSRNTTVEYVTFTSIAGLTGVIMTIALILMVTSATEFIRRSYFEVFWYTHHLFIFYILGLGIHGIGGIVRGQTEESMNESHPRKCAESFEMWDDRDSHCRRPKFEGHPPESWKWILAPVILYICERILRFYRSQQKVVITKVVMHPSKVLELQMNKRGFSMEVGQYIFVNCPSISLLEWHPFTLTSAPEEDFFSIHIRAAGDWTENLIRAFEQQYSPIPRIEVDGPFGTASEDVFQYEVAVLVGAGIGVTPFASILKSIWYKFQCADHNLKTKKIYFYWICRETGAFSWFNNLLTSLEQEMEELGKVGFLNYRLFLTGWDSNIVGHAALNFDKATDIVTGLKQKTSFGRPMWDNEFSTIATSHPKSVVGVFLCGPRTLAKSLRKCCHRYSSLDPRKVQFYFNKENF

SEQ ID NO: 170049 - protein, 175 aa, Artificial Sequence
  derived and/or modified sequence
  misc_feature (1)..(1): Xaa can be any naturally occurring amino acid
XFSMEVGQYIFVNCPSISLLEWHPFTLTSAPEEDFFSIHIRAAGDWTENLIRAFEQQYSPIPRIEVDGPFGTASEDVFQYEVAVLVGAGIGVTPFASILKSIWYKFQCADHNLKTKKIYFYWICRETGAFSWFNNLLTSLEQEMEELGKSLRKCCHRYSSLDPRKVQFYFNKENF

SEQ ID NO: 170050 - DNA, 1695 bp, Artificial Sequence
  derived and/or modified sequence
atgggcaattgggtagtgaatcactggttcagcgtacttttcctcgtcgtctggcttggcctcaacgtcttcctgtttgtggacgcctttttgaagtacgagaaagctgacaagtactactatactcgtaaaatcctaggaagcacacttgcctgtgccagagccagcgcactctgcctgaacttcaactcaacactgatcctgctgcccgtgtgccgcaatctgttaagtttcctgcggggaacctgcagcttttgctctagaacgcttcggaaacagctggaccataacctaacgttccacaagctggtggcatacatgatttgtctgcacacagcaattcatattatcgcgcatttattcaatttcgactgttattctagatctagacaagccactgatggcagcttggcttccattcttagttccctctcgcatgacgagaagaaaggggggagttggctgaacccaatacaatcccgcaataccactgtggaatacgtcactttcacttccattgcgggcctcaccggagtcattatgactatcgccctaatcctgatggtgacttcggccaccgagttcatccgaaggagctatttcgaggtgttctggtatacacatcacctgttcattttttatatactggggctcggcatccacggcatcggcggcattgtgcgcgggcagactgaggagtcaatgaatgagtcacacccaaggaagtgcgctgagtcatttgagatgtgggacgacagggatagccactgccgccgtcctaagtttgagggccacccgcctgaatcatggaaatggatccttgcacctgtgatactgtatatctgtgaacgaatcctccgattctaccggagccaacaaaaggttgtgataacgaaagtggtgatgcatccctctaaggtgctggaactccaaatgaacaagagaggattcagcatggaagtgggtcagtacatcttcgttaactgcccaagtattagccttctcgagtggcacccttttacactgactagcgcaccagaagaagactttttttcaattcatatccgagccgctggcgactggaccgagaatctcatacgtgccttcgagcagcagtattcacccattcctagaatcgaggtggatggccccttcgggactgcatccgaagatgtgttccaatacgaggtggcagttcttgttggagccggcatcggagtgacccccttcgctagcattcttaagtcaatctggtacaagtttcagtgcgccgaccacaacctgaagaccaaaaagatatacttctattggatttgccgcgaaactggcgcattctcttggttcaataatctgctgacatccctggaacaggagatggaggaactgggtaaggtgggcttcctgaattaccgtttgtttcttaccgggtgggatagcaatatcgtggggcacgcagctctgaacttcgacaaggctaccgatatcgttactggactaaagcaaaagacatcatttggccgccctatgtgggacaatgagttcagtacaatcgctacaagccaccctaagagcgtggtgggcgtgtttctgtgcggccctaggactctagctaaaagtttgagaaaatgctgtcaccggtactcttctctcgatccccgcaaggttcaattctactttaataaggagaacttttag

SEQ ID NO: 170051 - DNA, 1695 bp, Artificial Sequence
  derived and/or modified sequence
atgggcaactgggtggtgaaccactggttctctgtgctcttcctggtggtgtggctgggcctgaatgtgttcctgtttgtggatgccttcctgaagtatgagaaggctgacaagtactactacaccaggaagatcctgggcagcaccctggcctgtgcccgggccagcgccctgtgcctgaacttcaacagcaccctcatcctgctgcctgtgtgcaggaacctgctgtccttcctgcggggcacctgcagcttctgcagcaggaccctgaggaagcagctggaccacaacctgaccttccacaagctggtggcctacatgatctgcctgcacacagccatccacatcatcgcccacctgttcaactttgactgctacagccgcagccggcaggccacagatggcagcctggccagcatcctgagcagcctgagccatgatgagaagaagggcggctcctggctgaaccccatccagagcaggaacaccaccgtggagtatgtgaccttcaccagcattgctggcctgactggagtcatcatgaccatcgccctgatcctgatggtgaccagcgccacagagttcatcagaagaagctactttgaggtgttctggtacacccaccacctgttcatcttctacatcctgggcctgggcatccatggaattggaggcatcgtgcggggccagacagaggagagcatgaatgaaagccaccccaggaaatgtgccgagagctttgagatgtgggatgaccgggacagccactgccggcggcccaagtttgagggccaccccccagagagctggaagtggatcctggcccctgtgatcctgtacatctgtgagcgcatcctgcgcttctaccgcagccagcagaaggtggtgatcaccaaggtggtgatgcaccccagcaaggtgctggagctgcagatgaacaagaggggcttctccatggaggtgggccagtacatctttgtgaactgccccagcatcagcctgctggagtggcaccccttcaccctgaccagcgcccctgaggaggacttcttcagcatccacatccgggccgccggggactggacagaaaatctcatccgggcctttgagcagcagtacagccccatccccagaattgaggtggatggcccctttggaacagcctctgaagatgtgttccagtatgaggtggccgtgctggtgggcgccggcattggagtgaccccatttgccagcatcctgaagagcatctggtacaagttccagtgtgccgaccacaacctgaagaccaagaagatctacttctactggatctgccgggagaccggggccttctcctggttcaacaacctgctgaccagcctggagcaggagatggaggagctgggcaaggtgggcttcctgaactaccgcctcttcctgaccggctgggacagcaacatcgtgggccatgctgccctgaactttgacaaggccacagacatcgtgacaggcctgaagcagaagaccagctttggccggcccatgtgggacaatgagttcagcaccatcgccaccagccaccccaagtctgtggtgggcgtcttcctgtgtggccccaggaccctggccaagagcctgaggaagtgctgccaccgctacagcagcctggaccccaggaaggtgcagttctacttcaacaaggagaacttctag

SEQ ID NO: 170052 - DNA, 1679 bp, Artificial Sequence
  derived and/or modified sequence
gctgatagcacagttctgtccagagaaggaaggcagaataaacttattcattcccaggaactcttggggtaggtgtgtgtttttcacatcttaaaggctcacagaccctgcgctggacaaatgttccattcctgaaggacctctccagaatccggattgctgaatcttccctgttgcctagaagggctccaaaccacctcttgacaatgggaaactgggtggttaaccactggttttcagttttgtttctggttgtttggttagggctgaatgttttcctgtttgtggatgccttcctgaaatatgagaaggccgacaaatactactacacaagaaaaatccttgggtcaacattggcctgtgcccgagcgtctgctctctgcttgaattttaacagcacgctgatcctgcttcctgtgtgtcgcaatctgctgtccttcctgaggggcacctgctcattttgcagccgcacactgagaaagcaattggatcacaacctcaccttccacaagctggtggcctatatgatctgcctacatacagctattcacatcattgcacacctgtttaactttgactgctatagcagaagccgacaggccacagatggctcccttgcctccattctctccagcctatctcatgatgagaaaaaggggggttcttggctaaatcccatccagtcccgaaacacgacagtggagtatgtgacattcaccagcattgctggtctcactggagtgatcatgacaatagccttgattctcatggtaacttcagctactgagttcatccggaggagttattttgaagtcttctggtatactcaccacctttttatcttctatatccttggcttagggattcacggcattggtggaattgtccggggtcaaacagaggagagcatgaatgagagtcatcctcgcaagtgtgcagagtcttttgagatgtgggatgatcgtgactcccactgtaggcgccctaagtttgaagggcatccccctgagtcttggaagtggatccttgcaccggtcattctttatatctgtgaaaggatcctccggttttaccgctcccagcagaaggttgtgattaccaaggttgttatgcacccatccaaagttttggaattgcagatgaacaagcgtggcttcagcatggaagtggggcagtatatctttgttaattgcccctcaatctctctcctggaatggcatccttttactttgacctctgctccagaggaagatttcttctccattcatatccgagcagcaggggactggacagaaaatctcataagggctttcgaacaacaatattcaccaattcccaggattgaagtggatggtccctttggcacagccagtgaggatgttttccagtatgaagtggctgtgctggttggagcaggaattggggtcaccccctttgcttctatcttgaaatccatctggtacaaattccagtgtgcagaccacaacctcaaaacaaaaaagatctatttctactggatctgcagggagacaggtgccttttcctggttcaacaacctgttgacttccctggaacaggagatggaggaattaggcaaaagcctgcgcaaatgctgtcaccgatattccagtctggatcctagaaaggttcaattctacttcaacaaagaaaatttttga

SEQ ID NO: 170053 - DNA, 2529 bp, Artificial Sequence
  derived and/or modified sequence
gctgatagcacagttctgtccagagaaggaaggcagaataaacttattcattcccaggaactcttggggtaggtgtgtgtttttcacatcttaaaggctcacagaccctgcgctggacaaatgttccattcctgaaggacctctccagaatccggattgctgaatcttccctgttgcctagaagggctccaaaccacctcttgacaatgggaaactgggtggttaaccactggttttcagttttgtttctggttgtttggttagggctgaatgttttcctgtttgtggatgccttcctgaaatatgagaaggccgacaaatactactacacaagaaaaatccttgggtcaacattggcctgtgcccgagcgtctgctctctgcttgaattttaacagcacgctgatcctgcttcctgtgtgtcgcaatctgctgtccttcctgaggggcacctgctcattttgcagccgcacactgagaaagcaattggatcacaacctcaccttccacaagctggtggcctatatgatctgcctacatacagctattcacatcattgcacacctgtttaactttgactgctatagcagaagccgacaggccacagatggctcccttgcctccattctctccagcctatctcatgatgagaaaaaggggggttcttggctaaatcccatccagtcccgaaacacgacagtggagtatgtgacattcaccagcattgctggtctcactggagtgatcatgacaatagccttgattctcatggtaacttcagctactgagttcatccggaggagttattttgaagtcttctggtatactcaccacctttttatcttctatatccttggcttagggattcacggcattggtggaattgtccggggtcaaacagaggagagcatgaatgagagtcatcctcgcaagtgtgcagagtcttttgagatgtgggatgatcgtgactcccactgtaggcgccctaagtttgaagggcatccccctgagtcttggaagtggatccttgcaccggtcattctttatatctgtgaaaggatcctccggttttaccgctcccagcagaaggttgtgattaccaaggttgttatgcacccatccaaagttttggaattgcagatgaacaagcgtggcttcagcatggaagtggggcagtatatctttgttaattgcccctcaatctctctcctggaatggcatccttttactttgacctctgctccagaggaagatttcttctccattcatatccgagcagcaggggactggacagaaaatctcataagggctttcgaacaacaatattcaccaattcccaggattgaagtggatggtccctttggcacagccagtgaggatgttttccagtatgaagtggctgtgctggttggagcaggaattggggtcaccccctttgcttctatcttgaaatccatctggtacaaattccagtgtgcagaccacaacctcaaaacaaaaaagatctatttctactggatctgcagggagacaggtgccttttcctggttcaacaacctgttgacttccctggaacaggagatggaggaattaggcaaagtgggttttctaaactaccgtctcttcctcaccggatgggacagcaatattgttggtcatgcagcattaaactttgacaaggccactgacatcgtgacaggtctgaaacagaaaacctcctttgggagaccaatgtgggacaatgagttttctacaatagctacctcccaccccaagtctgtagtgggagttttcttatgtggccctcggactttggcaaagagcctgcgcaaatgctgtcaccgatattccagtctggatcctagaaaggttcaattctacttcaacaaagaaaatttttgagttataggaataaggacggtaatctgcattttgtctctttgtatcttcagtaatttacttggtctcgtcaggtttgagcagtcactttaggataagaatgtgcctctcaagccttgactccctggtattctttttttgattgcattcaacttcgttacttgagcttcagcaacttaagaacttctgaagttcttaaagttctgaagttcttaaagcccatggatcctttctcagaaaaataactgtaaatctttctggacagccatgactgtagcaaggcttgatagcagaggtttggtggttcagagttatacaactaatcccaggtgattttatcaattccagtgttaccatctcctgagttttggtttgtaatcttttgtccctcccacccccacagaagatttctaagtagggtgactttttaaataaaaatttattgaataattaatgataaaacataataataaacataaataataaacaaaattaccgagaaccccatccccatataacaccaacagtgtacatgtttactgtcacttttgatatggtcttatccagtgtgaacagcaatttattcttatttttgctcatcaaaaaataaaggattttcttcttcacttga

SEQ ID NO: 170054 - DNA, 1695 bp, Artificial Sequence
  derived and/or modified sequence
atgggcaactgggtggtgaaccactggttcagcgtgctgttcctggtcgtgtggcttgggctcaatgtttttctctttgtggatgcattcttgaagtacgagaaggccgacaaatattactacaccaggaaaattctcgggtccacacttgcttgcgctcgcgcttccgctttgtgcctgaactttaattcaacactgatcttgctgcctgtctgccgaaacctgctgagcttcttgcggggaacgtgctccttttgttcaagaactttgcgaaaacaactggaccacaatctaacattccataagctcgtggcatacatgatttgtctgcacaccgcgatccacattatagctcacctgtttaactttgactgctattctagatctcggcaggccaccgacggatccctcgcttccatcctgtcaagcctgagtcacgatgaaaagaaaggggggagttggttgaatcccatccagagtaggaacactacagtggagtatgttacttttacatctatcgccggtctaactggcgttataatgactattgctctgatccttatggttacttctgccacagagttcataagaagaagttatttcgaggtgttttggtacacacaccatctctttattttttacattctcggcctgggcatacacggaattggtggaatcgtgcgcggccagaccgaggaatcaatgaacgaaagccatcctcggaaatgcgccgagtcattcgagatgtgggacgaccgggactcccactgcaggcggccaaagtttgagggacaccctcccgagagctggaagtggatactggccccagtcatcctgtatatatgcgagaggatcctgcggttctacagaagccagcaaaaagtcgtgatcaccaaagtcgtaatgcacccttctaaggtcctggaacttcaaatgaacaagagaggattctcaatggaggttggacagtacatttttgtaaactgcccaagtatttcactgcttgagtggcaccccttcactctgacatccgctccggaagaggatttctttagcatccacatccgcgctgctggcgactggacagagaacctgatccgcgcctttgaacagcagtattcaccaatccctcgtattgaagtggatggccccttcggtacggccagtgaggatgtgtttcagtacgaggttgctgtgctggtcggggctgggattggcgtcacccccttcgcaagcatactgaaatctatttggtataaatttcagtgcgctgatcacaacctcaagactaaaaagatatatttttactggatctgccgagagacaggggcattctcctggttcaataacctgctgaccagcctcgagcaggagatggaggaactcggaaaagtggggtttctgaactaccgcctgttcctcacaggctgggacagtaacatcgtgggtcatgcggcattaaacttcgataaggcgactgacattgtgaccgggcttaaacagaagacaagcttcggaagacccatgtgggacaatgaattttctacaatcgctacctcccaccccaagagtgttgtaggcgtcttcttatgtggtcccaggactcttgcaaaaagcctgcggaagtgttgccatcgttacagttcactggatccacgtaaggtgcagttctacttcaacaaggagaatttttag

SEQ ID NO: 170055 - DNA, 1695 bp, Artificial Sequence
  derived and/or modified sequence
atggggaattgggtggtgaaccactggttctctgtgctgtttctggtcgtgtggttgggactgaacgtgtttttattcgttgatgcctttctgaagtatgaaaaggctgacaagtactattatacaagaaagatactgggctccacactcgcatgtgccagagccagcgccttgtgcctgaatttcaatagcacgctgattcttctcccggtttgcaggaacctactgtccttcctcagaggtacatgtagcttctgctccagaacgctgagaaagcagcttgatcacaatctcacttttcacaagctggtggcctatatgatttgcctccacaccgctatacacatcatcgcacacctatttaacttcgactgctactccagaagccggcaggcaacagacgggagcctggccagcatcttatctagtctctcacacgatgaaaaaaagggtggctcttggctaaatccaattcagtcccggaataccactgtggagtatgtgaccttcacttctatagcagggctgactggagtgatcatgaccattgctttgatcctcatggttactagtgccaccgaattcattagacgctcctatttcgaggttttctggtacacccatcatctgttcattttctatattcttgggctcgggatccacggaatcggaggcatagtgcggggacagacagaggagtccatgaatgaatcacaccccagaaagtgtgccgagagctttgaaatgtgggatgacagagactcacattgccggagaccaaagttcgagggtcatccccctgagtcatggaagtggattcttgccccagtgatattgtacatatgcgagagaatccttaggttctaccgctcacagcagaaggtggtgattaccaaggtggtcatgcatccatcaaaagtcctcgagctccaaatgaacaagagaggcttcagtatggaagttggacagtatatcttcgtcaattgcccaagcatttctttactggagtggcatcccttcaccttgacaagcgcccctgaggaagatttttttagtattcacattagagccgctggcgattggacagagaacctgataagggcattcgaacagcaatatagccccattccaaggatagaagttgatggtccctttggaacagcctccgaagacgttttccaatacgaagtggcagtgcttgttggtgctggtatcggggttacaccgttcgcctctatacttaagtccatatggtacaagtttcagtgtgccgaccacaatctgaagaccaagaagatctatttttattggatctgtcgcgaaactggggctttctcgtggtttaacaacctacttacaagcctcgaacaggaaatggaggagctgggaaaggtaggatttctgaactaccggctctttttgacagggtgggattcaaatatagtgggccatgctgcacttaacttcgacaaagctacggacatagtaacgggtctcaagcaaaaaacctccttcggcagacccatgtgggacaatgagtttagtaccatcgcaacttcgcaccctaaatccgttgtgggagtgttcctgtgcggaccacggacgctggccaagtctttgaggaaatgctgccaccgctattcctctctagatcccaggaaggttcaattctacttcaacaaagagaacttttag

SEQ ID NO: 170056 - DNA, 1695 bp, Artificial Sequence
  derived and/or modified sequence
atgggcaactgggtggtgaaccactggttcagcgtgctgttcctggtggtgtggctgggcctgaacgtgttcctgttcgtggacgccttcctgaagtacgagaaggccgacaagtactactacaccagaaagatcctgggcagcaccctggcctgcgccagagccagcgccctgtgcctgaacttcaacagcaccctgatcctgctgcccgtgtgcagaaacctgctgagcttcctgagaggcacctgcagcttctgcagcagaaccctgagaaagcagctggaccacaacctgaccttccacaagctggtggcctacatgatctgcctgcacaccgccatccacatcatcgcccacctgttcaacttcgactgctacagcagaagcagacaggccaccgacggcagcctggccagcatcctgagcagcctgagccacgacgagaagaagggcggcagctggctgaaccccatccagagcagaaacaccaccgtggagtacgtgaccttcaccagcatcgccggcctgaccggcgtgatcatgaccatcgccctgatcctgatggtgaccagcgccaccgagttcatcagaagaagctacttcgaggtgttctggtacacccaccacctgttcatcttctacatcctgggcctgggcatccacggcatcggcggcatcgtgagaggccagaccgaggagagcatgaacgagagccaccccagaaagtgcgccgagagcttcgagatgtgggacgacagagacagccactgcagaagacccaagttcgagggccacccccccgagagctggaagtggatcctggcccccgtgatcctgtacatctgcgagagaatcctgagattctacagaagccagcagaaggtggtgatcaccaaggtggtgatgcaccccagcaaggtgctggagctgcagatgaacaagagaggcttcagcatggaggtgggccagtacatcttcgtgaactgccccagcatcagcctgctggagtggcaccccttcaccctgaccagcgcccccgaggaggacttcttcagcatccacatcagagccgccggcgactggaccgagaacctgatcagagccttcgagcagcagtacagccccatccccagaatcgaggtggacggccccttcggcaccgccagcgaggacgtgttccagtacgaggtggccgtgctggtgggcgccggcatcggcgtgacccccttcgccagcatcctgaagagcatctggtacaagttccagtgcgccgaccacaacctgaagaccaagaagatctacttctactggatctgcagagagaccggcgccttcagctggttcaacaacctgctgaccagcctggagcaggagatggaggagctgggcaaggtgggcttcctgaactacagactgttcctgaccggctgggacagcaacatcgtgggccacgccgccctgaacttcgacaaggccaccgacatcgtgaccggcctgaagcagaagaccagcttcggcagacccatgtgggacaacgagttcagcaccatcgccaccagccaccccaagagcgtggtgggcgtgttcctgtgcggccccagaaccctggccaagagcctgagaaagtgctgccacagatacagcagcctggaccccagaaaggtgcagttctacttcaacaaggagaacttctag

SEQ ID NO: 170057 - protein, 699 aa, Artificial Sequence
  derived and/or modified sequence
MPINKSEKPESCDNVKVVVRCRPLNEREKSMCYKQAVSVDEMRGTITVHKTDSSNEPPKTFTFDTVFGPESKQLDVYNLTARPIIDSVLEGYNGTIFAYGQTGTGKTFTMEGVRAIPELRGIIPNSFAHIFGHIAKAEGDTRFLVRVSYLEIYNEEVRDLLGKDQTQRLEVKERPDVGVYIKDLSAYVVNNADDMDRIMTLGHKNRSVGATNMNEHSSRSHAIFTITIECSEKGIDGNMHVRMGKLHLVDLAGSERQAKTGATGQRLKEATKINLSLSTLGNVISALVDGKSTHVPYRNSKLTRLLQDSLGGNSKTMMCANIGPADYNYDETISTLRYANRAKNIKNKARINEDPKDALLRQFQKEIEELKKKLEEGEEISGSDISGSEEDDDEEGEVGEDGEKRKKRRGKKKVSPDKMIEMQAKIDEERKALETKLDMEEEERNKARAELEKREKDLLKAQQEHQSLLEKLSALEKKVIVGGVDLLAKAEEQEKLLEESNMELEERRKRAEQLRRELEEKEQERLDIEEKYTSLQEEAQGKTKKLKKVWTMLMAAKSEMADLQQEHQREIEGLLENIRQLSRELRLQMLIIDNFIPRDYQEMIENYVHWNEDIGEWQLKCVAYTGNNMRKQTPVPDKKEKDPFEVDLSHVYLAYTEESLRQSLMKLERPRTSKGKARPKTGRRKRSAKPETVIDSLLQ

SEQ ID NO: 170058 - protein, 409 aa, Artificial Sequence
  derived and/or modified sequence
MCYKQAVSVDEMRGTITVHKTDSSNEPPKTFTFDTVFGPESKQLDVYNLTARPIIDSVLEGYNGTIFAYGQTGTGKTFTMEGVRAIPELRGIIPNSFAHIFGHIAKAEGDTRFLVRVSYLEIYNEEVRDLLGKDQTQRLEVKERPDVGVYIKDLSAYVVNNADDMDRIMTLGHKNRSVGATNMNEHSSRSHAIFTITIECSEKGIDGNMHVRMGKLHLVDLAGSERQAKTGATGQRLKEATKINLSLSTLGNVISALVDGKSTHVPYRNSKLTRLLQDSLGGNSKTMMCANIGPADYNYDETISTLRYANRAKNIKNKARINEDPKDALLRQFQKEIEELKKKLEEGEEISGSDISGSEEDDDEEGEVGEDGEKRKKRRGKKKVSPDKMIEMQAKIDEERKKKKKKKKK

SEQ ID NO: 170059 - DNA, 2100 bp, Artificial Sequence
  derived and/or modified sequence
atgcccatcaacaagagcgagaagcccgagagctgcgacaacgtgaaggtggtggtgagatgcagacccctgaacgagagagagaagagcatgtgctacaagcaggccgtgagcgtggacgagatgagaggcaccatcaccgtgcacaagaccgacagcagcaacgagccccccaagaccttcaccttcgacaccgtgttcggccccgagagcaagcagctggacgtgtacaacctgaccgccagacccatcatcgacagcgtgctggagggctacaacggcaccatcttcgcctacggccagaccggcaccggcaagaccttcaccatggagggcgtgagagccatccccgagctgagaggcatcatccccaacagcttcgcccacatcttcggccacatcgccaaggccgagggcgacaccagattcctggtgagagtgagctacctggagatctacaacgaggaggtgagagacctgctgggcaaggaccagacccagagactggaggtgaaggagagacccgacgtgggcgtgtacatcaaggacctgagcgcctacgtggtgaacaacgccgacgacatggacagaatcatgaccctgggccacaagaacagaagcgtgggcgccaccaacatgaacgagcacagcagcagaagccacgccatcttcaccatcaccatcgagtgcagcgagaagggcatcgacggcaacatgcacgtgagaatgggcaagctgcacctggtggacctggccggcagcgagagacaggccaagaccggcgccaccggccagagactgaaggaggccaccaagatcaacctgagcctgagcaccctgggcaacgtgatcagcgccctggtggacggcaagagcacccacgtgccctacagaaacagcaagctgaccagactgctgcaggacagcctgggcggcaacagcaagaccatgatgtgcgccaacatcggccccgccgactacaactacgacgagaccatcagcaccctgagatacgccaacagagccaagaacatcaagaacaaggccagaatcaacgaggaccccaaggacgccctgctgagacagttccagaaggagatcgaggagctgaagaagaagctggaggagggcgaggagatcagcggcagcgacatcagcggcagcgaggaggacgacgacgaggagggcgaggtgggcgaggacggcgagaagagaaagaagagaagaggcaagaagaaggtgagccccgacaagatgatcgagatgcaggccaagatcgacgaggagagaaaggccctggagaccaagctggacatggaggaggaggagagaaacaaggccagagccgagctggagaagagagagaaggacctgctgaaggcccagcaggagcaccagagcctgctggagaagctgagcgccctggagaagaaggtgatcgtgggcggcgtggacctgctggccaaggccgaggagcaggagaagctgctggaggagagcaacatggagctggaggagagaagaaagagagccgagcagctgagaagagagctggaggagaaggagcaggagagactggacatcgaggagaagtacaccagcctgcaggaggaggcccagggcaagaccaagaagctgaagaaggtgtggaccatgctgatggccgccaagagcgagatggccgacctgcagcaggagcaccagagagagatcgagggcctgctggagaacatcagacagctgagcagagagctgagactgcagatgctgatcatcgacaacttcatccccagagactaccaggagatgatcgagaactacgtgcactggaacgaggacatcggcgagtggcagctgaagtgcgtggcctacaccggcaacaacatgagaaagcagacccccgtgcccgacaagaaggagaaggaccccttcgaggtggacctgagccacgtgtacctggcctacaccgaggagagcctgagacagagcctgatgaagctggagagacccagaaccagcaagggcaaggccagacccaagaccggcagaagaaagagaagcgccaagcccgagaccgtgatcgacagcctgctgcagtag

SEQ ID NO: 170060 - DNA, 1230 bp, Artificial Sequence
  derived and/or modified sequence
atgtgctacaagcaggccgtgagcgtggacgagatgagaggcaccatcaccgtgcacaagaccgacagcagcaacgagccccccaagaccttcaccttcgacaccgtgttcggccccgagagcaagcagctggacgtgtacaacctgaccgccagacccatcatcgacagcgtgctggagggctacaacggcaccatcttcgcctacggccagaccggcaccggcaagaccttcaccatggagggcgtgagagccatccccgagctgagaggcatcatccccaacagcttcgcccacatcttcggccacatcgccaaggccgagggcgacaccagattcctggtgagagtgagctacctggagatctacaacgaggaggtgagagacctgctgggcaaggaccagacccagagactggaggtgaaggagagacccgacgtgggcgtgtacatcaaggacctgagcgcctacgtggtgaacaacgccgacgacatggacagaatcatgaccctgggccacaagaacagaagcgtgggcgccaccaacatgaacgagcacagcagcagaagccacgccatcttcaccatcaccatcgagtgcagcgagaagggcatcgacggcaacatgcacgtgagaatgggcaagctgcacctggtggacctggccggcagcgagagacaggccaagaccggcgccaccggccagagactgaaggaggccaccaagatcaacctgagcctgagcaccctgggcaacgtgatcagcgccctggtggacggcaagagcacccacgtgccctacagaaacagcaagctgaccagactgctgcaggacagcctgggcggcaacagcaagaccatgatgtgcgccaacatcggccccgccgactacaactacgacgagaccatcagcaccctgagatacgccaacagagccaagaacatcaagaacaaggccagaatcaacgaggaccccaaggacgccctgctgagacagttccagaaggagatcgaggagctgaagaagaagctggaggagggcgaggagatcagcggcagcgacatcagcggcagcgaggaggacgacgacgaggagggcgaggtgggcgaggacggcgagaagagaaagaagagaagaggcaagaagaaggtgagccccgacaagatgatcgagatgcaggccaagatcgacgaggagagaaagaagaagaagaagaagaagaagaagtag

SEQ ID NO: 170061 - DNA, 2100 bp, Artificial Sequence
  derived and/or modified sequence
atgcccatcaacaaatccgagaagcctgagagttgcgacaatgtaaaagtagtcgtccgatgccgcccgttaaacgagagggaaaaatccatgtgctacaaacaggctgtgtcagtcgatgagatgcgtggaactattactgtgcataagacagactcttcgaacgaaccaccgaaaacttttactttcgataccgtgttcggcccggagtcaaaacagttagacgtttacaatctgaccgcacggcccatcatcgatagcgtgctggaggggtacaacgggacgatcttcgcatatgggcaaaccggtacaggtaagaccttcaccatggagggcgtccgagccatccctgagcttcgcggaatcatcccgaactctttcgctcacatctttggtcatattgcaaaagcagaaggcgatacccgcttcttggtgagagtcagctacctggaaatatacaacgaggaggtcagggacttattggggaaggaccagacccagagactggaagtaaaagaaaggcccgatgtgggtgtctacattaaggacctctccgcatatgttgtgaacaacgccgatgacatggacagaatcatgacgttggggcacaaaaacaggagcgttggcgcaaccaatatgaatgagcattcatcaaggtctcacgctattttcactattaccattgagtgttctgaaaaggggatcgacggaaacatgcacgtacggatgggtaaattacacctggtcgaccttgccggatccgagcgccaggctaagacaggagccacgggacagcggctcaaggaagcaactaagataaacctcagcctgagcaccctgggaaatgtgatctctgctctggttgatggaaaatcgacgcacgtcccctacagaaattcaaagctcacccggcttttgcaagacagcctcggcggcaacagtaagactatgatgtgtgcaaatatcgggccagcggactacaattacgacgaaactatctccaccttgagatatgccaacagagcaaagaatataaagaacaaagcccgtatcaatgaggacccaaaagatgcacttctgcgtcaatttcagaaggaaatcgaggaactgaaaaaaaaactggaggaaggggaagagatctccgggtctgacattagtggtagcgaagaggacgacgatgaagagggcgaggtgggagaggacggagagaagcgcaagaagcgcagaggcaagaagaaagtgtctcctgacaagatgatcgagatgcaggcaaaaattgacgaggaacgtaaagctctagagactaagctggacatggaggaagaggaacggaataaagcccgcgccgagttagaaaagcgcgaaaaagaccttctgaaggcccagcaagaacaccagtctctcctggagaagttatccgctctagagaaaaaagtgatcgtaggtggagtggacctgctcgctaaagcagaagaacaggagaagctgctggaggagtccaatatggagctggaggagcgtcggaaacgggcagaacagctgcgcagagagctcgaggaaaaggagcaggaaaggctcgacatagaagaaaaatacacgtctctgcaggaagaagctcaggggaagaccaagaaactgaagaaagtttggacaatgttgatggccgccaagtcagagatggccgacctgcagcaggagcaccagagggagatcgaaggacttcttgaaaacatcagacagctctctagagaattaaggctgcagatgctcatcatcgacaacttcattcccagagattaccaggaaatgatcgaaaactacgtgcactggaatgaggacatcggggaatggcagctcaaatgtgtggcgtatacgggcaacaacatgaggaaacaaacacctgtgcctgataagaaggagaaagacccatttgaagtggacttatctcatgtgtatctggcctacacagaggagagccttcgacaatccctcatgaagcttgagaggccacgcacgtccaaagggaaagcacgccccaaaactgggagacgaaaacggtcggctaaacctgagactgtgatcgatagtctgttacagtag

SEQ ID NO: 170062 - DNA, 1230 bp, Artificial Sequence
  derived and/or modified sequence
atgtgctacaagcaagccgtaagcgtggatgagatgcgcggcaccattactgtgcacaagacagattcctccaatgaaccgcccaaaacttttacctttgacaccgtgttcggacctgagagcaagcagctcgatgtgtacaacctgaccgcgcggcctataatagactctgtcctcgagggctacaatggaaccatatttgcctatggacaaactggaacaggaaagacattcacaatggagggtgtccgcgccatcccggaactcagagggatcatcccaaactcctttgctcacatcttcggtcacatcgctaaggccgagggggatactagatttcttgtacgggtgagctaccttgaaatttacaacgaagaagtccgcgacctgctgggaaaggaccaaacacaacgtctcgaggtaaaggaacggcccgatgtcggagtgtacataaaagatctgtctgcatatgtagttaataacgctgatgatatggatagaataatgacactaggtcacaaaaataggtcagtcggcgcaaccaatatgaacgaacactcttcccgcagccacgcaatattcaccatcaccattgaatgtagcgagaaagggatcgacgggaacatgcacgttaggatgggcaagcttcatctcgttgatctggcagggagcgaacggcaggccaaaaccggcgccacaggccagaggctgaaagaggccacgaaaatcaatctgagtttgtcgaccctggggaacgtcatttccgcactggttgacggaaaaagtacgcacgtgccttatcgaaatagcaagttgactcgcttgctgcaggattccttggggggtaacagtaagacgatgatgtgtgctaatattggtccagctgattataactatgacgagaccatcagtacactccggtatgccaacagggctaagaacattaagaacaaagctaggattaacgaggatcccaaggacgccctcctccgtcagtttcaaaaggaaattgaagagttgaagaagaagctggaggagggtgaagaaatctctggtagtgacatatccggctccgaagaagatgatgacgaggaaggagaagtgggggaggacggtgaaaaacggaaaaaacgcaggggaaagaagaaggtgtctcctgacaaaatgatagagatgcaagccaagatcgacgaagagaggaaaaaaaaaaagaagaagaagaaaaaatag

SEQ ID NO: 170063 - DNA, 2100 bp, Artificial Sequence
  derived and/or modified sequence
atgcccatcaacaagtctgagaagccagagagctgtgacaacgtgaaggtggtggtgcgctgccggcccctgaatgaaagagagaagtccatgtgctacaagcaggccgtgtctgtggatgagatgaggggcaccatcaccgtgcacaagacagacagcagcaatgaaccacccaagaccttcacctttgacacagtgtttggacctgagagcaagcagctggatgtgtacaacctgacagcccggcccatcattgattctgtgctggagggctacaacggcaccatctttgcctacggccagacaggcaccgggaagaccttcaccatggagggcgtgcgggccatccctgagctgcggggcatcatccccaacagctttgcccacatcttcggccacatcgccaaggccgagggggacacccgcttcctggtgcgggtgtcctacctggagatctacaatgaggaggtgcgggacctgctgggcaaggaccagacccagaggctggaggtgaaggagaggccagatgtgggcgtgtacatcaaggacctgagcgcctacgtggtgaacaatgctgatgacatggaccgcatcatgaccctgggccacaagaacagatctgtgggcgccaccaacatgaatgagcacagcagccgcagccacgccatcttcaccatcaccattgaatgttctgagaagggcattgatggcaacatgcacgtgaggatgggcaagctgcacctggtggacctggccggcagcgagcggcaggccaagacaggagccaccggccagaggctgaaggaggccaccaagatcaacctgagcctgagcaccctgggcaatgtcatcagcgccctggtggatggcaagagcacccacgtgccctacagaaacagcaagctgacccggctgctgcaggacagcctgggcggcaacagcaagaccatgatgtgtgccaacatcggccctgctgactacaactatgatgagaccatcagcaccctgcgctatgccaacagagccaagaacatcaagaacaaggcccgcatcaatgaagaccccaaggatgccctgctgcggcagttccagaaggagattgaggagctgaagaagaagctggaggagggggaggagatcagcggcagtgacatcagcggcagcgaggaggatgatgatgaggagggggaggtgggggaggatggagagaagaggaagaagaggcggggcaagaagaaggtgtccccagacaagatgattgagatgcaggccaagattgatgaggagaggaaggccctggagaccaagctggacatggaggaggaggagaggaacaaggcccgggcagagctggagaagcgggagaaggacctgctgaaggcccagcaggagcaccagagcctgctggagaagctgagcgccctggagaagaaggtgattgtgggcggcgtggacctgctggccaaggccgaggagcaggagaagctgctggaggagagcaacatggagctggaggagaggaggaagagagctgagcagctgcggcgggagctggaggagaaggagcaggagcggctggacatcgaggagaagtacaccagcctgcaggaggaggcccagggcaagaccaagaagctgaagaaggtgtggaccatgctgatggccgccaagtctgagatggctgacctgcagcaggagcaccagcgggagattgagggcctgctggagaacatccggcagctgagccgggagctgcggctgcagatgctgatcatcgacaacttcatcccccgggactaccaggagatgattgaaaattatgtgcactggaatgaagacatcggggagtggcagctgaagtgtgtggcctacacaggcaacaacatgaggaagcagacccctgtgcctgacaagaaggagaaggacccctttgaggtggacctgagccacgtgtacctggcctacacagaggagagcctgcggcagagcctgatgaagctggagcggcccaggaccagcaagggcaaggcccggcccaagacaggaagaaggaagaggtctgccaagccagagaccgtcatcgacagcctgctgcagtag

SEQ ID NO: 170064 - DNA, 1230 bp, Artificial Sequence
  derived and/or modified sequence
atgtgctacaagcaggccgtgtctgtggatgagatgaggggcaccatcaccgtgcacaagacagacagcagcaatgaaccacccaagaccttcacctttgacacagtgtttggacctgagagcaagcagctggatgtgtacaacctgacagcccggcccatcattgattctgtgctggagggctacaacggcaccatctttgcctacggccagacaggcaccgggaagaccttcaccatggagggcgtgcgggccatccctgagctgcggggcatcatccccaacagctttgcccacatcttcggccacatcgccaaggccgagggggacacccgcttcctggtgcgggtgtcctacctggagatctacaatgaggaggtgcgggacctgctgggcaaggaccagacccagaggctggaggtgaaggagaggccagatgtgggcgtgtacatcaaggacctgagcgcctacgtggtgaacaatgctgatgacatggaccgcatcatgaccctgggccacaagaacagatctgtgggcgccaccaacatgaatgagcacagcagccgcagccacgccatcttcaccatcaccattgaatgttctgagaagggcattgatggcaacatgcacgtgaggatgggcaagctgcacctggtggacctggccggcagcgagcggcaggccaagacaggagccaccggccagaggctgaaggaggccaccaagatcaacctgagcctgagcaccctgggcaatgtcatcagcgccctggtggatggcaagagcacccacgtgccctacagaaacagcaagctgacccggctgctgcaggacagcctgggcggcaacagcaagaccatgatgtgtgccaacatcggccctgctgactacaactatgatgagaccatcagcaccctgcgctatgccaacagagccaagaacatcaagaacaaggcccgcatcaatgaagaccccaaggatgccctgctgcggcagttccagaaggagattgaggagctgaagaagaagctggaggagggggaggagatcagcggcagtgacatcagcggcagcgaggaggatgatgatgaggagggggaggtgggggaggatggagagaagaggaagaagaggcggggcaagaagaaggtgtccccagacaagatgattgagatgcaggccaagattgatgaggagaggaagaagaagaagaagaagaagaagaagtag

SEQ ID NO: 170065 - DNA, 2100 bp, Artificial Sequence
  derived and/or modified sequence
atgcccatcaacaagagcgagaagcccgagagctgcgacaacgtgaaagtggtggtccgatgccgccctctcaacgaacgggagaagtccatgtgttacaaacaggctgtgtctgtcgatgagatgcgcggaacgattactgtgcacaaaacagattcctccaacgaaccaccaaaaactttcacatttgataccgtctttgggccagaaagcaagcagttggatgtgtacaatctcactgcccggccaataattgatagtgtactagagggctacaacggtaccatattcgcttatgggcagactggtactggcaaaactttcacaatggaaggcgtaagggctataccggagctacgcgggataattcctaactctttcgcacacattttcgggcatatagccaaggcggaaggggacacacgatttctggtccgggttagctatctagagatctacaacgaggaagtgcgcgatctgctgggtaaggaccagacccagcgccttgaagtgaaggaaagacctgatgtgggcgtatatattaaagatttgtccgcatatgtagtcaacaacgccgacgatatggaccgcatcatgaccttaggacacaagaaccggagtgttggggctactaacatgaacgaacacagcagccgatcacatgcaatctttacgataacaatagagtgtagtgaaaagggaattgatggaaacatgcacgttcgtatgggaaagctccacctagttgatttggcaggctctgagagacaagccaagactggcgctacaggccagcggttaaaggaggctactaagatcaatctgagcctgtcaactctcggcaacgttattagcgcccttgtggatggaaagagcactcatgtgccttacagaaacagtaagctcacccgcttgctgcaggattcactcggtggaaactcgaagaccatgatgtgcgccaatattgggccagcagactataactatgatgaaactattagcacactccgctacgcaaatcgcgcaaagaacattaaaaataaagccagaattaacgaggatccgaaagatgcacttcttagacagtttcagaaagagattgaagagttaaagaagaagctggaggaaggcgaggaaatctcggggagcgatatctcgggatcagaggaagacgacgacgaagaaggtgaggtgggggaggacggggagaagcgcaagaagcgaagagggaagaagaaagtgtccccagataagatgatagagatgcaggcgaaaattgacgaggagagaaaggcattagagacaaagttagacatggaggaggaagagcgaaataaagctcgagcggagctggagaagcgtgagaaggaccttctaaaagcacagcaggaacatcagtctcttcttgaaaagctgtcagccctggaaaagaaggtaatagtcggtggcgtcgatctgctggctaaggcagaagagcaggaaaaactactggaggagtctaatatggaactcgaggagcggcggaagagagcggagcagctcagaagggaactggaagagaaggaacaagaaaggttagatatcgaggaaaagtacactagcctccaggaggaggctcagggaaaaacaaaaaaactaaaaaaggtatggactatgctgatggctgccaagtccgagatggcagatctgcagcaggagcaccagcgcgagatagaagggctacttgaaaatataagacagctatcccgtgaacttcggttgcagatgctaattatagacaacttcatccctcgggactatcaggagatgatcgagaattatgtgcactggaatgaggatatcggcgagtggcagttgaaatgtgtagcatatacaggaaacaatatgaggaaacaaactccagtaccggacaaaaaggaaaaggatcccttcgaggttgacctatctcacgtgtacctggcatacaccgaggagtctctaaggcagagcctaatgaagttagagcgacccaggacctccaaaggaaaagccagaccaaaaaccggccggaggaaacgaagtgcaaaacctgaaaccgttatcgacagccttttgcagtag

SEQ ID NO: 170066 - DNA, 1230 bp, Artificial Sequence
  derived and/or modified sequence
atgtgctacaagcaggccgtgagcgtggacgagatgcggggcaccatcacagtgcacaagaccgactcctcaaacgaacctccgaaaacctttacgttcgatacagtgttcggaccggaatccaagcagttggatgtttacaatcttaccgctcggcccatcatcgattcggttcttgaagggtataatggtacaattttcgcatacgggcaaaccgggaccgggaagactttcacaatggaaggcgtcagggctatccctgagcttagagggattatccccaacagcttcgcccacatcttcggccacatcgcaaaggcagagggagatacacgattcctggtccgcgtttcttatttggagatttacaacgaggaagtgagggatctgctcggtaaagatcaaactcagcggcttgaggtgaaagagcgccctgacgtgggcgtgtacatcaaggatctgtccgcctatgttgtcaacaacgcggatgacatggacagaattatgaccctgggacataagaaccgtagtgtgggtgccaccaatatgaacgagcactcatcacggagccacgcgatcttcaccattaccattgagtgttctgaaaagggcattgacggcaatatgcatgtgagaatgggaaaattgcacctggttgatctggctgggagcgagcgacaggccaagaccggcgcaacaggacagcggctgaaggaagctaccaagattaaccttagcttgtcaaccttgggaaatgtgatctctgccctcgtcgatgggaagtctacacatgtgccttacagaaattccaagctgacccggttgctgcaggacagtctgggagggaactccaagactatgatgtgtgccaacattggacccgccgactacaactacgatgaaaccatttcaacactccgctacgccaatcgggcaaagaacattaaaaacaaagccagaatcaacgaagatcctaaggatgcactgttgcgccagttccagaaagaaatcgaggaactgaagaaaaagttggaggagggagaggagatcagcggcagtgatatctccggctcagaggaggacgacgacgaggagggagaggtcggtgaagatggagagaagaggaagaagcggcgcggaaagaagaaagtttcccctgacaaaatgattgaaatgcaggcaaagattgatgaagaacgcaaaaagaagaaaaagaagaagaaaaaatag

SEQ ID NO: 170067 - DNA, 2100 bp, Artificial Sequence
  derived and/or modified sequence
atgcccatcaacaaatctgagaaacccgagagctgcgataatgtgaaggttgttgtaaggtgcaggcctttgaacgagagagaaaagtcaatgtgctataagcaggcagtgagcgtggatgaaatgaggggcactatcacagtacataagaccgattcttccaacgagccaccgaagacctttacattcgacactgtgtttggtccagagagtaagcagttagacgtgtataaccttactgctagaccaattatcgactccgtcctggaagggtacaatggaacaatctttgcctatggacagactggaactggaaaaaccttcactatggagggggttcgggctatccctgaactgagagggatcatacctaacagcttcgcgcatatatttggtcacatcgcaaaggcagagggcgatacgcgcttcttggtgcgggtgtcatacttggagatctataacgaggaagtccgagatctgctaggaaaggaccagacccagagactggaggtcaaggaaagaccagacgtgggcgtctacatcaaggatctatccgcttatgtggtgaacaatgcagacgacatggatcggattatgacattgggacataagaatcgcagtgttggggctaccaatatgaatgaacattcaagccgctcccacgccatttttacgataaccatcgagtgctcagagaagggcatcgacggcaatatgcacgtgcgcatgggtaagctacacttagttgatctggcgggaagtgagagacaggcaaaaactggcgctactgggcagcggctgaaagaagccacgaaaattaacctgtctctgagcaccttgggaaacgtgatatccgcacttgttgatggcaaatccactcatgtgccctataggaattccaaattgacacgcctgctccaggattcgttgggcggtaattccaaaaccatgatgtgtgcaaatatcgggcctgcggactacaattatgatgaaacaatttccaccctgcgctacgccaaccgtgccaagaacataaagaacaaggctagaataaatgaggatcccaaggatgccttactgcgtcagttccagaaggagatcgaggaactgaagaagaagctggaggaaggagaggagattagcggttccgacattagcggctctgaggaggatgacgatgaggagggcgaggtgggggaggatggagagaagcgcaaaaagagacggggaaagaaaaaagtttctcctgacaaaatgatcgagatgcaagccaagatcgatgaggaacggaaagctctcgaaactaaactggatatggaagaggaggaacggaacaaagctcgagccgaacttgagaaaagagaaaaagacctgctgaaggcccagcaggaacaccaaagcttgttagaaaaattatccgccctcgagaagaaggtgattgtgggtggagtggacttgctggctaaagccgaagaacaggaaaaacttttagaggagtctaatatggaactcgaagaaaggaggaagcgtgccgaacagctccggcgagagctggaagagaaagagcaagaacggctggacattgaggagaagtatacctccctccaagaggaagcccagggcaaaaccaagaaactgaaaaaggtgtggacaatgcttatggctgccaagtccgagatggccgacctccagcaggaacaccagagagagatagagggactcctggaaaatattcggcagctgagccgcgagctgcgcttgcagatgctaatcatagacaatttcattccacgggactaccaagagatgatcgagaattatgttcattggaacgaggatatcggcgaatggcagctgaagtgtgtggcttacacaggcaacaacatgcgcaagcagacccctgtgcctgacaaaaaagagaaggatccatttgaagtggatttgtcacacgtttacttagcctacacagaggaatcgctaaggcagtctctgatgaagctcgagagacccaggacttcgaaggggaaggctaggcccaaaaccggaagacggaagcgttccgcgaagcccgaaacggtcatcgattcactcctacagtag

SEQ ID NO: 170068 - DNA, 1230 bp, Artificial Sequence
  derived and/or modified sequence
atgtgttacaaacaagccgtatcagtcgacgaaatgaggggtactattactgtacataagaccgacagcagtaatgaaccaccaaagacattcacattcgacacagtgtttggccctgaatccaagcagctggacgtttacaatctgactgcacgccctatcattgattcagtgctcgaaggctacaatggcaccatcttcgcgtatggccagacaggtacagggaaaacgttcaccatggagggagtccgggcaattcctgagttgaggggaataatccccaactcctttgcacatatcttcggccacattgccaaggccgagggcgataccaggttcctggttagagtgtcctacctggaaatttataatgaagaggttagagatttactagggaaagaccagacccagagactggaagtcaaggagaggccagacgtaggagtgtacatcaaggatctctccgcctatgttgtaaacaacgccgacgacatggatcgcattatgacgctcggacataagaaccgttccgtgggggcaactaacatgaatgaacactcctcacgtagtcacgcgatttttacaattactatcgagtgctctgaaaagggcatagatggaaatatgcatgtcagaatgggaaagttgcacttggtagatttggccggaagtgagcgtcaggcaaagacaggtgcaactggccagcgactgaaggaagctactaagatcaatctgtcgctgagcacactgggaaacgtcatttcggcactggtcgacggcaagtctacccacgtcccatataggaattcaaaactgactcgtcttttgcaggactctctcggcggtaactctaaaaccatgatgtgtgccaacataggtccggctgactacaactatgacgaaactataagcaccctcagatacgcgaaccgagcaaagaacatcaagaataaggcaagaattaacgaagacccaaaagacgcactactgcgacagtttcagaaggagattgaggagcttaagaaaaagcttgaggagggagaagaaatttccgggagcgacatatccggctccgaggaggatgatgacgaggaaggggaagttggcgaagatggcgagaaacgcaagaagcggagaggcaagaagaaggtctctcctgacaagatgatcgaaatgcaagccaaaatcgacgaagaacggaaaaagaaaaaaaagaagaaaaagaaatag

SEQ ID NO: 170069 - DNA, 6277 bp, Artificial Sequence
  derived and/or modified sequence
gcgcaggcgtaattcaagggccgagagagcctgagactgggcttggggcggggcgagctcggaatgcggctgcgcactgggcgctctcgcccgagaagccgcagtctcgagagcgtcaacgaggtgtttcggtagtctctggccatcctttctgcgcacccggtgtcgctgggctgcaccccgggcggggacgtccgccgggcacgggagggggccaagatgccgatcaataaatcagagaagccagaaagctgcgataatgtgaaggttgttgttaggtgccggcccctcaatgagagagagaaatcaatgtgctacaaacaggctgtcagtgtggatgagatgaggggaactatcactgtacataagactgattcttccaatgaacctccaaagacatttacttttgatactgtttttggaccagagagtaaacaacttgatgtttataacttaactgcaagacctattattgattctgtacttgaaggctacaatgggactatttttgcatatggacaaaccggaacaggcaaaacttttaccatggaaggtgttcgagctattcctgaacttagaggaataattcccaattcatttgctcacatatttggtcatattgcaaaagcggagggtgatacaagatttttggttcgagtgtcttatttggaaatatataatgaagaagttcgtgaccttttgggcaaggatcagacacaaaggttagaggttaaagaaagacctgatgtgggagtttatatcaaagatttatcagcttatgtggtaaataatgctgatgatatggatagaattatgacgctaggccacaaaaatcgttctgttggtgcaactaatatgaacgaacatagttcccgttcccatgccatctttacaattactatagaatgcagtgaaaaaggcattgatggtaacatgcatgtcaggatggggaagctccatcttgtagatcttgctggttcagaaagacaggcaaaaactggagctactggacagcgcctaaaggaagctacaaaaatcaatctttcactttccacccttggtaatgtaatttctgccttggttgatggaaaaagcactcatgtgccttatcgtaactctaaactgactcgtcttcttcaggattccttaggaggaaattcaaaaaccatgatgtgtgcaaatattgggccagcagattacaattatgatgaaactatcagtacattacggtatgccaatcgtgctaagaatattaaaaataaagctagaattaatgaagatccaaaggatgctttgctgcgtcagttccagaaagaaatagaagaactgaaaaagaagcttgaagaaggagaagaaatatcaggctctgatatcagtgggtcagaggaagatgatgatgaagagggtgaggttggagaagatggagagaaaaggaaaaaaagaaggggaaaaaagaaagtctccccagacaagatgattgaaatgcaagcaaaaattgatgaggagagaaaagcacttgaaacaaagctcgacatggaagaagaagaaagaaacaaggctagagctgaattagagaaacgggaaaaagatcttcttaaagcccaacaagagcatcagtctttgctggaaaaattatctgccctggaaaagaaggtaattgttggtggggttgacttgttggccaaagctgaggaacaagagaaacttcttgaagaatctaacatggaactggaagaaaggaggaaaagagcagagcaacttcgcagagaacttgaggaaaaagagcaagaacgcttggatattgaagaaaaatataccagtttgcaagaggaagcacagggaaagaccaagaagttaaagaaagtttggactatgctgatggctgcaaagtcagagatggctgatctccaacaagaacatcagagggaaattgaaggcctactggagaacattcggcaacttagccgggagcttcgacttcagatgcttattattgataactttatacctcgggattatcaggaaatgattgaaaactatgtccattggaatgaagacataggagaatggcagctaaaatgtgttgcttatacaggaaataacatgaggaagcaaaccccagtacctgataaaaaggagaaagatccctttgaggtggacctttctcacgtgtatcttgcctatactgaggagagtctgcgtcagtctttgatgaaactagaaagaccacgaacttcaaaggggaaagcaaggccaaagacagggagaagaaagcgttctgcaaagcctgaaactgtaattgactctttactgcagtaaatgttacagacttaaagtcacaataaaaattagtgatattctcatgcctggacaaaatctttaattaaaacagtgaagacttctctataatttcaattaatggaagttgtagatcaatgaataagactggaaataataatttgcttaagaacttttagtctacatatattaatataacattaaaattgtacaactggtgattgttcaaattgttgtactactactcttcaattgtactgtgcagggaagttgggggaacagttcatactatagagagttacagtttagatgtatgtgtaaatcgattagctatttatccaactactgtatatttaggtaactagaatttcaaaatagaaaaaaaaaaactgtgtcctgttttgcacatagaaagaagcagatcagattgtcctatgttgcgctgttatatatgaatgtttggactgtacatctaaagaatgattccgtcctaacacccacccagcctgtttgaacacattctaattgtctaacatttgttgcattttaagtatgagatgactgatcttatgaatgttttgtagaaaatgttataatttaacagtctttgcgagtatacatgttttttaacaagttgaaaatgtttcatctgaacctttcctaacttttttttgccagtttgagttcaaatcaaatacaccttaagttctggtttcatgttctcttgaaacattgaattgtacgtaaatataaaggatctactgttgcggaaaattaagaagctaaatactgctcagttatctttgcctgcgtgtatatttttaaaaattcactctgaagtgttatggatgcttttctttgagttctaaattttggtgggaattactttatgtctcccagttaagaagagtctccattttccagaaaatacagctaagcaagaaaaatatcttttaaatactttgcctttaaaacacttttttattttgtttttctattttaaaaataaaatattattttctgaatttcttctattgggtaatccagttagaccatattcctctacaaataaaaactatgttgatttcatagtaaagtaagttgtaatagagataattatttttttctgttgttagctgcttatgaaacttttattgtatttttttaaagttatgctactcctggccgggcatggtggctcacgcctgtaatcccagcactttgggaggccgaggcacgtggatcacttgatgtcaggagttcgagaccagcctggctaacatggtgaaaccctgtctccagtacaaatacaataattagctgggtgtggtggcgcacacctgtaatcccagctacttgggaggctgaggcaggagaatcacttgaacctgggaggcggaggttgcagtgagctgagatggcatcactgcactccagcctgggtgacagggtgacactccacctcaaaaaataaaaataaaataaaaataaagttatgctactcctaaaccacttaatatatgttttgtggttttcaaaattatgtaatcagccctgaaacacattggttgaaaatattttgagactttataagttagtatttattaaattaatattattttaataagttttgttaaatcctagtttaaatgacaaagctgtgtatagagtaggggtgagtgaaggtggagtactcttgaggtggcgataaaaatgtacccataaatttaaagtccattctgtaattggaatactgaatgtcctgtgtgtggtgaacattttctaggtgattagaattgcatttcactggctgcatttgtttgtggtatgtaagatagctagaaatttattacttaactctgtggggcattgtttagatactgtgaagagttgaggtaaatatgtgtcttgtaaaagctttgtgtgatcagaatattttggtaattataaaatgtttttgatgatacacatttaactctgttagtaattactctaaagaaatcttaattttaccagtttaaaaaaaacgcttctttttaaaagttcatgtttctaacctttaacaattcagttaataggaaaggagtaacttttaaatcaagctttaaaacatggaaatttaagccagtatgttagatattttttctatcccaccctaccatgataataaaaataaatctataaaaagtcaaaataaaaagccgatctataaaaagtcaattgagaagttctaaaagcaggctactatagcaggggtgtttgttttttgtttggagacggagtctggctctattacctaggctggagtgcagtgggacaatctcggctcactgtaacctctgtctcttcagcctcctgagttgctggaactacagctgtatgccatcatgctcggctaatttttgtatttttttgtagagatggggttttgccatgttgcccgggcctgtcttgaactcctagagcttaagtgatccacccgcctcaggctcccgaagtgctgggattacaggcatgattataggcctgagccaccacaccccgcctactatagcagttttttaaaaaaagcattatgttaaaactgattataccagatggacattaaatatccatctcagaaataccaaaatttgatacataagcctggcctgaatatcttttttttttttttgagacggagtcttactctgtcgcccaggctggagtgcagtggcgcgatctcggctcactgcaacctctgcctcctgggttcaagggattctcctgcctcagcctcttgagtagctgggattacaggtttgcgccaccacacccagctaatttttgtattttttttttagtagagaccgggtttcaccatgttggccaggctggtctcacctgactttgtgatccgcccgcctcagcctcccaaagtgctgggattacaggtgtgagccaccacgcctggcctcaagcctggtctgaatatctatatgcaaatatgggacactgacttcagagctattcatttagctccagtcatagcaattctgtagtttcctcacatttactgtgtctttgtccacaaatgaaatatgttgtaaggtcagtgttaatttcgtgagacgatatagatgaacacacttgctcattttttgaaataaatatgcagatttaaaatgagtggcacatatatataaataggttattgaatgggtattctcttttccctttaatttaaaaagtgatatttatttattaaaaggagcattggtagaattattggtttatagtatcttctttaataatccttacaattacatatactaataggatgttaaaattatcatcgtgtttcctatttgtgtttagattcttataaagcatgagatgagtaatcaagggaagggtcgcatctccatgtttgccccatgaatagaatccatttgacaagccatttcatttcctttctggagaaagggagttgttttttttttctttttacagcaaaaatttaaggttttattgggggagggggtggtgctacttcctctgtaacatgtttttaaaactatgattatggtttttggttgttttttgttttgtttgtttccttttagtctgtttttaatatccttccccttaactcttaaggaaagtcttctttcctacagggctgtgaattaaggaatgggtagcgtttacatttaagtacaccaatgtctgcccaatttcctaatgtatacatttgttttattttaaattattttttgttcttaaaaatactagaagaaaacatagatgtttctagtgcctttgaacttatactgtagtctgactaatttaatgaataacttcagtagcattactataatactgtatgctggccaaaattacaaattacagtttgttgcatcagtttcaaaagccatgctttcattgtattttatgtataaattgtatttgttcaagttgtatatattggtattgtatg

SEQ ID NO: 170070 - DNA, 1471 bp, Artificial Sequence
  derived and/or modified sequence
gcggctgcgcactgggcgctctcgcccgagaagccgcagtctcgagagcgtcaacgaggtgtttcggtagtctctggccatcctttctgcgcacccggtgtcgctgggctgcaccccgggcggggacgtccgccgggcacgggagggggccaagatgccgatcaataaatcagagaagccagaaagctgcgataatgtgaaggttgttgttaggtgccggcccctcaatgagagagagaaatcaatgtgctacaaacaggctgtcagtgtggatgagatgaggggaactatcactgtacataagactgattcttccaatgaacctccaaagacatttacttttgatactgtttttggaccagagagtaaacaacttgatgtttataacttaactgcaagacctattattgattctgtacttgaaggctacaatgggactatttttgcatatggacaaaccggaacaggcaaaacttttaccatggaaggtgttcgagctattcctgaacttagaggaataattcccaattcatttgctcacatatttggtcatattgcaaaagcggagggtgatacaagatttttggttcgagtgtcttatttggaaatatataatgaagaagttcgtgaccttttgggcaaggatcagacacaaaggttagaggttaaagaaagacctgatgtgggagtttatatcaaagatttatcagcttatgtggtaaataatgctgatgatatggatagaattatgacgctaggccacaaaaatcgttctgttggtgcaactaatatgaacgaacatagttcccgttcccatgccatctttacaattactatagaatgcagtgaaaaaggcattgatggtaacatgcatgtcaggatggggaagctccatcttgtagatcttgctggttcagaaagacaggcaaaaactggagctactggacagcgcctaaaggaagctacaaaaatcaatctttcactttccacccttggtaatgtaatttctgccttggttgatggaaaaagcactcatgtgccttatcgtaactctaaactgactcgtcttcttcaggattccttaggaggaaattcaaaaaccatgatgtgtgcaaatattgggccagcagattacaattatgatgaaactatcagtacattacggtatgccaatcgtgctaagaatattaaaaataaagctagaattaatgaagatccaaaggatgctttgctgcgtcagttccagaaagaaatagaagaactgaaaaagaagcttgaagaaggagaagaaatatcaggctctgatatcagtgggtcagaggaagatgatgatgaagagggtgaggttggagaagatggagagaaaaggaaaaaaagaaggggaaaaaagaaagtctccccagacaagatgattgaaatgcaagcaaaaattgatgaggagagaaaaaaaaaaaaaaaaaagaagaagaag

SEQ ID NO: 170071 - protein, 1390 aa, Artificial Sequence
  derived and/or modified sequence
MVKEQFRETDVAKKISHICFGMKSPEEMRQQAHIQVVSKNLYSQDNQHAPLLYGVLDHRMGTSEKDRPCETCGKNLADCLGHYGYIDLELPCFHVGYFRAVIGILQMICKTCCHIMLSQEEKKQFLDYLKRPGLTYLQKRGLKKKISDKCRKKNICHHCGAFNGTVKKCGLLKIIHEKYKTNKKVVDPIVSNFLQSFETAIEHNKEVEPLLGRAQENLNPLVVLNLFKRIPAEDVPLLLMNPEAGKPSDLILTRLLVPPLCIRPSVVSDLKSGTNEDDLTMKLTEIIFLNDVIKKHRISGAKTQMIMEDWDFLQLQCALYINSELSGIPLNMAPKKWTRGFVQRLKGKQGRFRGNLSGKRVDFSGRTVISPDPNLRIDEVAVPVHVAKILTFPEKVNKANINFLRKLVQNGPEVHPGANFIQQRHTQMKRFLKYGNREKMAQELKYGDIVERHLIDGDVVLFNRQPSLHKLSIMAHLARVKPHRTFRFNECVCTPYNADFDGDEMNLHLPQTEEAKAEALVLMGTKANLVTPRNGEPLIAAIQDFLTGAYLLTLKDTFFDRAKACQIIASILVGKDEKIKVRLPPPTILKPVTLWTGKQIFSVILRPSDDNPVRANLRTKGKQYCGKGEDLCANDSYVTIQNSELMSGSMDKGTLGSGSKNNIFYILLRDWGQNEAADAMSRLARLAPVYLSNRGFSIGIGDVTPGQGLLKAKYELLNAGYKKCDEYIEALNTGKLQQQPGCTAEETLEALILKELSVIRDHAGSACLRELDKSNSPLTMALCGSKGSFINISQMIACVGQQAISGSRVPDGFENRSLPHFEKHSKLPAAKGFVANSFYSGLTPTEFFFHTMAGREGLVDTAVKTAETGYMQRRLVKSLEDLCSQYDLTVRSSTGDIIQFIYGGDGLDPAAMEGKDEPLEFKRVLDNIKAVFPCPSEPALSKNELILTTESIMKKSEFLCCQDSFLQEIKKFIKGVSEKIKKTRDKYGINDNGTTEPRVLYQLDRITPTQVEKFLETCRDKYMRAQMEPGSAVGALCAQSIGEPGTQMTLKTFHFAGVASMNITLGVPRIKEIINASKAISTPIITAQLDKDDDADYARLVKGRIEKTLLGEISEYIEEVFLPDDCFILVKLSLERIRLLRLEVNAETVRYSICTSKLRVKPGDVAVHGEAVVCVTPRENSKSSMYYVLQFLKEDLPKVVVQGIPEVSRAVIHIDEQSGKEKYKLLVEGDNLRAVMATHGVKGTRTTSNNTYEVEKTLGIEAARTTIINEIQYTMVNHGMSIDRRHVMLLSDLMTYKGEVLGITRFGLAKMKESVLMLASFEKTADHLFDAAYFGQKDSVCGVSECIIMGIPMNIGTGLFKLLHKADRDPNPPKRPLIFDTNEFHIPLVT

SEQ ID NO: 170072 - protein, 162 aa, Artificial Sequence [sequence omitted]

SEQ ID NO: 170073 - protein, 1369 aa, Artificial Sequence
  derived and/or modified sequence
MVKEQFRETDVAKKISHICFGMKSPEEMRQQAHIQVVSKNLYSQDNQHAPLLYGVLDHRMGTSEKDRPCETCGKNLADCLGHYGYIDLELPCFHVGYFRAVIGILQMICKTCCHIMLSQEEKKQFLDYLKRPGLTYLQKRGLKKKISDKCRKKNICHHCGAFNGTVKKCGLLKIIHEKYKTNKKVVDPIVSNFLQSFETAIEHNKEVEPLLGRAQENLNPLVVLNLFKRIPAEDVPLLLMNPEAGKPSDLILTRLLVPPLCIRPSVVSDLKSGTNEDDLTMKLTEIIFLNDVIKKHRISGAKTQMIMEDWDFLQLQCALYINSELSGIPLNMAPKKWTRGFVQRLKGKQGRFRGNLSGKRVDFSGRTVISPDPNLRIDEVAVPVHVAKILTFPEKVNKANINFLRKLVQNGPEVHPGANFIQQRHTQMKRFLKYGNREKMAQELKYGDIVERHLIDGDVVLFNRQPSLHKLSIMAHLARVKPHRTFRFNECVCTPYNADFDGDEMNLHLPQTEEAKAEALVLMGTKANLVTPRNGEPLIAAIQDFLTGAYLLTLKDTFFDRAKACQIIASILVGKDEKIKVRLPPPTILKPVTLWTGKQIFSVILRPSDDNPVRANLRTKGKQYCGKGEDLCANDSYVTIQNSELMSGSMDKGTLGSGSKNNIFYILLRDWGQNEAADAMSRLARLAPVYLSNRGFSIGIGDVTPGQGLLKAKYELLNAGYKKCDEYIEALNTGKLQQQPGCTAEETLEALILKELSVIRDHAGSACLRELDKSNSPLTMALCGSKGSFINISQMIACVGQQAISGSRVPDGFENRSLPHFEKHSKLPAAKGFVANSFYSGLTPTEFFFHTMAGREGLVDTAVKTAETGYMQRRLVKSLEDLCSQYDLTVRSSTGDIIQFIYGGDGLDPAAMEGKDEPLEFKRVLDNIKAVFPCPSEPALSKNELILTTESIMKKSEFLCCQDSFLQEIKKFIKGVSEKIKKTRDKYGINDNGTTEPRVLYQLDRITPTQVEKFLETCRDKYMRAQMEPGSAVGALCAQRNITLGVPRIKEIINASKAISTPIITAQLDKDDDADYARLVKGRIEKTLLGEISEYIEEVFLPDDCFILVKLSLERIRLLRLEVNAETVRYSICTSKLRVKPGDVAVHGEAVVCVTPRENSKSSMYYVLQFLKEDLPKVVVQGIPEVSRAVIHIDEQSGKEKYKLLVEGDNLRAVMATHGVKGTRTTSNNTYEVEKTLGIEAARTTIINEIQYTMVNHGMSIDRRHVMLLSDLMTYKGEVLGITRFGLAKMKESVLMLASFEKTADHLFDAAYFGQKDSVCGVSECIIMGIPMNIGTGLFKLLHKADRDPNPPKRPLIFDTNEFHIPLVT

SEQ ID NO: 170074 - DNA, 4173 bp, Artificial Sequence
  derived and/or modified sequence
atggtgaaggaacagtttcgggagactgacgtcgctaaaaaaataagccatatctgctttggaatgaagtcaccggaggagatgcgccaacaagcccacattcaagtagtttcaaagaacctgtactcccaggataaccagcatgcgccccttttatatggggttctcgaccatcgcatgggaacatccgagaaggacaggccatgcgaaacttgcggaaaaaacttggcagattgcttaggtcactacgggtatattgacctcgaactgccctgcttccatgtcggctacttccgcgcagtgatcggcatccttcagatgatctgtaagacctgctgtcacatcatgctctcccaagaagagaaaaagcagtttttagactatctcaaacgccccgggctcacttacctccaaaaaagaggtcttaaaaaaaaaatctctgacaagtgccgcaaaaagaacatctgtcaccattgcggggcctttaacggcacagtgaagaagtgcggcctgctgaaaattatccacgagaaatacaagaccaacaaaaaggtcgtcgatcccattgtaagtaactttctgcagagttttgaaaccgccatcgaacacaataaagaagtcgagcctctgcttggacgagcccaagaaaacctgaacccgcttgtcgtgttgaatttgtttaagcggattcccgccgaagatgtgccactcttattgatgaaccccgaggccggcaagcctagcgacctgatcctcactagactgctcgtgccaccactctgtatccggccgtctgttgtttccgatcttaagtctgggacaaacgaggacgacttgactatgaaattgacggagattatctttctcaacgatgtaattaagaagcatcgcatttctggcgccaaaacccaaatgattatggaggactgggacttccttcagttgcagtgcgctttgtatatcaactccgagctgtcagggattccactcaatatggcaccaaaaaagtggacccgtggattcgtccagaggctaaaggggaagcagggtcgcttccgggggaatctgtcggggaagagagtggatttctccggaagaactgtcataagtccggaccctaatcttcggatcgacgaagtggccgtgccggttcacgtggctaagatcctgacgttcccagagaaggtcaataaggccaacatcaactttctacggaagctggtccaaaacggcccagaagtacatcccggcgctaacttcatccagcagaggcatacacagatgaaacgctttctgaagtatggcaatcgggaaaagatggctcaggagttaaaatatggggacattgtggagagacacttaattgacggtgatgtcgtgcttttcaatcgtcagccttcactccacaagctttcaataatggcccatctggccagagttaagccccatcggaccttccggttcaatgaatgtgtctgcactccgtataatgcagactttgacggagatgaaatgaacctacacctgccccagaccgaggaggccaaagcggaagctctggtcctaatgggtacaaaggctaatctcgtcactcctaggaacggcgaacccctgatcgcagctattcaggacttcttgactggcgcatacttacttacactcaaggacactttttttgacagggccaaggcgtgccaaattatcgcctcaatcctcgtcggcaaggatgagaagataaaagttcgcctgccgccgcctacgatactgaagcccgtgacgttatggaccggtaagcagatcttttcagtgatcttgaggccaagcgatgataacccggtcagggccaatttacggaccaagggaaaacagtactgtggcaagggcgaggacctgtgcgccaatgactcctacgtgaccatacagaactccgagctgatgagcggctccatggacaaaggcaccctgggatccggctccaagaataacatcttctatatactgctccgggattgggggcagaatgaagcagcggatgccatgtcccggttagcaagactcgcccccgtgtatttatccaatagggggttctcaatcggaataggcgacgtgacccccggacagggactgctgaaggctaaatacgagctcctgaatgccggatacaaaaagtgtgatgagtatattgaagccctcaatacaggtaagctacagcagcagcctggctgcacggctgaggaaactcttgaagcacttatcctgaaagaactctctgtgattcgcgaccatgcaggaagcgcttgtctccgcgagttagacaagtccaattcaccccttacaatggctctttgtggcagcaagggttctttcattaatatctcccagatgatagcatgtgttggccagcaggccatcagcgggtctcgcgtacccgacggttttgagaacagatccttgcctcacttcgaaaaacactccaagctgccagccgcaaagggtttcgtggctaatagcttctactccggcctcactccaaccgagttcttcttccacactatggccggtcgagaaggtctagttgacacggcagttaagacagcagagacagggtatatgcagcgccggcttgtaaagtccctggaggacctatgttcacagtatgacctgacggttcggtctagtaccggcgatataatccagtttatctatggcggggacggtctggatccggcggccatggaaggcaaggatgaaccactggagttcaagcgagtcctcgataatataaaagctgttttcccctgcccttccgagccggctcttagcaaaaacgagctcattcttaccacagagagcattatgaagaagagcgagttcctttgctgtcaggactccttcttacaggagatcaaaaagttcattaagggagtgtcagaaaagataaaaaagaccagagataagtacggaattaacgataatggcaccactgaaccacgagtactataccagctcgatcggattacacccacacaagtggagaagttcctggagacttgccgtgacaaatacatgagagctcaaatggagccaggaagcgccgtgggagctctgtgtgcccagagtattggtgaaccaggcactcagatgacactgaagacctttcacttcgccggagtggcaagcatgaacattacccttggggttcctagaataaaagaaatcatcaacgctagcaaagcaataagcacccccattattacagcgcagttagataaagacgacgacgctgactacgccagattggtgaaaggccggatagagaaaacgctgctcggcgagatctctgagtacattgaggaagttttcctgccagatgattgctttattctggtgaaattgtcactggagagaattcggttgctcagattggaggtgaatgctgagacagtacgttactctatatgcacctctaagctgcgggtaaaaccaggagatgtggccgtccatggcgaggcggtggtgtgcgtgaccccgcgtgagaacagcaagtcatcaatgtattacgtgttgcagttcctgaaggaggacctgccaaaagtcgtcgttcagggcattccagaagtgagccgcgccgtaatacacattgacgagcaaagtggaaaagaaaagtataaactacttgtggaaggcgacaacctgcgggccgtgatggccacgcacggagttaaggggaccagaacaacttctaataatacctacgaagtggaaaagaccctaggcattgaagctgccagaacgaccatcatcaatgagatacaatacactatggtcaatcatgggatgtcgatcgatagacggcacgtgatgcttctttccgatttgatgacatacaaaggggaggttctgggtatcacccggtttggccttgccaaaatgaaagagtccgtgttgatgttagcaagcttcgagaagacagcagatcaccttttcgatgctgcttattttgggcagaaagacagcgtttgcggcgttagtgaatgtatcattatgggaatcccgatgaacattgggactgggctcttcaaactgcttcataaggctgaccgagaccctaacccacccaagcggccactgattttcgacaccaatgaattccatatacccctcgtgacctag

SEQ ID NO: 170075 - DNA, 489 bp, Artificial Sequence
  derived and/or modified sequence
atgtattacgtgctacaatttcttaaagaagacctgcccaaggttgtggtgcagggcatacctgaggttagccgcgcggtaatacacattgacgaacagagtgggaaagagaagtataaattgcttgtggagggggataatctgagagcggtgatggcgacgcacggcgtgaaggggacaagaaccacttccaataatacctacgaggttgaaaagacactgggcattgaagccgcacgcaccacgatcataaatgagatacagtatacaatggtaaaccatgggatgtccatcgataggcggcacgtgatgttactgagcgatttgatgacttacaagggcgaggtgctgggtatcacaagatttggacttgcaaaaatgaaagaaagcgttctgatgctggcttcctttgagaagaccgcagaccatttattcgacgccgcctactttggacagaaggatagcgtctgcgcttggccgcagccctag

SEQ ID NO: 170076 - DNA, 4110 bp, Artificial Sequence
  derived and/or modified sequence
atggtgaaagagcagtttcgggagaccgatgtagcaaaaaagatatcacatatctgctttgggatgaagagtcccgaagaaatgagacagcaggcccacattcaggtcgttagcaagaatctttactcacaggacaatcagcatgccccactcctgtatggagtgttggaccatcggatgggaacctcagagaaggacagaccttgtgaaacttgcgggaaaaatctcgccgattgtctgggtcactacggatatatagatctcgagctgccatgtttccacgtggggtatttccgggcagttatagggatccttcaaatgatctgtaaaacatgctgtcacataatgctctctcaagaggagaaaaagcagtttctagattatcttaaaaggcccggactgacctatctgcagaaaagaggccttaaaaaaaaaatctctgataagtgcaggaaaaaaaacatctgccaccactgcggtgcgtttaacgggactgtgaagaagtgtgggctgttaaagataatccacgaaaagtacaaaacaaataagaaggttgtcgatccaatcgtgtcaaacttcctgcagagttttgaaacagcaatcgagcataacaaagaagtggagcctctgcttggcagagcacaggagaacctgaaccctttagtggtgttgaacctcttcaagcgaatacccgcagaggacgtgcctctactccttatgaatcctgaagctgggaagcccagtgatctgatcctgactaggttgctggtccccccactgtgtatcagaccatcggtcgtgtctgatctgaagtcaggcaccaacgaagatgatcttaccatgaaattgaccgaaatcatttttctaaatgatgtgatcaagaaacacaggatatcaggtgcaaaaacacagatgataatggaagactgggatttcttgcagttgcagtgcgctctgtatatcaattctgaactgtccggaatcccgttaaacatggcaccaaagaagtggactcgcggcttcgtgcagcgactcaaaggaaagcagggtcgcttcaggggtaacctcagcggaaagcgggtggatttcagtggcagaactgtgatctctccagacccgaatctaagaatcgacgaagtcgccgtgcctgtgcacgtcgctaaaatactgactttcccggagaaggtgaataaggccaacatcaactttttgcgaaaacttgtgcaaaacgggcccgaagtgcatccgggcgccaacttcattcagcagaggcacactcaaatgaagcggttccttaagtatgggaatagggaaaaaatggcccaagagttgaagtatggcgatatagtcgagcgtcatctaatcgatggagacgttgtgctgtttaaccgccagccctctctgcataaactttctatcatggctcatctagcacgtgtcaagccacacagaactttccggttcaatgagtgtgtctgcacgccttataatgctgatttcgacggagacgagatgaacctccacctgccacagaccgaggaggcaaaggcagaagccctggtcctcatgggaactaaggccaatcttgtaacccccaggaacggcgagccactgatagccgctatccaggattttctcactggtgcatacctgcttacactcaaggacaccttcttcgatcgtgccaaggcctgccagataattgcctcaatactcgtgggaaaggacgagaaaattaaagtcaggctgccccctccgacaattctgaagcccgtgaccctgtggaccgggaagcagatcttcagcgtgattctgcgaccaagtgacgacaatcccgtgcgcgccaacctcagaacaaaggggaaacagtactgtgggaagggggaggacctttgcgcgaacgactcatacgtaacaattcaaaactccgagctgatgtccggaagtatggacaaaggaactctaggtagcggaagtaaaaataatatattctacatactgctaagagattgggggcagaacgaagccgccgatgcaatgagtaggctggctcgcctggccccagtttaccttagtaatcggggatttagcatcgggattggcgacgtgaccccgggccagggcctgctgaaggcaaagtatgaattacttaatgcaggatacaagaagtgtgacgagtatattgaggctttaaacactggtaagctccagcagcagcccgggtgcacagccgaagagactctggaggccctaattctgaaagagctgagtgtcattagggaccacgctggaagcgcctgcctgcgggagctcgataagtctaacagtcccctcactatggccctctgtgggtctaaggggagcttcatcaatatctcccagatgattgcctgtgtgggacagcaggccatttcgggctcacgggtccccgacgggtttgaaaacaggagcttaccccacttcgagaagcactcaaaactacctgccgcgaaaggtttcgtggctaactccttctactcgggattaacccccactgagttcttttttcacactatggcaggacgcgagggactcgtcgatactgctgttaagacagcagagacagggtatatgcaaaggcgcctcgtaaagagccttgaggacctttgttctcaatatgatctaaccgttagaagttccacgggggatattatccagtttatttacgggggcgatgggttagatcccgcggctatggagggcaaagacgagccacttgagttcaagagggtgcttgacaacatcaaggccgtgtttccttgccccagcgagccagctctgtctaaaaatgaactaatcctgactacagagtccataatgaaaaaaagcgaattcctgtgctgtcaggacagttttctccaggagattaaaaaattcattaaaggagttagtgaaaagataaagaagacccgtgataagtatggcatcaacgataatggcaccacggaacctcgggttctgtaccagctggacagaattacaccgacacaagtggaaaagttcttagagacttgtcgtgacaagtatatgcgggcccagatggaaccaggctcagctgtcggtgctctctgcgctcagcgaaatatcacactcggcgtacctagaattaaagaaatcattaacgctagcaaggcgatctctacaccaattattacagctcagctggataaggacgatgacgctgactacgctcgtctcgtgaaagggcgtattgaaaaaactttgttgggagaaatttcagagtacatcgaggaggtcttccttccagacgattgctttattcttgtgaagctctctttggaacggatccggctcctccggctggaagtgaacgctgagaccgtacggtattccatatgcacatccaagctgagagtcaaacctggagatgtcgccgtgcacggggaagctgtggtttgcgttacaccacgagaaaattccaagagctccatgtattacgtgttgcagtttttgaaggaggatttgccaaaggtggtggttcagggcatccctgaagtctccagggctgtcatacacatcgatgagcagagcggcaaagaaaagtataaattgctggtggaaggtgataacctccgagctgtcatggctactcacggcgtcaagggaacccggactacaagcaacaatacctatgaggtggagaaaacattggggattgaagctgcgaggacgaccattatcaacgagattcagtatacgatggtcaatcacggcatgtcaatcgacagacggcacgtgatgctgctgtctgatcttatgacttacaaaggcgaggtgctgggaataacccgattcgggctggccaaaatgaaggaatcagtcctcatgctggcttcattcgagaagacggccgaccatctttttgatgcagcctatttcggacagaaggattccgtgtgcggcgtgtctgaatgtattattatggggatccccatgaacattggcacaggattatttaagctgttacataaggctgaccgcgaccccaatcctcctaagagacccctcatcttcgatactaatgagttccatatcccactagtgacatag

SEQ ID NO: 170077 - DNA, 4173 bp, Artificial Sequence
  derived and/or modified sequence
atggtgaaggagcagttccgggagacagatgtggccaagaagatcagccacatctgcttcggcatgaagagccctgaggagatgaggcagcaggcccacatccaggtggtgtccaagaacctgtacagccaggacaaccagcacgcccccctgctgtatggagtgctggaccacaggatgggcaccagcgagaaggaccggccctgtgagacctgtgggaagaacctggccgactgcctgggccactacggctacatcgacctggagctgccctgcttccacgtgggctacttccgggccgtcatcggcatcctgcagatgatctgcaagacctgctgccacatcatgctgagccaggaggagaagaagcagttcctggactacctgaagaggcctggcctgacctacctgcagaagaggggcctgaagaagaagatcagtgacaagtgcaggaagaagaacatctgccaccactgtggggccttcaatggaacagtgaagaagtgtggcctgctgaagatcatccacgagaagtacaagaccaacaagaaggtggtggaccccatcgtgagcaacttcctgcagagctttgaaacagccatcgagcacaacaaggaggtggagcccctgctgggccgggcccaggagaacctgaaccccctggtggtgctgaacctcttcaagaggatcccagcagaagatgtgcccctgctgctgatgaaccctgaggccggcaagcccagcgacctgatcctgacccggctgctggtgccccccctgtgcatccggcccagcgtggtgtctgacctgaagagcggcaccaatgaagatgacctgaccatgaagctgacagagatcatcttcctgaatgatgtgatcaagaagcaccgcatcagcggggccaagacccagatgatcatggaggactgggacttcctgcagctgcagtgtgccctgtacatcaacagcgagctgagcggcatccccctgaacatggcccccaagaagtggacccggggctttgtgcagaggctgaagggcaagcagggccgcttccggggcaacctgagcggcaagagggtggacttcagcggccgcaccgtcatcagcccagaccccaacctgagaattgatgaggtggccgtgcctgtgcacgtggccaagatcctgaccttccctgagaaggtgaacaaggccaacatcaacttcctgaggaagctggtgcagaatggacctgaggtgcaccctggggccaacttcatccagcagaggcacacccagatgaagcgcttcctgaagtatggcaaccgggagaagatggcccaggagctgaagtacggggacatcgtggagcggcacctgattgatggagatgtggtgctcttcaaccggcagcccagcctgcacaagctgagcatcatggcccacctggcccgggtgaagccccacaggaccttccgcttcaatgaatgtgtgtgcaccccctacaatgctgactttgatggagatgagatgaacctgcacctgccccagacagaggaggccaaggccgaggccctggtgctgatgggcaccaaggccaacctggtgaccccaagaaatggagagcccctgattgctgccatccaggacttcctgactggagcctacctgctgaccctgaaggacaccttctttgaccgggccaaggcctgccagatcatcgccagcatcctggtgggcaaggatgagaagatcaaggtgcggctgcccccacccaccatcctgaagcctgtgaccctgtggacaggcaagcagatcttcagcgtcatcctgcggcccagtgatgacaaccctgtgcgggccaacctgcggaccaagggcaagcagtactgtgggaaaggagaggacctgtgtgccaatgacagctatgtgaccatccagaacagcgagctgatgagcggctccatggacaagggcaccctgggcagcggcagcaagaacaacatcttctacatcctgctgcgggactggggccagaatgaggccgcagatgccatgagccggctggcccggctggcccctgtgtacctgagcaacagaggcttcagcatcggcattggagatgtgaccccaggccagggcctgctgaaggccaagtatgagctgctgaatgccggctacaagaagtgtgatgagtacatcgaggccctgaacacaggcaagctgcagcagcagcccggctgcacagctgaggagaccctggaggccctgatcctgaaggagctgagcgtcatccgggaccatgctggcagcgcctgcctgcgggagctggacaagagcaacagccccctgaccatggccctgtgtggcagcaagggcagcttcatcaacatcagccagatgattgcctgtgtgggccagcaggccatcagcggcagccgggtgcctgatggctttgagaacagaagcctgccccactttgagaagcacagcaagctgcctgctgccaagggctttgtggccaacagcttctacagcggcctgacccccacagagttcttcttccacaccatggccggccgggagggcctggtggacacagctgtgaagacagctgagaccggctacatgcagaggcggctggtgaagagcctggaggacctgtgcagccagtatgacctgactgtgcgcagcagcactggagacatcatccagttcatctatggaggagatggcctggaccctgctgccatggagggcaaggatgagcccctggagttcaagagggtgctggacaacatcaaggctgtgttcccctgccccagcgagcccgccctgagcaagaatgaactcatcctgaccacagagagcatcatgaagaagtctgagttcctgtgctgccaggacagcttcctgcaggagatcaagaagttcatcaagggcgtgtctgagaagatcaagaagacccgggacaagtatggcatcaatgacaatggcaccacagagccccgggtgctgtaccagctggaccgcatcacccccacccaggtggagaagttcctggagacctgccgggacaagtacatgagggcccagatggagcccggcagcgctgtgggcgccctgtgtgcccagagcattggagagcccggcacccagatgaccctgaagaccttccactttgctggggtggcctccatgaacatcaccctgggcgtgccccgcatcaaggagatcatcaatgccagcaaggccatcagcacccccatcatcacagcccagctggacaaggatgatgatgctgactatgcccggctggtgaagggcagaattgagaagaccctgctgggggagatcagcgagtacatcgaggaggtgttcctgcctgatgactgcttcatcctggtgaagctgagcctggagcgcatccggctgctgcggctggaggtgaatgctgagaccgtgcgctacagcatctgcaccagcaagctgcgggtgaagccaggagatgtggccgtgcacggggaggccgtggtgtgtgtgaccccccgggagaacagcaagagctccatgtactacgtgctgcagttcctgaaggaggacctgcccaaggtggtggtgcagggcatccctgaggtgtcccgggccgtcatccacattgatgagcagagcggcaaggagaagtacaagctgctggtggagggggacaacctgcgggctgtgatggccacccatggagtgaagggcaccaggaccaccagcaacaacacctatgaggtggagaagaccctgggcatcgaggccgcccggaccaccatcatcaatgagatccagtacaccatggtgaaccacggcatgagcattgaccggcggcacgtgatgctgctgagtgacctgatgacctacaagggggaggtgctgggcatcacccgcttcggcctggccaagatgaaggagagcgtgctgatgctggccagctttgagaagacagctgaccacctgtttgatgctgcctacttcggccagaaggacagcgtgtgtggggtgtctgagtgcatcatcatgggcatccccatgaacattggaacaggcctcttcaagctgctgcacaaggctgaccgggaccccaacccccccaagaggcccctcatctttgacaccaatgagttccacatccccctggtgacctag

SEQ ID NO: 170078 - DNA, 489 bp, Artificial Sequence
  derived and/or modified sequence
atgtactacgtgctgcagttcctgaaggaggacctgcccaaggtggtggtgcagggcatccctgaggtgtcccgggccgtcatccacattgatgagcagagcggcaaggagaagtacaagctgctggtggagggggacaacctgcgggctgtgatggccacccatggagtgaagggcaccaggaccaccagcaacaacacctatgaggtggagaagaccctgggcatcgaggccgcccggaccaccatcatcaatgagatccagtacaccatggtgaaccacggcatgagcattgaccggcggcacgtgatgctgctgagtgacctgatgacctacaagggggaggtgctgggcatcacccgcttcggcctggccaagatgaaggagagcgtgctgatgctggccagctttgagaagacagctgaccacctgtttgatgctgcctacttcggccagaaggacagcgtgtgtgcctggccccagccctag

SEQ ID NO: 170079 - DNA, 4110 bp, Artificial Sequence
  derived and/or modified sequence
atggtgaaggagcagttccgggagacagatgtggccaagaagatcagccacatctgcttcggcatgaagagccctgaggagatgaggcagcaggcccacatccaggtggtgtccaagaacctgtacagccaggacaaccagcacgcccccctgctgtatggagtgctggaccacaggatgggcaccagcgagaaggaccggccctgtgagacctgtgggaagaacctggccgactgcctgggccactacggctacatcgacctggagctgccctgcttccacgtgggctacttccgggccgtcatcggcatcctgcagatgatctgcaagacctgctgccacatcatgctgagccaggaggagaagaagcagttcctggactacctgaagaggcctggcctgacctacctgcagaagaggggcctgaagaagaagatcagtgacaagtgcaggaagaagaacatctgccaccactgtggggccttcaatggaacagtgaagaagtgtggcctgctgaagatcatccacgagaagtacaagaccaacaagaaggtggtggaccccatcgtgagcaacttcctgcagagctttgaaacagccatcgagcacaacaaggaggtggagcccctgctgggccgggcccaggagaacctgaaccccctggtggtgctgaacctcttcaagaggatcccagcagaagatgtgcccctgctgctgatgaaccctgaggccggcaagcccagcgacctgatcctgacccggctgctggtgccccccctgtgcatccggcccagcgtggtgtctgacctgaagagcggcaccaatgaagatgacctgaccatgaagctgacagagatcatcttcctgaatgatgtgatcaagaagcaccgcatcagcggggccaagacccagatgatcatggaggactgggacttcctgcagctgcagtgtgccctgtacatcaacagcgagctgagcggcatccccctgaacatggcccccaagaagtggacccggggctttgtgcagaggctgaagggcaagcagggccgcttccggggcaacctgagcggcaagagggtggacttcagcggccgcaccgtcatcagcccagaccccaacctgagaattgatgaggtggccgtgcctgtgcacgtggccaagatcctgaccttccctgagaaggtgaacaaggccaacatcaacttcctgaggaagctggtgcagaatggacctgaggtgcaccctggggccaacttcatccagcagaggcacacccagatgaagcgcttcctgaagtatggcaaccgggagaagatggcccaggagctgaagtacggggacatcgtggagcggcacctgattgatggagatgtggtgctcttcaaccggcagcccagcctgcacaagctgagcatcatggcccacctggcccgggtgaagccccacaggaccttccgcttcaatgaatgtgtgtgcaccccctacaatgctgactttgatggagatgagatgaacctgcacctgccccagacagaggaggccaaggccgaggccctggtgctgatgggcaccaaggccaacctggtgaccccaagaaatggagagcccctgattgctgccatccaggacttcctgactggagcctacctgctgaccctgaaggacaccttctttgaccgggccaaggcctgccagatcatcgccagcatcctggtgggcaaggatgagaagatcaaggtgcggctgcccccacccaccatcctgaagcctgtgaccctgtggacaggcaagcagatcttcagcgtcatcctgcggcccagtgatgacaaccctgtgcgggccaacctgcggaccaagggcaagcagtactgtgggaaaggagaggacctgtgtgccaatgacagctatgtgaccatccagaacagcgagctgatgagcggctccatggacaagggcaccctgggcagcggcagcaagaacaacatcttctacatcctgctgcgggactggggccagaatgaggccgcagatgccatgagccggctggcccggctggcccctgtgtacctgagcaacagaggcttcagcatcggcattggagatgtgaccccaggccagggcctgctgaaggccaagtatgagctgctgaatgccggctacaagaagtgtgatgagtacatcgaggccctgaacacaggcaagctgcagcagcagcccggctgcacagctgaggagaccctggaggccctgatcctgaaggagctgagcgtcatccgggaccatgctggcagcgcctgcctgcgggagctggacaagagcaacagccccctgaccatggccctgtgtggcagcaagggcagcttcatcaacatcagccagatgattgcctgtgtgggccagcaggccatcagcggcagccgggtgcctgatggctttgagaacagaagcctgccccactttgagaagcacagcaagctgcctgctgccaagggctttgtggccaacagcttctacagcggcctgacccccacagagttcttcttccacaccatggccggccgggagggcctggtggacacagctgtgaagacagctgagaccggctacatgcagaggcggctggtgaagagcctggaggacctgtgcagccagtatgacctgactgtgcgcagcagcactggagacatcatccagttcatctatggaggagatggcctggaccctgctgccatggagggcaaggatgagcccctggagttcaagagggtgctggacaacatcaaggctgtgttcccctgccccagcgagcccgccctgagcaagaatgaactcatcctgaccacagagagcatcatgaagaagtctgagttcctgtgctgccaggacagcttcctgcaggagatcaagaagttcatcaagggcgtgtctgagaagatcaagaagacccgggacaagtatggcatcaatgacaatggcaccacagagccccgggtgctgtaccagctggaccgcatcacccccacccaggtggagaagttcctggagacctgccgggacaagtacatgagggcccagatggagcccggcagcgctgtgggcgccctgtgtgcccagaggaacatcaccctgggcgtgccccgcatcaaggagatcatcaatgccagcaaggccatcagcacccccatcatcacagcccagctggacaaggatgatgatgctgactatgcccggctggtgaagggccgcatcgagaagaccctgctgggggagatcagcgagtacatcgaggaggtgttcctgcctgatgactgcttcatcctggtgaagctgagcctggagcgcatccggctgctgcggctggaggtgaatgctgagaccgtgcgctacagcatctgcaccagcaagctgcgggtgaagccaggagatgtggccgtgcatggagaggccgtggtgtgtgtgaccccccgggagaacagcaagagctccatgtactacgtgctgcagttcctgaaggaggacctgcccaaggtggtggtgcagggcatccctgaggtgtccagagctgtgatccacattgatgagcagagcggcaaggagaagtacaagctgctggtggagggggacaacctgcgggctgtgatggccacccacggcgtgaagggcaccaggaccaccagcaacaacacctatgaggtggagaagaccctgggcattgaagctgcccggaccaccatcatcaatgagatccagtacaccatggtgaaccacggcatgagcattgacagaagacatgtgatgctgctgagtgacctgatgacctacaagggggaggtgctgggcatcaccaggtttggcctggccaagatgaaggagagcgtgctgatgctggccagctttgagaagacagctgaccacctgtttgatgctgcctacttcggccagaaggacagcgtgtgtggggtgtctgagtgcatcatcatgggcatccccatgaacatcggcaccggcctcttcaagctgctgcacaaggctgaccgggaccccaacccccccaagaggcccctcatctttgacaccaatgagttccacatccccctggtgacctag

SEQ ID NO: 170080 - DNA, 4173 bp, Artificial Sequence
  derived and/or modified sequence
atggtgaaggagcagttccgggagaccgacgtggccaagaagatcagccacatatgcttcgggatgaagagtcccgaggagatgaggcagcaggcccatattcaggtggtatccaaaaacttgtacagccaagataaccagcacgctcctctcctttacggggtcctggatcacaggatggggacaagtgagaaagaccgaccttgtgaaacatgtggcaaaaacctcgcggactgtctggggcactatggttacattgacctggagctgccatgttttcatgtcggctatttccgcgcagtgattggaatactccagatgatctgtaaaacatgttgccacattatgctgagtcaggaagagaagaagcaattcctagactatctgaagcgacctggactgacctacctgcagaagcgggggctgaagaagaagatctctgataaatgccgcaaaaagaacatctgtcatcactgcggggcctttaacggcacagtgaaaaagtgcggtctgctgaagattatccacgaaaagtataagacaaataagaaggtggtggaccccattgttagcaacttcttacagtcattcgaaaccgccatcgaacataataaggaggtggagcccctgctcggaagggctcaggaaaatctgaacccgttagtagtactgaatctttttaagcggatccctgccgaggacgttccactgctgttgatgaatcccgaagccggtaaaccgtctgatctgatcctcacacgactgctggttccacccctgtgtattcggcctagtgttgtctctgatcttaaatctggtaccaatgaagatgacctcacgatgaagttgaccgaaatcatttttctgaatgatgtcattaaaaaacacaggatttccggggcgaagacccagatgattatggaggattgggactttctgcagctccaatgtgcgttgtacattaacagtgaactgtccggtattcccttaaacatggccccaaagaagtggactcgaggctttgttcagagattgaagggaaagcagggacgcttcagggggaatctgtcaggcaaaagagttgactttagcggcaggactgtcatatccccagacccaaacctccgcatcgacgaagttgccgtgcctgtacatgtggctaaaatcttaacatttcccgagaaagtaaataaagcaaacatcaatttcctgagaaaactggtccagaatggccccgaggtccacccaggggctaatttcatccaacagcggcatacccagatgaagcgttttttgaagtacggaaatagggagaagatggctcaagagctgaagtatggtgatattgtggaacgacatctgatcgatggagatgtcgttttgtttaatcgacagcctagtctgcacaaattgagtattatggcacaccttgcgcgggtgaaacctcacaggacatttagattcaatgaatgtgtgtgcactccctacaatgcggacttcgacggagatgaaatgaatttgcacctgccccagacagaggaggcgaaagccgaggctctggtattaatgggaacaaaggctaacttagtcactccccggaacggagagcccctgatcgccgccatccaggattttctcacgggagcttatctgctgacgttgaaagatactttcttcgacagagccaaggcttgtcagatcatcgcttctatcctcgtgggtaaggacgagaagattaaggtacgcctccccccacctaccatactgaagcctgtgactttgtggactggtaagcaaattttttctgtgatccttcggccatcagacgataaccctgttcgagctaatctgcgcactaaagggaagcaatattgcggtaaaggggaagatctctgcgctaatgacagctatgttacaatacagaactcagagctgatgagtggatcgatggacaaggggactcttggcagcggctctaagaacaacattttctatatcctactccgggactggggccaaaatgaggctgcggatgcaatgtcccggttggctaggctcgcacccgtctatttaagcaatcgggggttttcaatcggaatcggggacgtcacccctggacagggccttctgaaagccaaatatgagctcctcaatgctggctacaagaagtgcgacgagtacatagaagcattgaacacaggcaaactgcagcagcagccaggatgcaccgcagaagaaacgcttgaagctctcattctgaaggagctcagcgtgattcgagaccacgctggcagcgcctgcctgcgggagctcgataagagcaatagcccactgaccatggccctctgtggttcaaagggtagcttcattaacatcagtcagatgatagcgtgcgtggggcagcaagctataagcggcagtagagtgcccgacggttttgagaaccgctccctgccgcacttcgaaaagcactctaagctgcctgctgcaaagggatttgtggccaacagcttctactcgggcctgacccccaccgagtttttctttcacactatggccggaagggagggtctggtggacactgcagttaagactgctgaaactggttacatgcagagaaggctggtgaagagcctggaagacctgtgcagtcagtatgatctcaccgtgaggagcagcacaggagatatcatccagtttatttacggaggggacgggttggatcccgcagctatggagggcaaggatgaaccccttgagtttaaacgcgtcctggataacatcaaagctgtgttcccatgtccttccgagcccgcgctcagcaaaaacgagctcattctcaccactgaaagcattatgaagaagtctgaatttctgtgttgccaggattcattcctgcaagaaatcaagaagtttataaaaggcgtctccgagaagatcaagaaaactagagataagtacggcataaatgacaatggtactacagaaccccgagtcctgtaccagctcgatcgcattacacctacacaggttgagaagtttttggaaacctgtcgagataaatatatgcgtgcacaaatggagcctggctcagccgtaggagcactgtgcgcccagagtatcggggagccaggcactcagatgactctgaagactttccacttcgccggtgttgcctctatgaatattacattaggggttccccgtatcaaggagattatcaatgctagcaaggcgatttctacaccgattatcactgcccagcttgacaaagacgatgacgctgactatgcccgcttggttaagggcagaatagagaagaccttgctgggagaaatcagcgagtatatcgaggaagtattcctgcccgatgactgctttatccttgtgaagctgtctctcgagcggattagactgctgcgcctcgaagtgaatgccgagacagtgcgctattcaatttgtaccagcaagcttcgcgtcaaacctggcgatgtcgcggtgcacggtgaggccgttgtgtgtgtgacacccagggagaactctaagtcctcaatgtattacgttctgcagtttctgaaagaagacctgccaaaagtcgtcgtacagggaattcccgaagtgagtcgcgctgtcattcatatcgacgaacagagtggaaaggaaaaatacaaactgctggttgagggcgacaacctgagagctgtgatggccactcacggggtgaagggtacgcgtaccacttccaataatacatacgaagttgagaaaacattggggatagaggccgccaggactactattataaacgaaattcagtacacaatggtgaatcacgggatgagtattgatcggcgccatgtcatgctgctttccgacctgatgacttacaagggcgaggtcctaggcattacccgttttggattagccaagatgaaagagagcgtcctaatgctggcgtccttcgaaaaaactgcagaccacctgtttgacgctgcctattttggccaaaaggactctgtgtgtggcgtgagcgagtgcatcattatgggcattccaatgaacatcggaactggtttgtttaagttgcttcacaaagcggacagggatcctaaccctcctaaacgcccactgattttcgacaccaacgaatttcatatccctctggtcacatag

SEQ ID NO: 170081 - DNA, 489 bp, Artificial Sequence
  derived and/or modified sequence
atgtactacgtgctgcagttcctgaaggaggacctgcccaaggtggtggtccaaggcatccctgaggtcagcagggctgttatccacatcgacgagcagagtggaaaggagaagtacaagcttctagtggagggcgacaatctgagggccgtgatggcaacacatggcgtaaaggggaccagaactacgtcaaacaatacctatgaagtagaaaaaacactgggaattgaggcagctaggaccacaatcatcaatgagatacaatacacaatggtcaatcatggcatgtcaatcgaccggcggcatgttatgctgctgtcggaccttatgacgtataaaggtgaggtgctggggatcacccgattcggactggccaaaatgaaggagagcgtactgatgctggcttcttttgagaagactgcagatcatctgtttgatgccgcctatttcggacagaaagactccgtgtgtgcatggccgcagccctag

SEQ ID NO: 170082 - DNA, 4110 bp, Artificial Sequence
  derived and/or modified sequence
atggtgaaggagcagttccgggagaccgacgtggccaagaagatcagtcacatttgtttcggcatgaaatcaccagaggaaatgcggcagcaagcacacatccaggtggtgtcgaagaatctttattcacaggacaatcagcatgctcccctgctctatggcgttctggaccaccgtatgggcacttctgagaaagacagaccctgcgaaacctgtggcaaaaatcttgctgattgcctgggacattatggatatatagatcttgagttaccctgtttccacgtcggttactttcgcgccgttatcggcatactccaaatgatatgtaagacttgctgccacatcatgctcagccaagaagaaaaaaagcagttcctggattacctcaagaggccgggactcacataccttcagaagcggggcctcaaaaagaagatttccgataaatgtcggaagaaaaatatctgtcaccactgcggggcttttaatggtaccgtaaagaagtgcggtctcctgaagattatacatgagaaatataagacaaacaagaaggtcgtagaccctatcgtgagcaactttctccaatcctttgaaaccgctatcgaacacaacaaggaggtggagccactactagggagggcccaagagaatctgaatcctttagtggtgctcaacctcttcaagagaatccccgcagaggatgtccccttgctgttgatgaatcccgaggcgggcaaacctagcgaccttatccttaccaggctgcttgttccccccctttgtataagaccgtctgtcgtatctgacctgaagtccggaactaatgaagacgatctaaccatgaagctgacagaaattattttcctgaacgatgtcatcaaaaagcatagaataagcggtgctaagacacagatgattatggaagattgggatttccttcaacttcagtgtgccctgtacatcaacagcgagctttctggaatcccgctgaatatggcaccaaaaaagtggaccagagggtttgttcagcgactgaagggtaaacagggtaggtttagagggaacctatccggtaagcgcgtggactttagcgggcggactgtgatctcacccgatcccaacctgcgcattgacgaggtagctgtgcccgtgcacgtggccaaaatccttacttttcctgaaaaagtcaataaagcaaacatcaacttcctccgcaaactggtgcagaacggccctgaggttcaccctggggcaaatttcatccagcagaggcatacgcaaatgaaacggttcctcaagtacggaaatagggagaaaatggcccaagaacttaagtacggggatatcgtggagcgccatttgattgacggtgacgtcgttctgttcaatcggcaaccctctctgcataaattgtccattatggcacacctcgctagggtcaaaccccacaggacatttcgttttaatgaatgcgtttgcaccccctacaatgcagactttgatggggatgagatgaatctccatctgccccagacggaggaggccaaagccgaggcactcgtgctaatgggcacaaaggccaacctcgtgacccctcggaatggagagccactaatcgctgcgattcaggattttctgacaggggcatacctgcttacactgaaggacacttttttcgacagagccaaggcatgtcagatcatcgccagtatacttgtggggaaggatgagaagattaaagtgcgcttgccccctcccacaattctcaaaccagtgaccctttggacagggaagcagatcttcagcgtgattctgcggccgagtgacgacaaccctgtccgagcaaatttgcgtacaaaaggtaagcaatattgtggcaaaggagaagatctctgtgctaacgacagctatgttactatccagaattccgagctgatgagcggcagtatggacaagggtaccttggggagcgggtccaagaataacatcttctatattctgcttcgggattggggacaaaacgaggccgctgacgctatgtccagactggctcgcctagctcccgtctacctcagcaacaggggcttctctattggtattggagacgtgacaccggggcaaggacttctgaaggccaagtatgaactgctgaacgcagggtacaaaaagtgcgatgagtacattgaggcccttaatactggtaaactacagcagcagcccgggtgcaccgccgaagagactttagaggcactcatactgaaagagctttccgtgattcgtgatcatgccggcagcgcctgcctccgagagttggacaagagcaattctcccctcaccatggcactctgtgggagcaaggggtcttttatcaacatctcccagatgatagcctgcgtcggacaacaggcaattagtggtagcagagtgccagacgggttcgagaaccgctctctgcctcatttcgagaagcactccaaattaccagccgccaagggtttcgtcgcaaattccttttacagcggcctcacgcccaccgaattcttctttcatacgatggcggggcgtgagggacttgtcgacacagctgtgaaaactgctgagaccgggtatatgcagcgcaggctggtgaagtctctggaagacctctgttctcaatacgacctgacggtgaggtcttcaacgggcgatatcattcagttcatttatggcggtgatggactagaccccgcagctatggaagggaaagacgaacccctggagtttaaacgtgtgctggacaatatcaaggccgtgtttccatgcccctcagaacctgctctctcaaagaacgagctgatcttgacaacagagagcattatgaagaaatctgaattcctgtgttgccaggactccttcctgcaggagattaaaaaatttatcaaaggcgtgtccgaaaaaattaaaaagacaagagacaaatatggcatcaacgataatggcacaacagagcctagggtattatatcaactagaccgcatcacccctacacaggtagagaaattccttgagacttgccgcgataaatatatgcgcgctcagatggaacccggctctgcggtcggcgctctatgcgcccagaggaacatcaccttgggcgtcccacgaatcaaggagataatcaacgcttcaaaagctatctcaacaccaatcatcaccgcacagttggacaaagatgatgacgcagattacgcacgcctggtcaaaggccgaatagaaaagaccctcctgggagaaatctccgagtacatcgaggaggtattcctgcccgacgattgctttatccttgtgaagctaagcttagagcgaattagactcttgaggctggaagtgaacgccgagacagtccggtacagtatatgcacatccaaacttcgcgtcaagccgggagacgtggccgtgcacggggaagctgtggtctgtgtgacacccagggagaacagcaagtcttctatgtactatgtgcttcagttcttgaaggaggatttgcctaaggtcgtagtccaagggattcccgaagtctcacgcgccgtcatacatattgacgaacagagcggtaaggaaaagtataaactgctcgtggagggagataatctccgggcagttatggccacacacggagtgaagggaacgagaaccactagcaataacacatacgaggtcgagaagacgctgggcatagaagcagctcggaccactataattaatgagattcagtatacaatggtgaaccatggcatgagcattgatagaagacatgtgatgttactatccgatctgatgacctacaagggggaagtcctcggaattaccaggttcggcctcgcaaagatgaaagaatccgtgttgatgctggcatccttcgagaagacagcggaccacctttttgacgctgcctacttcggacagaaagacagcgtttgcggggtgtccgagtgcatcatcatgggaatcccaatgaatattgggaccggattattcaagctgctgcataaagcggacagggacccaaaccctcccaagcggccgctcatcttcgacaccaacgagtttcacatcccactggtaacctag

SEQ ID NO: 170083 - DNA, 6640 bp, Artificial Sequence
  derived and/or modified sequence
gggacactctacggtggccgagaggatgccgcagatgtgttagcggcgagtccagaagcagccccaggaggtgctgggggcatcgtttctctaatctggcctcccgagtgccaaggaggcgtcccggcagcggtcatcatggtgaaggagcagttccgggagacggatgtggccaagaaaataagccacatctgttttggaatgaagtcacctgaggagatgcgccagcaggcgcacatccaagttgtgagtaagaacctgtacagccaggacaaccaacatgcccccttgctatatggggtgctcgaccataggatgggtacgagtgagaaggatcgtccatgtgaaacctgtgggaaaaacttggctgactgtctaggccactatgggtatatcgacctggagttgccgtgttttcatgtagggtacttcagagcagtcataggcatcttacagatgatctgcaaaacctgctgccacatcatgctgtcccaagaggagaagaagcagtttctggactatctaaagaggcccggcctgacctaccttcagaagcgaggactgaaaaagaaaatctctgacaagtgccggaagaaaaacatctgccatcactgtggcgcttttaatggtaccgtaaagaagtgtggactgctgaaaataattcatgagaaatacaagaccaacaaaaaagtggtggatcccattgtatcaaatttccttcagtcttttgaaacagccattgaacataataaagaagtggagcctctgctgggaagggcacaggaaaacttgaatcccttagtagttctgaatttatttaaacgaatcccagctgaagatgttcctctacttctgatgaacccagaagccggaaagccgtctgatttgattctcacacgacttttggtgcctcctttgtgtatcagaccctccgttgtgagtgatttgaagtctggcaccaatgaagatgatctgacaatgaaactgacagaaatcattttcctaaacgatgttattaaaaagcatcggatctcaggagccaagacccagatgatcatggaggactgggatttcctgcagctgcagtgtgccctctacattaacagtgagctctcgggcattcccctcaacatggcacccaagaagtggaccagaggcttcgtccaacgcctgaagggaaaacagggtcgatttagaggaaatctctcaggaaagagagtggatttttctggcagaacagtcatctcgcccgaccccaacctccggattgatgaggtagctgtgccagttcatgtggccaaaattctaacttttcctgagaaggtaaacaaagcaaacatcaatttcttgaggaaactggttcaaaacggccctgaggttcacccaggagcaaacttcattcagcagagacatacgcagatgaaaaggtttttgaaatacggaaatcgagaaaagatggctcaagagctcaagtatggtgacatcgtagagagacacctcatcgatggagatgtggtgctgttcaatcggcagccctcgctgcacaaattgagcattatggctcatctggccagggtcaagccccaccggaccttcagatttaatgagtgtgtctgtacaccctataatgctgactttgatggtgatgaaatgaaccttcatcttcctcaaacagaagaagctaaagcagaggcccttgttctgatggggactaaagcaaatcttgtaaccccgaggaatggggaaccgctgattgctgctattcaggattttctaacaggtgcctatctcctcactctcaaggacactttctttgatcgagccaaggcttgccaaatcattgcttcaatactggttggcaaggatgagaaaattaaagttcgcctcccaccgcctacaatcctaaagcctgtcaccctgtggacgggaaagcagatcttcagtgtcatcctcaggcctagcgatgacaatccagtgagggccaacctgcgaaccaagggcaagcagtactgtggcaaaggggaagatctctgtgccaatgattcctatgttacaatccagaacagtgagttgatgagtggcagcatggacaaaggaaccctagggtcaggatccaagaacaatattttttacattttgctgcgagactggggacagaatgaagctgcagatgccatgtcacggctcgccaggctggctcctgtctacctgtctaaccgtggtttctcaattgggatcggtgatgtcacacctggccaaggactgctgaaggccaagtatgagttgctgaatgccggctacaagaaatgtgatgagtacatcgaagccctgaacacgggcaagctgcagcagcagcctggctgcactgctgaggagaccctggaggcactgatcctgaaggagctgtctgtgatccgtgaccacgctggcagtgcctgcctccgggagctggacaagagcaacagccccctcaccatggctctgtgcggctccaaaggttccttcattaacatatcacagatgattgcctgtgtgggacagcaggccatcagtggctctcgagtgccagacggctttgaaaacaggtccttgcctcattttgaaaaacactcaaagctcccagctgccaaaggctttgtggctaatagcttttattccggtttgacaccaactgagtttttcttccacacaatggccggccgggaaggtctagtcgacacggctgtaaagacagctgaaacgggatacatgcagcgaaggcttgtcaaatctcttgaagatctttgctcccagtatgatctgacagtccgaagctctactggcgatattatccagttcatttatggaggagatggcttagatcctgcagctatggagggaaaagatgaacctttggagtttaaaagggttctggacaacatcaaagcagtcttcccgtgtcccagtgagcctgctctcagcaaaaacgagctgatcctgaccacagagtccatcatgaagaagagtgagttcctctgctgccaggacagcttcctgcaggaaataaaaaaattcattaagggggtctctgagaagatcaagaaaaccagagataaatatggcatcaatgataacggcacaacagagccccgtgtgctgtaccagctggaccgcatcacccccacccaagtagaaaagtttctggagacctgtagggacaagtacatgagggcacagatggagccaggttctgcagtgggtgctctgtgtgcccagagcattggtgagccaggcacccagatgaccctgaagactttccactttgcaggtgtggcctccatgaacatcaccctgggcgtgccccggattaaagagatcatcaacgcttccaaggccatcagcactccaattatcacagcacagctagacaaggatgacgacgcggattatgctcgcctcgtgaaagggagaattgagaaaaccctcttgggagagatttccgagtatattgaagaagtgtttcttcctgatgactgctttattctcgtcaagctctccctggaacggattaggcttctgagactggaagtgaacgctgagacagtgagatattccatctgcacatccaagctccgtgtgaagcccggtgatgtggctgttcatggtgaggctgtggtgtgtgtcacccccagagagaacagcaagagctccatgtactacgtgctgcagttcctgaaagaggatctccccaaggtggtggtgcagggcattccagaggtgtccagagctgtcatccacattgacgagcagagtggaaaggagaagtacaagcttctggtggaaggtgataacctgcgggcagtcatggccacacacggtgtgaagggcacccgaaccacctccaataacacctatgaggtggagaaaactctgggcatcgaggccgcccggacaacgatcatcaatgaaatccagtacaccatggtgaaccacggcatgagcatcgacaggaggcacgtgatgctgctctccgacctcatgacctacaagggtgaagtcctgggcatcactaggtttggcctggccaagatgaaggagagtgtgctgatgctggcctcctttgagaagacggctgaccatctctttgacgctgcctacttcgggcagaaggactctgtgtgtggggtgtctgagtgcatcatcatgggaatcccaatgaacattggaaccgggctcttcaagctgcttcacaaggctgacagggacccgaaccctcccaagaggcccctgatcttcgacacaaatgaattccacatcccccttgtcacatagtccaaagaaagaggggaccatgcctgaccttgactccttgtcctgtctccagctgatgtataaagagttttgtgctccctgggacgggggtcctgaggtccccacctatgccagcaatcagagaagccctcttggcatccccaggagcagcttctcctctgatagggtgcagctcacaccagtgaccctgactgtgccacgctgctcgggagagctgagggttttattgtttgcttgcttgaaacctaatctatagacggccccacagctcgtgcacacactgcttccctggacttaaagcccagccaggtgtcatggtccatcccagctcactgcatacatccatcggctccccatggtgtcttcacacctgacgatgagccaggcctgagccccacacaggccagggcacattcttggattttccattccttggtcatgctggaatctctcaatgtgacatacttatgtaaatattgttactattatttatttgttccatttgagggatttggaatttttgttattttagttttatttttgaaaccaagcatctatagaaaccaagaaagtcagcatgtaagcgtcactggaaaaactggtttaagcaaatagagccgtctgggatttgtaactgaggtgcaactgtcatgaggcccaggcagctctgtaacatcttctatagatgcccctggctaccctgttgttttcatctacctcagacccctatcatggggctctaccctgtgacaagagccaaacccattctccatggcctatggaagcctcactggagtttggggcctgctgcaatggggatgagatggttttttgtagaattatacttacgttccttggatgatctctagttgattttttaagttctgagttgatgctgttaaggtacccggggtagccattggttcttggatctgtgttagaatgagtgctttcccttcctactgatgtgattgtggattaggaattcgtgaccgagtgatttttggccagtggttgggtttaaaattctattaaaatttgtagtttgggctgggtgctgtggctcatacctataatcccagcactttgggaggccgaggggggcagatcacttgagcccaggagttcgagagcagcctgggcaacatgacgaaaccccgtctctacagagaatacaaaaattagccaggcatggtggcccatgcctgtagtacctgctattggtaaggctgaggtggaaggttcacttgagcctgggaggtggaggttgtagtgagccaagatcgtgccactacactccagcctgggcaacaaagcaagaccttgtctcaaaaaaaaaaaagaaaaaaattaagcgtaaaaaaaaattagtttttataaaaaattatagtttgaccttttgatttccctgcatctacaaggtagacctattaacttctcttggggtatcagtgatgtggaaaaaaaatgccatttttcttaatgtttaacccccctttatctttgaattgagctagagcctggtttaggacaaaggattaagtttgttaatgaacactaattcagggcttctacttgagaccccaccgagatcaccagttctcatgtaacctgggaagagccataaaggggtaccccccaccccaactgccttcctggaagcatgcctgggaagtaagctgtaggcctgatccgagccaggaccactgggatccgtgcaaaggccaggggagggtagaattgaatcataggagtgaactccggcacctgttgtcttctgcgggtgacgcacactttaaatggaagagaggttgtggctataacttgtggctgggaataataaagatggcaccgccaaggagcctcaccttgcgtgagtgagtactcagttgggcgctgcagggtctggagtctgtgtgagacgtgtgtgattgtgatgggtgcgaatcagcgtatagcacttgagaacaaggcagaccttggagcagaatggttatgtgaaggatcacatcacccatgggtagggggggaagtcatacgtcctggaggtgctggtcctcctcctggaactgccagccttgctaggactatcaacatcaacagcattgcctggtaaaccctactgtttgtgctccccactgtgtcccatgactggtgttaaaattctccctactttgatcatctgccctgcccaggccttgggctttatgccagcacagagctcaaaggccaggtagcagcacatcctcaagcatgagagctcaaagggttacatttgagtctctgtacctgcttggaagaaataaaaatacgtgtgaattccatctca

SEQ ID NO: 170084 - DNA, 1668 bp, Artificial Sequence
  derived and/or modified sequence
ctgcagtgggtgctctgtgtgcccagagcattggtgagccaggcacccagatgaccctgaagactttccactttgcaggtgtggcctccatgaacatcaccctgggcgtgccccggattaaagagatcatcaacgcttccaaggccatcagcactccaattatcacagcacagctagacaaggatgacgacgcggattatgctcgcctcatgactgctttattctcgtcaagctctccctggaacggattaggcttctgagactggaagtgaacgctgagacagtgagatattccatctgcacatccaagctccgtgtgaagcccggtgatgtggctgttcatggtgaggctgtggtgtgtgtcacccccagagagaacagcaagagctccatgtactacgtgctgcagttcctgaaagaggatctccccaaggtggtggtgcagggcattccagaggtgtccagagctgtcatccacattgacgagcagagtggaaaggagaagtacaagcttctggtggaaggtgataacctgcgggcagtcatggccacacacggtgtgaagggcacccgaaccacctccaataacacctatgaggtggagaaaactctgggcatcgaggccgcccggacaacgatcatcaatgaaatccagtacaccatggtgaaccacggcatgagcatcgacaggaggcacgtgatgctgctctccgacctcatgacctacaagggtgaagtcctgggcatcactaggtttggcctggccaagatgaaggagagtgtgctgatgctggcctcctttgagaagacggctgaccatctctttgacgctgcctacttcgggcagaaggactctgtgtgtgcctggccccaaccctgagacctgtatgaaggtggatagtccacactcagaaaagagaagcaggatggtagtcatggaagctggaatctgccaaggagtatggaacaactcaccagccaaatgaactcgtcctaaaaatatggatctaatttttttaaaaaagaaaaggccaagtgcagtggctcacacccataatcccagcatcccagcacttgggaggccgaggtagatggatcacttgaggtcaggagttcgagatcagcctggccaacatggtgacaccccatctctactaaagatacaaaaattagccaggcatggtggcatgtgcctgtagtcccagctactcgggaggctgaagcatgagaatcgcttggacctgggaggcagaggctgcggtgagccaaaattgcgccaatgcactccagcctgggtgacagaagaagaccctgtttcagggggaaaaaaaagaaaaagaaaggaaagggaaaaaacatgaagagagcccagtgtatccagacccgagtctcatcaccttctcaggaagctttttgggttgtccaggccttaagtaggcctgtgcttccaaacttcatttctgggaggagtgccagtgggctggggaagtcggaggctagaagaagcctgttcttgtaccttgcagtctgttccaccaccgaggaacaggcctgacccgagtggcctgcagtaaagctccgagtcagggagcatggtataatcacctgacactggtgttacaggtaaatcacaatctctccccatagacaacatgatcttcctcatgt

SEQ ID NO: 170085 - DNA, 4433 bp, Artificial Sequence
  derived and/or modified sequence
atgccgcagatgtgttagcggcgagtccagaagcagccccaggaggtgctgggggcatcgtttctctaatctggcctcccgagtgccaaggaggcgtcccggcagcggtcatcatggtgaaggagcagttccgggagacggatgtggccaagaaaataagccacatctgttttggaatgaagtcacctgaggagatgcgccagcaggcgcacatccaagttgtgagtaagaacctgtacagccaggacaaccaacatgcccccttgctatatggggtgctcgaccataggatgggtacgagtgagaaggatcgtccatgtgaaacctgtgggaaaaacttggctgactgtctaggccactatgggtatatcgacctggagttgccgtgttttcatgtagggtacttcagagcagtcataggcatcttacagatgatctgcaaaacctgctgccacatcatgctgtcccaagaggagaagaagcagtttctggactatctaaagaggcccggcctgacctaccttcagaagcgaggactgaaaaagaaaatctctgacaagtgccggaagaaaaacatctgccatcactgtggcgcttttaatggtaccgtaaagaagtgtggactgctgaaaataattcatgagaaatacaagaccaacaaaaaagtggtggatcccattgtatcaaatttccttcagtcttttgaaacagccattgaacataataaagaagtggagcctctgctgggaagggcacaggaaaacttgaatcccttagtagttctgaatttatttaaacgaatcccagctgaagatgttcctctacttctgatgaacccagaagccggaaagccgtctgatttgattctcacacgacttttggtgcctcctttgtgtatcagaccctccgttgtgagtgatttgaagtctggcaccaatgaagatgatctgacaatgaaactgacagaaatcattttcctaaacgatgttattaaaaagcatcggatctcaggagccaagacccagatgatcatggaggactgggatttcctgcagctgcagtgtgccctctacattaacagtgagctctcgggcattcccctcaacatggcacccaagaagtggaccagaggcttcgtccaacgcctgaagggaaaacagggtcgatttagaggaaatctctcaggaaagagagtggatttttctggcagaacagtcatctcgcccgaccccaacctccggattgatgaggtagctgtgccagttcatgtggccaaaattctaacttttcctgagaaggtaaacaaagcaaacatcaatttcttgaggaaactggttcaaaacggccctgaggttcacccaggagcaaacttcattcagcagagacatacgcagatgaaaaggtttttgaaatacggaaatcgagaaaagatggctcaagagctcaagtatggtgacatcgtagagagacacctcatcgatggagatgtggtgctgttcaatcggcagccctcgctgcacaaattgagcattatggctcatctggccagggtcaagccccaccggaccttcagatttaatgagtgtgtctgtacaccctataatgctgactttgatggtgatgaaatgaaccttcatcttcctcaaacagaagaagctaaagcagaggcccttgttctgatggggactaaagcaaatcttgtaaccccgaggaatggggaaccgctgattgctgctattcaggattttctaacaggtgcctatctcctcactctcaaggacactttctttgatcgagccaaggcttgccaaatcattgcttcaatactggttggcaaggatgagaaaattaaagttcgcctcccaccgcctacaatcctaaagcctgtcaccctgtggacgggaaagcagatcttcagtgtcatcctcaggcctagcgatgacaatccagtgagggccaacctgcgaaccaagggcaagcagtactgtggcaaaggggaagatctctgtgccaatgattcctatgttacaatccagaacagtgagttgatgagtggcagcatggacaaaggaaccctagggtcaggatccaagaacaatattttttacattttgctgcgagactggggacagaatgaagctgcagatgccatgtcacggctcgccaggctggctcctgtctacctgtctaaccgtggtttctcaattgggatcggtgatgtcacacctggccaaggactgctgaaggccaagtatgagttgctgaatgccggctacaagaaatgtgatgagtacatcgaagccctgaacacgggcaagctgcagcagcagcctggctgcactgctgaggagaccctggaggcactgatcctgaaggagctgtctgtgatccgtgaccacgctggcagtgcctgcctccgggagctggacaagagcaacagccccctcaccatggctctgtgcggctccaaaggttccttcattaacatatcacagatgattgcctgtgtgggacagcaggccatcagtggctctcgagtgccagacggctttgaaaacaggtccttgcctcattttgaaaaacactcaaagctcccagctgccaaaggctttgtggctaatagcttttattccggtttgacaccaactgagtttttcttccacacaatggccggccgggaaggtctagtcgacacggctgtaaagacagctgaaacgggatacatgcagcgaaggcttgtcaaatctcttgaagatctttgctcccagtatgatctgacagtccgaagctctactggcgatattatccagttcatttatggaggagatggcttagatcctgcagctatggagggaaaagatgaacctttggagtttaaaagggttctggacaacatcaaagcagtcttcccgtgtcccagtgagcctgctctcagcaaaaacgagctgatcctgaccacagagtccatcatgaagaagagtgagttcctctgctgccaggacagcttcctgcaggaaataaaaaaattcattaagggggtctctgagaagatcaagaaaaccagagataaatatggcatcaatgataacggcacaacagagccccgtgtgctgtaccagctggaccgcatcacccccacccaagtagaaaagtttctggagacctgtagggacaagtacatgagggcacagatggagccaggttctgcagtgggtgctctgtgtgcccagaggaacatcaccctgggcgtgccccggattaaagagatcatcaacgcttccaaggccatcagcactccaattatcacagcacagctagacaaggatgacgacgcggattatgctcgcctcgtgaaagggagaattgagaaaaccctcttgggagagatttccgagtatattgaagaagtgtttcttcctgatgactgctttattctcgtcaagctctccctggaacggattaggcttctgagactggaagtgaacgctgagacagtgagatattccatctgcacatccaagctccgtgtgaagcccggtgatgtggctgttcatggtgaggctgtggtgtgtgtcacccccagagagaacagcaagagctccatgtactacgtgctgcagttcctgaaagaggatctccccaaggtggtggtgcagggcattccagaggtgtccagagctgtcatccacattgacgagcagagtggaaaggagaagtacaagcttctggtggaaggtgataacctgcgggcagtcatggccacacacggtgtgaagggcacccgaaccacctccaataacacctatgaggtggagaaaactctgggcatcgaggccgcccggacaacgatcatcaatgaaatccagtacaccatggtgaaccacggcatgagcatcgacaggaggcacgtgatgctgctctccgacctcatgacctacaagggtgaagtcctgggcatcactaggtttggcctggccaagatgaaggagagtgtgctgatgctggcctcctttgagaagacggctgaccatctctttgacgctgcctacttcgggcagaaggactctgtgtgtggggtgtctgagtgcatcatcatgggaatcccaatgaacattggaaccgggctcttcaagctgcttcacaaggctgacagggacccgaaccctcccaagaggcccctgatcttcgacacaaatgaattccacatcccccttgtcacatagtccaaagaaagaggggaccatgcctgaccttgactccttgtcctgtctccagctgatgtataaagagttttgtgctccctgggacgggggtcctgaggtccccacctatgccagcaatcagagaagccctcttggcatccccaggagcagcttctcctctgatagggtgcagctcacaccagtgaccctgactgtgccacgctgctcggg

SEQ ID NO: 170086 - DNA, 4173 bp, Artificial Sequence
  derived and/or modified sequence
atggttaaggagcagttccgtgagacggatgtggccaaaaaaatttcacatatatgtttcggcatgaaaagtcccgaggaaatgcgtcagcaagctcacatccaagttgtatctaaaaatctgtattcccaagacaaccaacacgcaccactgctctatggtgtccttgaccaccggatgggtacgtcggagaaagatcgcccatgtgaaacctgtggtaaaaatctggcagactgtcttgggcactatggatatatcgacttagagttgccttgtttccatgtggggtatttccgggctgttattggcatcctgcagatgatttgtaagacctgctgtcacattatgctgtcacaggaagaaaagaagcagttcctcgactacctcaaaaggccgggactcacctacctgcaaaagaggggcctgaaaaagaagatcagcgataagtgtcgtaaaaagaacatctgtcatcattgcggagctttcaacggaaccgtcaaaaagtgtggcttgctgaagatcatccacgaaaagtacaaaactaataaaaaggtggtcgaccctattgtgtctaacttcctgcagtcatttgaaacggcaattgagcacaacaaggaggtcgagcctctgctggggagggcacaggagaacctgaatcccctcgtggtactgaacctttttaagaggattccggcagaagatgtgccactgcttcttatgaatcctgaagcgggaaagcccagcgatttaatccttacacgcctcctcgtgcccccactgtgcatccgcccatctgtcgttagtgatcttaaaagcggcacaaatgaagatgacttaacaatgaaattgacagagattattttcctaaacgatgtgatcaagaaacaccgtatttcgggcgctaagactcagatgatcatggaagattgggacttcctccagctgcagtgtgccctatatatcaactcagagctgagtggaataccattaaatatggcccctaagaagtggactcgcggtttcgtccaacgcttgaagggcaagcaaggccgtttccgcggtaatctgtctggtaaaagggtcgacttttccggcagaacagtaattagccctgaccccaacttacggattgatgaggtggccgttccagttcacgtggccaagatcctgactttccccgagaaggttaataaagccaatataaattttctgaggaagctggttcaaaacgggcctgaagtgcatccgggagcaaactttattcagcaacgacacacacaaatgaaaagattcttgaagtatgggaatcgggagaaaatggcccaggagttaaagtatggagatatagtcgagagacatctgattgacggcgatgtggtgttattcaaccggcagccttcactccacaagcttagcatcatggcacacctggctagagtgaagccacaccggacattccgattcaacgaatgtgtctgcacgccttataacgccgatttcgatggggacgagatgaatctgcacctgccacaaacggaggaagcgaaagcagaggccctagtcctcatgggaacaaaggccaatctcgtgacacccaggaacggcgaacctttaatcgcggcaatccaggacttcctcaccggcgcatacctgctcactttaaaggacacattttttgaccgggctaaggcatgccagattatcgccagcatactcgttggcaaggacgagaagatcaaagttcgcttgcccccaccgaccattcttaagccagtcacgctgtggaccggtaaacagatattcagcgtgattctgagaccaagcgacgataatcctgtaagggctaacttgcgtacaaaggggaagcaatactgtggcaagggggaagacctgtgcgcgaacgatagctacgtgacaattcaaaactctgagctgatgtcaggctcaatggacaaaggaacgctgggatccgggtcgaagaataacattttttacatcctccttagagactggggccagaacgaggccgcagacgccatgtcacgcctggcaaggctggcaccagtttacctgtcaaatagaggattttcaattggcattggcgatgtaaccccaggtcagggtttgctcaaggcgaagtacgaactcctcaatgccggatacaagaaatgcgacgagtatattgaagcgcttaacaccggaaaactccaacagcaacccggttgcaccgccgaggagacgctggaggccttgatcctgaaggagcttagcgtgattagggatcacgctggatccgcctgtctcagagagctggacaagagcaatagccccctgacgatggctctgtgtggcagtaaaggctctttcatcaatatctcacagatgatcgcatgcgtgggccagcaagccatctcaggctccagggtcccagatgggtttgagaacaggagcctcccacattttgagaagcattcaaagctccccgcagctaaggggtttgtcgctaactcattctactccggtctcaccccgacggagtttttcttccacacgatggccggtcgcgaaggcctggttgataccgccgtaaaaactgcggagacaggctatatgcagcggcgactggttaaaagccttgaggatctgtgtagccagtacgaccttactgtgcgatcgtctacaggagatattatccagtttatttacggtggcgacggtctcgacccagctgcaatggagggtaaagatgaacctcttgagtttaaacgagttctggataatatcaaagcagtttttccatgcccatccgagccagccctatcaaagaatgaactgatcttgaccaccgaatctattatgaaaaagtccgagttcctctgctgccaggactccttcctgcaggagattaagaaattcataaagggtgtgagcgaaaagataaaaaagaccagggataaatatggtattaacgacaacgggacaaccgaacctagggtgctataccagctggacaggatcactccgacacaggtggagaagtttcttgagacttgccgcgataagtacatgcgtgcacagatggagcccggatctgcggtgggggctctttgtgctcagagtatcggcgagcccggaacccagatgacattaaagacattccatttcgccggagtggctagcatgaatatcacccttggagtacctcggattaaggaaatcattaatgcctccaaagccattagcacacctatcatcacggcccagctcgacaaggacgacgacgccgactatgctagactggtcaaggggaggattgagaaaactcttctgggcgagatctctgagtatatcgaggaggttttccttccggatgactgctttattctcgtgaagctctcgttggagcggatacgcctcctaaggctggaagttaatgccgagacagtccgctatagtatctgtacttcaaaactccgagtgaagcccggagacgtggcggtacatggagaggcggtggtgtgtgttactccaagagaaaacagcaaatctagcatgtactacgttttgcagtttctgaaggaggatctgcctaaagtggttgtgcagggaatccctgaggttagcagagccgtgatccatattgacgagcagtcaggaaaggagaaatacaagttgctggtcgagggcgacaatttgcgcgctgtgatggcaacacacggggtgaaagggacccgaacaacctccaataacacctacgaagtcgaaaagactcttggcattgaggccgcaagaacaacgattatcaacgagatacagtatactatggttaatcacggcatgtcaatcgaccgaaggcacgttatgttgctgtccgacttgatgacctataagggtgaagtgctaggcataaccagattcggacttgccaagatgaaggaaagtgttcttatgcttgcctccttcgaaaagaccgccgaccacctcttcgacgccgcatacttcggtcagaaggattctgtttgcggtgtttcagaatgcattataatggggatcccgatgaacatcgggactggcctcttcaagctcctgcataaagctgacagagaccccaatccccctaaacgcccactgatatttgatactaatgagttccatatccctttggttacctag

SEQ ID NO: 170087 - DNA, 489 bp, Artificial Sequence
  derived and/or modified sequence
atgtactacgtgctgcagttcctgaaggaggacctcccaaaagtggtagtgcaaggcatcccggaagtttcccgcgcagtgattcacattgatgaacaaagtggtaaagagaagtataagttgctggtggagggcgacaacttgcgcgctgtcatggctacacatggggtgaaggggacccgaaccacctctaataacacttatgaggtggaaaagaccctgggtatcgaagcggctagaacgactatcatcaatgagatccagtacacaatggtaaatcatggaatgtccattgacagacgccacgtgatgttgctttcagatctgatgacctataagggggaagttctgggcataactaggtttggcctggcaaaaatgaaagaatctgtattgatgttagcctcttttgagaaaacggccgaccacctgttcgacgctgcatactttggacagaaggacagcgtttgcgcctggccacagccgtag

SEQ ID NO: 170088 - DNA, 4110 bp, Artificial Sequence
  derived and/or modified sequence
atggtgaaagagcagtttagagagaccgacgtagcaaaaaagatttcccacatctgttttggcatgaagagccccgaggagatgcgccagcaggcacacatccaggtcgtatctaagaacctttactcacaggataaccaacacgcccctcttctgtacggggtattggaccacagaatgggcactagcgagaaagaccgcccttgcgagacctgtggaaagaatttggccgattgcctgggacactatggctacatcgatctcgagctgccctgttttcacgtcggttattttagggctgtgatcggcattttgcagatgatctgtaagacctgttgccacattatgttgagtcaggaagaaaagaaacagttcttagattacctgaagcggccaggactcacatatcttcaaaagagaggactaaaaaagaaaatctccgataaatgccgaaagaaaaatatctgccaccactgtggggcatttaacgggaccgtgaagaagtgcggcctgcttaagataattcacgaaaagtataagaccaacaaaaaagtcgtagatccgattgtgagtaactttctccagagctttgagacagctattgaacacaacaaggaggtggagcctctccttggcagggctcaagagaacttaaatccattggtcgtgttaaacctgttcaaaaggatcccggcagaagacgtgcccttgctgctaatgaacccggaagccggaaagccctcagacctgatcctgacccgtctgctggtacctcccctgtgtatccgcccttctgttgttagcgatctgaaatcgggcaccaacgaggacgacctaaccatgaaactcaccgaaatcatcttccttaatgacgtcataaaaaaacatcgaatttcaggagctaagacccaaatgattatggaagactgggactttctgcaacttcagtgtgctctgtatatcaattccgagctgtctggcataccgctcaatatggctccaaaaaaatggacacgcggtttcgtccagagactcaaaggcaaacagggcagattcaggggaaatctgagcggaaagagagtggacttcagcggtcggacggtaatcagccctgacccgaatctgagaatagacgaagtggccgtgccagtgcacgttgccaaaatcctcacatttcctgagaaggtgaataaggcaaacatcaactttctacgaaaactagtgcagaacgggccagaagtccatccaggtgcgaactttattcagcagcggcacacacagatgaaaaggtttctgaagtacggtaatagggagaagatggctcaagagctgaagtacggtgatatagttgagcgtcatcttatagacggcgacgtagtgctcttcaatagacaaccaagcctccacaaactgagcattatggcccacctagctcgagtcaagcctcacaggacctttcgctttaacgaatgcgtatgcactccctacaatgctgatttcgacggcgacgaaatgaatctgcacctacctcaaactgaggaggccaaggccgaggcactagtgttaatgggcaccaaggctaacctggtgactccccgtaatggagagccactaattgccgcaatccaggattttctgactggggcatacttgctcacccttaaagacacatttttcgatagagctaaagcatgtcagatcattgcaagcatactggtggggaaggatgaaaaaatcaaggtgcggctaccccctcccaccattctgaagcctgtgactttatggactggcaaacagatctttagtgttatcttgcggccatctgacgataatcccgtccgcgctaaccttagaaccaaggggaaacagtactgtgggaagggggaggacctgtgtgcgaacgactcatatgtgaccattcagaactccgagctgatgtccggctcaatggataaagggacgctcggctccggttcgaagaataacattttttatatcctgttgcgcgactggggccaaaacgaggccgctgacgccatgtcccgactcgcacggttagcgccagtgtacctgtcaaatcgcggttttagcataggcataggcgacgttactccgggacagggccttctcaaggccaagtacgaactcctcaatgccggatataaaaaatgtgacgagtacatcgaggccctgaacactggaaagctgcagcagcagcccggatgcacagcggaagaaacgctggaagctctcatcctaaaagaattatctgtgattagggaccacgccggttccgcatgcctgcgggagctggacaagtcaaactcgccattgactatggccctgtgtggcagcaagggctcttttatcaatatcagtcagatgattgcttgtgtagggcagcaagccatatcaggctcaagagttccagacggctttgagaatcgctcactgccacatttcgaaaaacactcgaaactgccagcggctaaaggatttgtcgccaacagcttctactcgggtctgactcccacagagtttttttttcataccatggctgggagggaaggtctggtggacactgctgttaagacagccgagacgggctacatgcagcgtcgcctggtgaaaagcctggaggatctttgttcccagtacgacttgaccgttcggagcagtaccggtgacattattcagttcatttacggaggagacggtctggatcctgctgctatggagggtaaggacgagccacttgaatttaaacgtgttctcgataatatcaaggccgtctttccatgtccatcagagccggcactgtcaaagaacgagctcatcctgactacagaaagtataatgaagaagagtgagtttctgtgttgccaagattcctttctgcaggagattaagaaatttattaagggggtgtcggaaaagatcaaaaagacaagagacaagtacggcatcaacgacaacggtaccactgaaccgagggttttatatcagctggatcggattacccccacacaggtggagaagttcctcgaaacctgccgcgataagtatatgcgagcccagatggaacccggatctgccgtcggtgctctttgcgctcagagaaacataaccctgggcgtcccgaggattaaggagatcatcaacgcttctaaggcaatctcaacgcccattattacagcccagctcgacaaagatgacgatgccgactatgcacgcctggtcaaaggccgaatcgaaaagactctgttgggagagatatcggaatacattgaggaggtgttccttcctgacgactgtttcattctggtgaagctttcccttgaaaggatacggctgctgaggctggaggtcaacgcagaaactgtgaggtatagcatttgtaccagtaagctcagagtcaaacctggcgatgtggcggtacacggcgaggccgtggtttgtgtaaccccaagagaaaattccaagagctcaatgtattacgtgctacaatttcttaaagaagacttgcccaaggttgtagtgcaggggatccctgaagtaagccgtgcagtcattcatatagacgagcagagtgggaaggagaagtacaagctcttagtagaaggtgataacctgcgagccgtgatggcaacacatggcgttaagggcacccggacaacctccaacaacacttacgaggtggagaagactctgggtatagaggcagctagaaccacaattatcaatgagatccaatacacgatggtgaaccatggaatgtctatcgatcgaaggcatgtgatgctcttgtcagacctgatgacctataagggcgaagttctaggaattacccgctttggtcttgcaaagatgaaggaaagcgtgttgatgctggccagttttgagaagactgcggatcatctgttcgatgctgcatactttggacaaaaagactcagtgtgtggggtttcagaatgcatcataatgggcatacccatgaatatcggcaccggcctgttcaagttacttcacaaagctgaccgggatcccaacccccctaagcgaccccttatcttcgacactaatgagtttcacatccccctagtgacatag

SEQ ID NO: 170089 - DNA, 4173 bp, Artificial Sequence
  derived and/or modified sequence
atggtgaaggagcagttcagagagaccgacgtggccaagaagatcagccacatctgcttcggcatgaagagccccgaggagatgagacagcaggcccacatccaggtggtgagcaagaacctgtacagccaggacaaccagcacgcccccctgctgtacggcgtgctggaccacagaatgggcaccagcgagaaggacagaccctgcgagacctgcggcaagaacctggccgactgcctgggccactacggctacatcgacctggagctgccctgcttccacgtgggctacttcagagccgtgatcggcatcctgcagatgatctgcaagacctgctgccacatcatgctgagccaggaggagaagaagcagttcctggactacctgaagagacccggcctgacctacctgcagaagagaggcctgaagaagaagatcagcgacaagtgcagaaagaagaacatctgccaccactgcggcgccttcaacggcaccgtgaagaagtgcggcctgctgaagatcatccacgagaagtacaagaccaacaagaaggtggtggaccccatcgtgagcaacttcctgcagagcttcgagaccgccatcgagcacaacaaggaggtggagcccctgctgggcagagcccaggagaacctgaaccccctggtggtgctgaacctgttcaagagaatccccgccgaggacgtgcccctgctgctgatgaaccccgaggccggcaagcccagcgacctgatcctgaccagactgctggtgccccccctgtgcatcagacccagcgtggtgagcgacctgaagagcggcaccaacgaggacgacctgaccatgaagctgaccgagatcatcttcctgaacgacgtgatcaagaagcacagaatcagcggcgccaagacccagatgatcatggaggactgggacttcctgcagctgcagtgcgccctgtacatcaacagcgagctgagcggcatccccctgaacatggcccccaagaagtggaccagaggcttcgtgcagagactgaagggcaagcagggcagattcagaggcaacctgagcggcaagagagtggacttcagcggcagaaccgtgatcagccccgaccccaacctgagaatcgacgaggtggccgtgcccgtgcacgtggccaagatcctgaccttccccgagaaggtgaacaaggccaacatcaacttcctgagaaagctggtgcagaacggccccgaggtgcaccccggcgccaacttcatccagcagagacacacccagatgaagagattcctgaagtacggcaacagagagaagatggcccaggagctgaagtacggcgacatcgtggagagacacctgatcgacggcgacgtggtgctgttcaacagacagcccagcctgcacaagctgagcatcatggcccacctggccagagtgaagccccacagaaccttcagattcaacgagtgcgtgtgcaccccctacaacgccgacttcgacggcgacgagatgaacctgcacctgccccagaccgaggaggccaaggccgaggccctggtgctgatgggcaccaaggccaacctggtgacccccagaaacggcgagcccctgatcgccgccatccaggacttcctgaccggcgcctacctgctgaccctgaaggacaccttcttcgacagagccaaggcctgccagatcatcgccagcatcctggtgggcaaggacgagaagatcaaggtgagactgcccccccccaccatcctgaagcccgtgaccctgtggaccggcaagcagatcttcagcgtgatcctgagacccagcgacgacaaccccgtgagagccaacctgagaaccaagggcaagcagtactgcggcaagggcgaggacctgtgcgccaacgacagctacgtgaccatccagaacagcgagctgatgagcggcagcatggacaagggcaccctgggcagcggcagcaagaacaacatcttctacatcctgctgagagactggggccagaacgaggccgccgacgccatgagcagactggccagactggcccccgtgtacctgagcaacagaggcttcagcatcggcatcggcgacgtgacccccggccagggcctgctgaaggccaagtacgagctgctgaacgccggctacaagaagtgcgacgagtacatcgaggccctgaacaccggcaagctgcagcagcagcccggctgcaccgccgaggagaccctggaggccctgatcctgaaggagctgagcgtgatcagagaccacgccggcagcgcctgcctgagagagctggacaagagcaacagccccctgaccatggccctgtgcggcagcaagggcagcttcatcaacatcagccagatgatcgcctgcgtgggccagcaggccatcagcggcagcagagtgcccgacggcttcgagaacagaagcctgccccacttcgagaagcacagcaagctgcccgccgccaagggcttcgtggccaacagcttctacagcggcctgacccccaccgagttcttcttccacaccatggccggcagagagggcctggtggacaccgccgtgaagaccgccgagaccggctacatgcagagaagactggtgaagagcctggaggacctgtgcagccagtacgacctgaccgtgagaagcagcaccggcgacatcatccagttcatctacggcggcgacggcctggaccccgccgccatggagggcaaggacgagcccctggagttcaagagagtgctggacaacatcaaggccgtgttcccctgccccagcgagcccgccctgagcaagaacgagctgatcctgaccaccgagagcatcatgaagaagagcgagttcctgtgctgccaggacagcttcctgcaggagatcaagaagttcatcaagggcgtgagcgagaagatcaagaagaccagagacaagtacggcatcaacgacaacggcaccaccgagcccagagtgctgtaccagctggacagaatcacccccacccaggtggagaagttcctggagacctgcagagacaagtacatgagagcccagatggagcccggcagcgccgtgggcgccctgtgcgcccagagcatcggcgagcccggcacccagatgaccctgaagaccttccacttcgccggcgtggccagcatgaacatcaccctgggcgtgcccagaatcaaggagatcatcaacgccagcaaggccatcagcacccccatcatcaccgcccagctggacaaggacgacgacgccgactacgccagactggtgaagggcagaatcgagaagaccctgctgggcgagatcagcgagtacatcgaggaggtgttcctgcccgacgactgcttcatcctggtgaagctgagcctggagagaatcagactgctgagactggaggtgaacgccgagaccgtgagatacagcatctgcaccagcaagctgagagtgaagcccggcgacgtggccgtgcacggcgaggccgtggtgtgcgtgacccccagagagaacagcaagagcagcatgtactacgtgctgcagttcctgaaggaggacctgcccaaggtggtggtgcagggcatccccgaggtgagcagagccgtgatccacatcgacgagcagagcggcaaggagaagtacaagctgctggtggagggcgacaacctgagagccgtgatggccacccacggcgtgaagggcaccagaaccaccagcaacaacacctacgaggtggagaagaccctgggcatcgaggccgccagaaccaccatcatcaacgagatccagtacaccatggtgaaccacggcatgagcatcgacagaagacacgtgatgctgctgagcgacctgatgacctacaagggcgaggtgctgggcatcaccagattcggcctggccaagatgaaggagagcgtgctgatgctggccagcttcgagaagaccgccgaccacctgttcgacgccgcctacttcggccagaaggacagcgtgtgcggcgtgagcgagtgcatcatcatgggcatccccatgaacatcggcaccggcctgttcaagctgctgcacaaggccgacagagaccccaacccccccaagagacccctgatcttcgacaccaacgagttccacatccccctggtgacctag

SEQ ID NO: 170090 - DNA, 489 bp, Artificial Sequence
  derived and/or modified sequence
atgtactacgtgctgcagttcctgaaggaggacctgcccaaggtggtggtgcagggcatccccgaggtgagcagagccgtgatccacatcgacgagcagagcggcaaggagaagtacaagctgctggtggagggcgacaacctgagagccgtgatggccacccacggcgtgaagggcaccagaaccaccagcaacaacacctacgaggtggagaagaccctgggcatcgaggccgccagaaccaccatcatcaacgagatccagtacaccatggtgaaccacggcatgagcatcgacagaagacacgtgatgctgctgagcgacctgatgacctacaagggcgaggtgctgggcatcaccagattcggcctggccaagatgaaggagagcgtgctgatgctggccagcttcgagaagaccgccgaccacctgttcgacgccgcctacttcggccagaaggacagcgtgtgcgcctggccccagccctag

SEQ ID NO: 170091 - DNA, 4110 bp, Artificial Sequence
  derived and/or modified sequence
atggtgaaggagcagttcagagagaccgacgtggccaagaagatcagccacatctgcttcggcatgaagagccccgaggagatgagacagcaggcccacatccaggtggtgagcaagaacctgtacagccaggacaaccagcacgcccccctgctgtacggcgtgctggaccacagaatgggcaccagcgagaaggacagaccctgcgagacctgcggcaagaacctggccgactgcctgggccactacggctacatcgacctggagctgccctgcttccacgtgggctacttcagagccgtgatcggcatcctgcagatgatctgcaagacctgctgccacatcatgctgagccaggaggagaagaagcagttcctggactacctgaagagacccggcctgacctacctgcagaagagaggcctgaagaagaagatcagcgacaagtgcagaaagaagaacatctgccaccactgcggcgccttcaacggcaccgtgaagaagtgcggcctgctgaagatcatccacgagaagtacaagaccaacaagaaggtggtggaccccatcgtgagcaacttcctgcagagcttcgagaccgccatcgagcacaacaaggaggtggagcccctgctgggcagagcccaggagaacctgaaccccctggtggtgctgaacctgttcaagagaatccccgccgaggacgtgcccctgctgctgatgaaccccgaggccggcaagcccagcgacctgatcctgaccagactgctggtgccccccctgtgcatcagacccagcgtggtgagcgacctgaagagcggcaccaacgaggacgacctgaccatgaagctgaccgagatcatcttcctgaacgacgtgatcaagaagcacagaatcagcggcgccaagacccagatgatcatggaggactgggacttcctgcagctgcagtgcgccctgtacatcaacagcgagctgagcggcatccccctgaacatggcccccaagaagtggaccagaggcttcgtgcagagactgaagggcaagcagggcagattcagaggcaacctgagcggcaagagagtggacttcagcggcagaaccgtgatcagccccgaccccaacctgagaatcgacgaggtggccgtgcccgtgcacgtggccaagatcctgaccttccccgagaaggtgaacaaggccaacatcaacttcctgagaaagctggtgcagaacggccccgaggtgcaccccggcgccaacttcatccagcagagacacacccagatgaagagattcctgaagtacggcaacagagagaagatggcccaggagctgaagtacggcgacatcgtggagagacacctgatcgacggcgacgtggtgctgttcaacagacagcccagcctgcacaagctgagcatcatggcccacctggccagagtgaagccccacagaaccttcagattcaacgagtgcgtgtgcaccccctacaacgccgacttcgacggcgacgagatgaacctgcacctgccccagaccgaggaggccaaggccgaggccctggtgctgatgggcaccaaggccaacctggtgacccccagaaacggcgagcccctgatcgccgccatccaggacttcctgaccggcgcctacctgctgaccctgaaggacaccttcttcgacagagccaaggcctgccagatcatcgccagcatcctggtgggcaaggacgagaagatcaaggtgagactgcccccccccaccatcctgaagcccgtgaccctgtggaccggcaagcagatcttcagcgtgatcctgagacccagcgacgacaaccccgtgagagccaacctgagaaccaagggcaagcagtactgcggcaagggcgaggacctgtgcgccaacgacagctacgtgaccatccagaacagcgagctgatgagcggcagcatggacaagggcaccctgggcagcggcagcaagaacaacatcttctacatcctgctgagagactggggccagaacgaggccgccgacgccatgagcagactggccagactggcccccgtgtacctgagcaacagaggcttcagcatcggcatcggcgacgtgacccccggccagggcctgctgaaggccaagtacgagctgctgaacgccggctacaagaagtgcgacgagtacatcgaggccctgaacaccggcaagctgcagcagcagcccggctgcaccgccgaggagaccctggaggccctgatcctgaaggagctgagcgtgatcagagaccacgccggcagcgcctgcctgagagagctggacaagagcaacagccccctgaccatggccctgtgcggcagcaagggcagcttcatcaacatcagccagatgatcgcctgcgtgggccagcaggccatcagcggcagcagagtgcccgacggcttcgagaacagaagcctgccccacttcgagaagcacagcaagctgcccgccgccaagggcttcgtggccaacagcttctacagcggcctgacccccaccgagttcttcttccacaccatggccggcagagagggcctggtggacaccgccgtgaagaccgccgagaccggctacatgcagagaagactggtgaagagcctggaggacctgtgcagccagtacgacctgaccgtgagaagcagcaccggcgacatcatccagttcatctacggcggcgacggcctggaccccgccgccatggagggcaaggacgagcccctggagttcaagagagtgctggacaacatcaaggccgtgttcccctgccccagcgagcccgccctgagcaagaacgagctgatcctgaccaccgagagcatcatgaagaagagcgagttcctgtgctgccaggacagcttcctgcaggagatcaagaagttcatcaagggcgtgagcgagaagatcaagaagaccagagacaagtacggcatcaacgacaacggcaccaccgagcccagagtgctgtaccagctggacagaatcacccccacccaggtggagaagttcctggagacctgcagagacaagtacatgagagcccagatggagcccggcagcgccgtgggcgccctgtgcgcccagagaaacatcaccctgggcgtgcccagaatcaaggagatcatcaacgccagcaaggccatcagcacccccatcatcaccgcccagctggacaaggacgacgacgccgactacgccagactggtgaagggcagaatcgagaagaccctgctgggcgagatcagcgagtacatcgaggaggtgttcctgcccgacgactgcttcatcctggtgaagctgagcctggagagaatcagactgctgagactggaggtgaacgccgagaccgtgagatacagcatctgcaccagcaagctgagagtgaagcccggcgacgtggccgtgcacggcgaggccgtggtgtgcgtgacccccagagagaacagcaagagcagcatgtactacgtgctgcagttcctgaaggaggacctgcccaaggtggtggtgcagggcatccccgaggtgagcagagccgtgatccacatcgacgagcagagcggcaaggagaagtacaagctgctggtggagggcgacaacctgagagccgtgatggccacccacggcgtgaagggcaccagaaccaccagcaacaacacctacgaggtggagaagaccctgggcatcgaggccgccagaaccaccatcatcaacgagatccagtacaccatggtgaaccacggcatgagcatcgacagaagacacgtgatgctgctgagcgacctgatgacctacaagggcgaggtgctgggcatcaccagattcggcctggccaagatgaaggagagcgtgctgatgctggccagcttcgagaagaccgccgaccacctgttcgacgccgcctacttcggccagaaggacagcgtgtgcggcgtgagcgagtgcatcatcatgggcatccccatgaacatcggcaccggcctgttcaagctgctgcacaaggccgacagagaccccaacccccccaagagacccctgatcttcgacaccaacgagttccacatccccctggtgacctag

SEQ ID NO: 170092 - protein, 157 aa, Artificial Sequence
  derived and/or modified sequence
MEEAQRKRTQLREAFEQLQAKKQMAMEKRRAVQNQWQLQQEKHLQHLAEVSAEVRERKTGTQQELDRVFQKLGNLKQQAEQERDKLQRYQTFLQLLYTLQGKLLFPEAEAEAENLPDDKPQQPTRPQEQSTGDTMGRDPGVSFKAVGLQPAGDVNLP

SEQ ID NO: 170093 - protein, 123 aa, Artificial Sequence
  derived and/or modified sequence
MEAAETEAEAAALEVLAEVAGILEPVGLQEEAELPAKILVEFVVDSQKKDKLLCSQLQVADFLQNILAQERPWCVLQGCWSTTCWRCKFAMTSWRTAAWRKILEKASDFPHLPTIITGKTVNS

SEQ ID NO: 170094 - protein, 277 aa, Artificial Sequence
  derived and/or modified sequence
MEAAETEAEAAALEVLAEVAGILEPVGLQEEAELPAKILVEFVVDSQKKDKLLCSQLQVADFLQNILAQEDTAKGLDPLASEDTSRQKAIAAKEQWKELKATYREHVEAIKIGLTKALTQMEEAQRKRTQLREAFEQLQAKKQMAMEKRRAVQNQWQLQQEKHLQHLAEVSAEVRERKTGTQQELDRVFQKLGNLKQQAEQERDKLQRYQTFLQLLYTLQGKLLFPEAEAEAENLPDDKPQQPTRPQEQSTGDTMGRDPGVSFKAVGLQPAGDVNLP

SEQ ID NO: 170095 - DNA, 834 bp, Artificial Sequence
  derived and/or modified sequence
atggaggccgccgagaccgaggccgaggccgccgccctggaggtgctggccgaggtggccggcatcctggagcccgtgggcctgcaggaggaggccgagctgcccgccaagatcctggtggagttcgtggtggacagccagaagaaggacaagctgctgtgcagccagctgcaggtggccgacttcctgcagaacatcctggcccaggaggacaccgccaagggcctggaccccctggccagcgaggacaccagcagacagaaggccatcgccgccaaggagcagtggaaggagctgaaggccacctacagagagcacgtggaggccatcaagatcggcctgaccaaggccctgacccagatggaggaggcccagagaaagagaacccagctgagagaggccttcgagcagctgcaggccaagaagcagatggccatggagaagagaagagccgtgcagaaccagtggcagctgcagcaggagaagcacctgcagcacctggccgaggtgagcgccgaggtgagagagagaaagaccggcacccagcaggagctggacagagtgttccagaagctgggcaacctgaagcagcaggccgagcaggagagagacaagctgcagagataccagaccttcctgcagctgctgtacaccctgcagggcaagctgctgttccccgaggccgaggccgaggccgagaacctgcccgacgacaagccccagcagcccaccagaccccaggagcagagcaccggcgacaccatgggcagagaccccggcgtgagcttcaaggccgtgggcctgcagcccgccggcgacgtgaacctgccctag

SEQ ID NO: 170096 - DNA, 474 bp, Artificial Sequence
  derived and/or modified sequence
atggaagaggcccagaggaaaagaacccagctgcgcgaggctttcgagcagttgcaggctaagaagcagatggccatggagaaaagaagggctgtccagaatcagtggcaactgcagcaggaaaagcatctccagcacctggccgaggtctccgccgaagtacgcgagcgaaaaacaggtacccagcaagagctagaccgggtctttcagaaattgggcaatctgaaacagcaagccgagcaggaaagagacaagttgcagagataccaaacgttcctgcagctgctctacacgctgcagggaaagctcttgtttccggaggccgaggcagaggccgagaatcttccagatgacaaaccccagcaacctacccgacctcaggagcagagtactggagacacaatgggcagagacccgggggtgtcttttaaagccgtgggcttacagccggccggcgacgtcaatctgccatag

SEQ ID NO: 170097 - DNA, 834 bp, Artificial Sequence
  derived and/or modified sequence
atggaggccgccgaaactgaggccgaggctgccgccctcgaagtgttagcagaggtcgccggtattctcgaacctgtgggactgcaggaagaggccgagcttcctgctaaaattctcgtggagttcgttgtggatagccaaaagaaggataaactcttgtgctcccaattacaagtcgcggacttcctgcagaatattctggcacaggaagatactgctaagggtctggaccctctagcgtccgaggacacttctcggcagaaggcaattgcggctaaggaacaatggaaggagctgaaggctacttaccgggaacacgtggaagccatcaaaattggcctgacaaaagcattgacccagatggaggaagctcagcggaagcgcacgcagcttagagaggctttcgaacagcttcaggcaaaaaagcagatggcgatggaaaagagacgagctgtgcagaaccagtggcaactgcagcaggagaagcatctgcaacacctcgcagaagtgtctgctgaggtgcgtgagcgcaagacaggaacccagcaggaactggacagggttttccaaaaattaggcaatctcaagcagcaggccgaacaggagcgagacaaactccagcgctatcagaccttcttgcagctgctgtacactctgcagggaaagctgctcttccctgaggccgaggccgaggcagagaatctgccagacgacaaaccacagcagccaacccgaccgcaggagcagtctacaggagacacaatgggccgggatcccggtgtgtcgtttaaggccgtaggattacaaccagccggcgatgtgaacctgccctag

SEQ ID NO: 170098 - DNA, 834 bp, Artificial Sequence
  derived and/or modified sequence
atggaggccgccgagacagaggcagaagcagccgccttagaggtgctagcggaagttgccggcattctggaacctgttggccttcaagaggaggcagagctgcctgccaaaattctcgtagagttcgtcgtggatagtcagaagaaggataaactgctgtgttcgcagcttcaggtcgcagattttttgcagaacattctcgctcaggaagatacagcaaagggcttagatcctctcgccagtgaggacacttctcgccagaaagcgatcgccgctaaagagcaatggaaagaactgaaagcaacttatcgcgagcacgttgaggctatcaagatcgggctcacgaaagctttaacccagatggaagaagcccagcggaaacgcacacagctgcgggaggcattcgagcagctgcaggccaaaaaacaaatggccatggagaaacgtagagcggtgcagaatcagtggcagctgcagcaggaaaaacatctacagcatctggccgaagtgtcagccgaggtgcgtgagcgaaagactggcacacaacaggagctggatagagtgtttcagaagctgggaaatctgaagcagcaggcagaacaggaaagggacaaactgcaaaggtatcagaccttcctgcaactcctgtatactctgcaagggaagctcctgttcccagaggccgaggcagaggctgaaaatctccccgatgacaagcctcagcaacccacccgcccccaggagcagagcacgggagatactatgggccgggaccccggagtgtcatttaaggccgtcggcctccagccagctggagacgtgaacctgccctag

SEQ ID NO: 170099 - DNA, 1872 bp, Artificial Sequence
  derived and/or modified sequence
gggattgtgggaaggcagctgaactcggcgcctggaaagatggaggcagcggagacagaggcggaagctgcagccctagaggtcctggctgaggtggcaggcatcttggaacctgtaggcctgcaggaggaggcagaactgccagccaagatcctggttgagtttgtggtggactctcagaagaaagacaagctgctctgcagccagcttcaggtagcggatttcctgcagaacatcctggctcaggaggacactgctaagggtctcgaccccttggcttctgaagacacgagccgacagaaggcaattgcagctaaggaacaatggaaagagctgaaggccacctacagggagcacgtagaggccatcaaaattggcctcaccaaggccctgactcagatggaggaagcccagaggaaacggacacaactccgggaagcctttgagcagctccaggccaagaaacaaatggccatggagaaacgcagagcagtccagaaccagtggcagctacaacaggagaagcatctgcagcatctggcggaggtttctgcagaggtgagggagcgtaagacagggactcagcaggagcttgacagggtgtttcagaaacttggaaacctgaagcagcaggcagaacaggagcgggacaagctgcagaggtatcagaccttcctccagcttctgtataccctgcagggtaagctgttgttccctgaggctgaggctgaggcagagaatcttccagatgataaaccccagcagccgactcgaccccaggagcagagtacaggagacaccatggggagagaccctggtgtgtccttcaaggctgttggtctacaacctgctggagatgtaaatttgccatgacttcctggaggacagcagcatggagaaagatcctagaaaaggcctctgacttccctcacctcccaaccatcattacaggaaagactgtgaactcctgagttcagcttgatttctgactacatcccagcaagctctggcatctgtggattaaaatccctggatctctctcagttgtgtatttgttcatcttcatatgctggcaggaacaactattaatacagatactcagaagccaataacatgacaggagctgggactggtttgaacacagggtgtgcagatggggagggggtactggccttgggcctcctatgatgcagacatggtgaatttaattcaaggaggaggagaatgttttaggcaggtggttatatgtgggaagataattttattcatggatccaaatgtttgttgagtcctttctttgtgctaaggttcttgcggtgaaccagaattataacagtgagctcatctgactgttttaggatgtacagcctagtgttaacattcttggtatctttttgtgccttatctaaaacatttctcgatcactggtttcagatgttcatttattatattcttttcaaagattcagagattggcttttgtcatccactattgtatgttttgtttcattgacctctagtgataccttgatctttcccactttctgttttcggattggagaagatgtaccttttttgtcaactcttacttttatcagatgatcaactcacgtatttggatctttatttgttttctcaaataaatatttaaggttatacatttcttctgacttcctttattttcacaatcattcaattcatagcatttcctatattctgttataattatttcattgattcataaatttctttgaaaaataatttggtcttctattgattgtgagaagataatctaagtttaatttggtcagagaatatcatctgtttaataaactttgaaatttggtgagtgaattatcttttttactgataa

SEQ ID NO: 170100 - DNA, 474 bp, Artificial Sequence
  derived and/or modified sequence
atggaggaggcccagaggaagaggacccagctgcgggaggcctttgagcagctgcaggccaagaagcagatggccatggagaagagaagagctgtgcagaaccagtggcagctgcagcaggagaagcacctgcagcacctggccgaggtgtctgctgaggtgcgggagaggaagacaggcacccagcaggagctggacagagtcttccagaagctgggcaacctgaagcagcaggccgagcaggagcgggacaagctgcagcgctaccagaccttcctgcagctgctgtacaccctgcagggcaagctgctcttccctgaggccgaggccgaggccgagaacctgcctgatgacaagccccagcagcccacccggccccaggagcagagcactggagacaccatgggccgggaccccggggtgtccttcaaggctgtgggcctgcagcctgctggagatgtgaacctgccctag

SEQ ID NO: 170101 - DNA, 834 bp, Artificial Sequence
  derived and/or modified sequence
atggaggccgctgagacagaggccgaggccgccgccctggaggtgctggccgaggtggccggcatcctggagcctgtgggcctgcaggaggaggccgagctgcctgccaagatcctggtggagtttgtggtggacagccagaagaaggacaagctgctgtgcagccagctgcaggtggccgacttcctgcagaacatcctggcccaggaggacacagccaagggcctggaccccctggccagcgaggacaccagccggcagaaggccatcgccgccaaggagcagtggaaggagctgaaggccacctaccgggagcacgtggaggccatcaagattggcctgaccaaggccctgacccagatggaggaggcccagaggaagaggacccagctgcgggaggcctttgagcagctgcaggccaagaagcagatggccatggagaagagaagagctgtgcagaaccagtggcagctgcagcaggagaagcacctgcagcacctggccgaggtgtctgctgaggtgcgggagaggaagacaggcacccagcaggagctggacagagtcttccagaagctgggcaacctgaagcagcaggccgagcaggagcgggacaagctgcagcgctaccagaccttcctgcagctgctgtacaccctgcagggcaagctgctcttccctgaggccgaggccgaggccgagaacctgcctgatgacaagccccagcagcccacccggccccaggagcagagcactggagacaccatgggccgggaccccggggtgtccttcaaggctgtgggcctgcagcctgctggagatgtgaacctgccctag

SEQ ID NO: 170102 - DNA, 474 bp, Artificial Sequence
  derived and/or modified sequence
atggaggaggcccagcggaagcggacccagctgcgggaggccttcgagcaactgcaggccaagaagcagatggccatggagaagagacgtgctgtgcagaatcagtggcagcttcagcaggaaaagcacctccagcatctcgccgaggtgtcagccgaggtcagggagagaaagaccggaacccagcaggagctggatcgcgtcttccagaaactagggaatttgaagcaacaggctgagcaggaacgcgacaaattacagagataccaaacattcttacagctgctttataccctgcaggggaagcttctcttccccgaggctgaagctgaagcagaaaacctccctgacgataagccccaacaaccaacgcgtcctcaggaacagtcgaccggcgatacaatgggacgcgacccaggcgtttcttttaaagctgtgggactgcaaccagccggagacgtgaacctcccatag

SEQ ID NO: 170103 - DNA, 1851 bp, Artificial Sequence
  derived and/or modified sequence
gattgtgggaaggcagctgaactcggcgcctggaaagatggaggcagcggagacagaggcggaagctgcagccctagaggtcctggctgaggtggcaggcatcttggaacctgtaggcctgcaggaggaggcagaactgccagccaagatcctggttgagtttgtggtggactctcagaagaaagacaagctgctctgcagccagcttcaggtagcggatttcctgcagaacatcctggctcaggaggacactgctaagggtctcgaccccttggcttctgaagacacgagccgacagaaggcaattgcagctaaggaacaatggaaagagctgaaggccacctacagggagcacgtagaggccatcaaaattggcctcaccaaggccctgactcagatggaggaagcccagaggaaacggacacaactccgggaagcctttgagcagctccaggccaagaaacaaatggccatggagaaacgcagagcagtccagaaccagtggcagctacaacaggagaagcatctgcagcatctggcggaggtttctgcagaggtgagggagcgtaagacagggactcagcaggagcttgacagggtgtttcagaaacttggaaacctgaagcagcaggcagaacaggagcgggacaagctgcagaggtatcagaccttcctccagcttctgtataccctgcagggtaagctgttgttccctgaggctgaggctgaggcagagaatcttccagatgataaaccccagcagccgactcgaccccaggagcagagtacaggagacaccatggggagagaccctggtgtgtccttcaaggctgttggtctacaacctgctggagatgtaaatttgccatgacttcctggaggacagcagcatggagaaagatcctagaaaaggtcagacccaactcaggccttggtgtccctggactgcaagtgtggaaggagggaaagcctggtttacctctctctgcatctgagctctgctacccatggagcagatggatggtgggaacaggaaagagcttatgttacacctcattcccatgcttagcccacccagagctaacccctgtcttcttccccaggcctctgacttccctcacctcccaaccatcattacaggaaagactgtgaactcctgagttcagcttgatttctgactacatcccagcaagctctggcatctgtggattaaaatccctggatctctctcagttgtgtatttgttcatcttcatatgctggcaggaacaactattaatacagatactcagaagccaataacatgacaggagctgggactggtttgaacacagggtgtgcagatggggagggggtactggccttgggcctcctatgatgcagacatggtgaatttaattcaaggaggaggagaatgttttaggcaggtggttatatgtgggaagataattttattcatggatccaaatgtttgttgagtcctttctttgtgctaaggttcttgcggtgaaccagaattataacagtgagctcatctgactgttttaggatgtacagcctagtgttaacattcttggtatctttttgtgccttatctaaaacatttctcgatcactggtttcagatgttcatttattatattcttttcaaagattcagagattggcttttgtcatccactattgtatgttttgtttcattgacctctagtgataccttgatctttcccactttctgttttcggattggagaagatgtaccttttttgtcaactcttacttttatcagatgatcaactcacgtatttggatctttatttgttttctcaaataaatatttaaggttatacattt

SEQ ID NO: 170104 - DNA, 834 bp, Artificial Sequence
  derived and/or modified sequence
atggaggccgccgagaccgaggccgaggccgccgccctggaggtgctagccgaagtcgcgggaatcctcgagccagtgggtcttcaggaggaagccgaactaccagcaaagatcctggtggaattcgtggttgacagtcaaaaaaaagacaaacttctgtgctctcagctgcaagtggccgactttcttcaaaacatactcgctcaggaggataccgcaaagggattagaccccctggctagtgaagataccagtagacaaaaagcaattgccgccaaggaacagtggaaggagcttaaggccacgtacagagagcacgtcgaagccataaagatagggctgaccaaggccttaacccagatggaggaggcccagcgcaaaaggacacaactcagagaggcctttgagcagctgcaagcgaaaaaacagatggccatggaaaaacgccgggcggtgcagaatcagtggcaactgcagcaggagaaacacttacagcacctggctgaggtttctgccgaggtgcgggaacgaaagacagggactcagcaagagctcgatcgcgtgttccagaagctcgggaacctgaagcaacaggcagaacaggaaagagataagctgcagaggtatcagacctttttacagctactctatacactccagggtaaactgctctttcctgaggctgaggccgaagctgaaaacctccccgatgataagcctcaacagcccacaagacctcaggagcagtctactggcgacacaatggggcgcgatccaggtgtgtctttcaaggcagtgggcctgcagcccgccggagacgtgaacctgccgtag

SEQ ID NO: 170105 - DNA, 834 bp, Artificial Sequence
  derived and/or modified sequence
atggaggccgccgagaccgaggccgaggccgccgccctggaggtgctagcagaagtcgccggcatactggagccagtaggcctgcaggaagaagcggagcttccagcgaagatcctggtggagttcgtcgtagattcacagaaaaaggacaagctcctgtgctctcagcttcaggtcgcggacttcctgcagaacatcttagcgcaggaagacacagcaaaaggtctggatcccttggcatccgaggataccagtcgccagaaagctatcgccgcaaaggaacagtggaaagagttgaaggctacataccgagaacacgtagaggctatcaaaattggcctgacgaaagctttgacccagatggaggaagctcagagaaaaagaacgcagctgcgagaggcatttgagcagctccaggcgaagaaacagatggctatggaaaagcgccgggcggtgcagaaccaatggcagctgcagcaagaaaaacacctgcaacacctggctgaggtctctgccgaagtgagggaacgaaaaactgggactcagcaggagctggacagagtgttccaaaagctgggcaatttgaagcaacaagctgagcaagagcgtgataagctgcagagataccaaacctttctccaactcctttatacactgcaaggaaaactgttgttccccgaagcagaagccgaagctgaaaacctgcccgacgataaaccgcagcagcctaccaggcctcaagaacagtctacgggggacactatgggcagggatccgggagtctccttcaaggccgtagggctccagcccgcaggagatgtgaacctcccgtag

SEQ ID NO: 170106 - DNA, 474 bp, Artificial Sequence
  derived and/or modified sequence
atggaagaagctcaacggaagaggacccagctgcgcgaggcatttgagcagctgcaggctaagaagcagatggctatggagaagcggcgagccgtgcagaatcaatggcaactccagcaggagaagcaccttcagcatctggcagaagtgagtgcagaggtgcgggagcgaaagacaggcacccagcaagagctggaccgggtgttccagaagctgggcaatctcaagcagcaagccgagcaggaacgggacaagctccagcgctaccagacatttctgcaattactatacactttacagggtaaactgctgtttccagaggcagaggcagaagccgaaaacctgcctgacgacaaaccgcagcagccaacccgtccacaggagcagtctacaggcgatacgatgggcagagaccccggagttagcttcaaagccgtcggcctgcaaccggctggagacgtcaacttgccctag

SEQ ID NO: 170107 - DNA, 834 bp, Artificial Sequence
  derived and/or modified sequence
atggaggcagccgaaactgaagccgaagctgctgcattagaagtcctggccgaggtcgccggaatcctggagcctgtgggcctgcaggaggaagcagagctccccgcaaagatcttggtggagttcgtggtagattcacagaagaaggataagctgctgtgttcccagctgcaggtggcggactttctccagaatatcctggcccaggaggataccgctaaaggattggaccctttggcttccgaagacacttcgcgacagaaggcaatagccgcaaaggagcaatggaaggaactgaaagcaacatatagagagcacgtagaggccatcaaaattggactgaccaaggcactgacccaaatggaggaagcccagcgcaaaagaactcaactgcgtgaagccttcgaacagctccaggccaagaagcagatggctatggagaagaggcgcgctgtccagaaccaatggcagctgcaacaggaaaagcatctgcagcacttggcggaggtctctgctgaggtgcgagagcgcaaaacaggtactcagcaggaactcgatagggtctttcagaagctaggaaacctcaaacaacaggctgaacaggaacgcgataagctgcaaaggtatcagacgtttcttcagctgctgtacaccctacagggcaaacttttattcccggaggcagaggccgaagcggagaacctacctgatgataagcctcagcagcctacacggccacaggagcaaagcactggagacacaatgggcagggaccctggagtcagttttaaggccgtgggactgcagccagccggagacgttaacctcccttag

SEQ ID NO: 170108 - DNA, 834 bp, Artificial Sequence
  derived and/or modified sequence
atggaagctgctgagacggaagccgaggctgctgcactggaggtcctggcggaggttgccggtattttagagcctgtgggactgcaagaggaggctgagctgccagcaaaaatattggttgagttcgtcgtggatagccagaagaaggacaagctgctatgcagccagttgcaggtggcagactttctgcaaaatatcctcgcacaggaagacaccgccaaaggtctcgaccctctggccagcgaggatacgagccgacaaaaggcaattgctgccaaggagcagtggaaggagctgaaggctacgtacagagaacacgtggaggcaatcaaaatcggacttactaaggccctcacacagatggaggaagcccagcgtaaacggacccagctgagagaggccttcgagcagctgcaggcaaaaaagcagatggccatggagaagaggcgcgcagtgcaaaatcaatggcaactgcagcaggaaaagcatctccagcacctggcggaagtttcagcggaagtcagggaacgtaagactggcacacagcaggagcttgacagggtttttcagaagttggggaaccttaaacagcaggctgagcaagagcgggacaagctacaacgataccaaactttcctccagttactgtacaccctccaggggaaattgctgtttccagaggcggaagccgaagctgagaacctgccagatgacaagccccagcagcctacgcggcctcaagagcagtccaccggtgacacaatgggacgagatccaggtgtgtcttttaaagccgtgggtctgcaaccagcaggcgacgtcaacctgccatag

SEQ ID NO: 170109 - DNA, 1456 bp, Artificial Sequence
  derived and/or modified sequence
ctgactcagatggaggaagcccagaggaaacggacacaactccgggaagcctttgagcagctccaggccaagaaacaaatggccatggagaaacgcagagcagtccagaaccagtggcagctacaacaggagaagcatctgcagcatctggcggaggtttctgcagaggtgagggagcgtaagacagggactcagcaggagcttgacagggtgtttcagaaacttggaaacctgaagcagcaggcagaacaggagcgggacaagctgcagaggtatcagaccttcctccagcttctgtataccctgcagggtaagctgttgttccctgaggctgaggctgaggcagagaatcttccagatgataaaccccagcagccgactcgaccccaggagcagagtacaggagacaccatggggagagaccctggtgtgtccttcaaggctgttggtctacaacctgctggagatgtaaatttgccatgacttcctggaggacagcagcatggagaaagatcctagaaaaggtcagacccaactcaggccttggtgtccctggactgcaagtgtggaaggagggaaagcctggtttacctctctctgcatctgagctctgctacccatggagcagatggatggtgggaacaggaaagagcttatgttacacctcattcccatgcttagcccacccagagctaacccctgtcttcttccccaggcctctgacttccctcacctcccaaccatcattacaggaaagactgtgaactcctgagttcagcttgatttctgactacatcccagcaagctctggcatctgtggattaaaatccctggatctctctcagttgtgtatttgttcatcttcatatgctggcaggaacaactattaatacagatactcagaagccaataacatgacaggagctgggactggtttgaacacagggtgtgcagatggggagggggtactggccttgggcctcctatgatgcagacatggtgaatttaattcaaggaggaggagaatgttttaggcaggtggttatatgtgggaagataattttattcatggatccaaatgtttgttgagtcctttctttgtgctaaggttcttgcggtgaaccagaattataacagtgagctcatctgactgttttaggatgtacagcctagtgttaacattcttggtatctttttgtgccttatctaaaacatttctcgatcactggtttcagatgttcatttattatattcttttcaaagattcagagattggcttttgtcatccactattgtatgttttgtttcattgacctctagtgataccttgatctttcccactttctgttttcggattggagaagatgtaccttttttgtcaactcttacttttatcagatgatcaactcacgtatttggatctttatttgttttctcaaataaatatttaaggtta

SEQ ID NO: 170110 - DNA, 474 bp, Artificial Sequence
  derived and/or modified sequence
atggaggaggcccagagaaagagaacccagctgagagaggccttcgagcagctgcaggccaagaagcagatggccatggagaagagaagagccgtgcagaaccagtggcagctgcagcaggagaagcacctgcagcacctggccgaggtgagcgccgaggtgagagagagaaagaccggcacccagcaggagctggacagagtgttccagaagctgggcaacctgaagcagcaggccgagcaggagagagacaagctgcagagataccagaccttcctgcagctgctgtacaccctgcagggcaagctgctgttccccgaggccgaggccgaggccgagaacctgcccgacgacaagccccagcagcccaccagaccccaggagcagagcaccggcgacaccatgggcagagaccccggcgtgagcttcaaggccgtgggcctgcagcccgccggcgacgtgaacctgccctag

SEQ ID NO: 170111 - protein, 436 aa, Artificial Sequence
  derived and/or modified sequence
MMGEAAVAAGPCPLREDSFTRFSSQSNVYGLAGGAGGRGELLAATLKGKVLGFRYQDLRQKIRPVAKELQFNYIPVDAEIVSIDTFNKSPPKRGLVVGITFIKDSGDKGSPFLNIYCDYEPGSEYNLDSIAQSCLNLELQFTPFQLCHAEVQVGDQLETVFLLSGNDPAIHLYKENEGLHQFEEQPVENLFPELTNLTSSVLWLDVHNFPGTSRRLSALGCQSGYVRVAHVDQRSREVLQMWSVLQDGPISRVIVFSLSAAKETKDRPLQDEYSVLVASMLEPAVVYRDLLNRGLEDQLLLPGSDQFDSVLCSLVTDVDLDGRPEVLVATYGQELLCYKYRGPESGLPEAQHGFHLLWQRSFSSPLLAMAHVDLTGDGLQELAVVSLKGVHILQHSLIQASELVLTRLRHQVEQRRRRLQGLEDGAGAGPAENAAS

SEQ ID NO: 170112 - protein, 196 aa, Artificial Sequence
  derived and/or modified sequence
MWSVLQDGPISRVIVFSLSAAKETKDRPLQDEYSVLVASMLEPAVVYRDLLNRGLEDQLLLPGSDQFDSVLCSLVTDVDLDGRPEVLVATYGQELLCYKYRGPESGLPEAQHGFHLLWQRSFSSPLLAMAHVDLTGDGLQELAVVSLKGVHILQHSLIQASELVLTRLRHQVEQRRRRLQGLEDGAGAGPAENAAS

SEQ ID NO: 170113 - DNA, 1311 bp, Artificial Sequence
  derived and/or modified sequence
atgatgggcgaggccgccgtggccgccggcccctgccccctgagagaggacagcttcaccagattcagcagccagagcaacgtgtacggcctggccggcggcgccggcggcagaggcgagctgctggccgccaccctgaagggcaaggtgctgggcttcagataccaggacctgagacagaagatcagacccgtggccaaggagctgcagttcaactacatccccgtggacgccgagatcgtgagcatcgacaccttcaacaagagcccccccaagagaggcctggtggtgggcatcaccttcatcaaggacagcggcgacaagggcagccccttcctgaacatctactgcgactacgagcccggcagcgagtacaacctggacagcatcgcccagagctgcctgaacctggagctgcagttcacccccttccagctgtgccacgccgaggtgcaggtgggcgaccagctggagaccgtgttcctgctgagcggcaacgaccccgccatccacctgtacaaggagaacgagggcctgcaccagttcgaggagcagcccgtggagaacctgttccccgagctgaccaacctgaccagcagcgtgctgtggctggacgtgcacaacttccccggcaccagcagaagactgagcgccctgggctgccagagcggctacgtgagagtggcccacgtggaccagagaagcagagaggtgctgcagatgtggagcgtgctgcaggacggccccatcagcagagtgatcgtgttcagcctgagcgccgccaaggagaccaaggacagacccctgcaggacgagtacagcgtgctggtggccagcatgctggagcccgccgtggtgtacagagacctgctgaacagaggcctggaggaccagctgctgctgcccggcagcgaccagttcgacagcgtgctgtgcagcctggtgaccgacgtggacctggacggcagacccgaggtgctggtggccacctacggccaggagctgctgtgctacaagtacagaggccccgagagcggcctgcccgaggcccagcacggcttccacctgctgtggcagagaagcttcagcagccccctgctggccatggcccacgtggacctgaccggcgacggcctgcaggagctggccgtggtgagcctgaagggcgtgcacatcctgcagcacagcctgatccaggccagcgagctggtgctgaccagactgagacaccaggtggagcagagaagaagaagactgcagggcctggaggacggcgccggcgccggccccgccgagaacgccgccagctag

SEQ ID NO: 170114 - DNA, 1688 bp, Artificial Sequence
  derived and/or modified sequence
cgcgcaacggccgggcacccggcggttcaggtcgcttagagagtcgtaggttgggtagtgcgggttggggcgggggctgcggagagggtgcttaactgaggggcatgatgggggaggcggccgtggccgcggggccttgtccgttgcgcgaggacagcttcacgcgcttctcgtcgcagagcaatgtgtacgggctggcaggcggcgccggcgggcgcggggagctgctggccgccacccttaaaggcaaggtgctcggcttccgctaccaagacctccgacagaaaatccggccagtggccaaggagctgcagttcaactacattcccgtggatgcggagattgtctccatcgacactttcaacaagtcaccccccaagcggggtctggttgtggggatcacgttcatcaaggattcaggggacaagggcagccccttcctgaacatttactgcgactacgagcccggctctgagtacaaccttgactctattgcccagagctgcctgaacctggagctccagttcactccgttccagctgtgccatgcggaggtccaggtcggggatcaacttgagactgtgtttctcttgagtgggaacgacccggccattcatctctacaaggagaacgaggggctgcatcagtttgaggaacagcccgtggaaaacctcttcccagagctgacgaacctgaccagtagcgtcctctggctggacgtccacaacttccccggcacgtcccggcgcctctcagctctgggctgtcagagtggttatgtccgtgtcgcccacgtggaccagcggagtcgagaggttctgcagatgtggtcggtcctgcaggacggtcccatctcccgagtgattgtgttcagcctctcggccgccaaggagaccaaggacaggccactacaagatgagtacagcgtgctcgtggccagcatgttggagccagcagtggtgtatcgggacctgctgaaccggggtcttgaagaccagcttctcctgcccggcagtgaccagtttgacagcgtcctctgcagcctggtcaccgatgtggatttggatgggcggccagaagtcctggtggccacctatggacaggaactgctgtgttataagtaccggggcccagagtcggggcttcctgaggcccagcacgggttccatctgctgtggcagcggagcttctccagtcccctgctggccatggctcacgtggacctgaccggggatgggctgcaggagcttgccgtggtctccctgaagggcgtgcacatcctgcagcacagcctgattcaggcctcagagctggtcttgacccggcttcgacatcaagtggagcagaggagacgtcggctacaggggttggaggacggggcaggtgcagggcctgctgagaatgcagcctcttaagcacccatgcacccactcttcccagacctggggcgactcatggcgtgctcacctccagccgctggtggggggtgtcctgaaggacaggatgctctccccagacctccccagggtggtgaagctgtgccctggggccccagctaacccactcctctctctgtacgtcaatgtccctatttgaaagcagggatgatcccattccaccctgtccactctggatgagaattggccacctgatggttatttatacgtccagaagaacatcatttccca

SEQ ID NO: 170115 - DNA, 1311 bp, Artificial Sequence
  derived and/or modified sequence
atgatgggcgaggcagctgtggctgccgggccttgccctcttcgggaagattccttcacacgtttttcaagccagagcaacgtttacgggctggccggcggggcagggggccgtggagaactgttggccgcaacactcaagggcaaagtgctggggtttcgataccaagacctcaggcaaaagattaggccggtggcgaaagagctccagtttaactatatccctgtagatgccgaaattgtcagcatcgacacgtttaacaaaagtcccccaaagcgcggcctggtggtgggaatcacattcattaaggactccggcgacaagggctcaccgttcttgaatatctattgtgattacgagccaggatctgaatataatttggactcgatcgcacagtcctgtctcaacttggagttgcagtttactccttttcagctttgtcacgccgaagtccaggtgggcgaccagctcgagactgtctttttgctctcaggcaacgatccggctattcacctgtacaaagaaaacgaaggcctgcatcaatttgaggaacagccagtggagaatctttttcctgaattgacgaacctgacctcctccgtgttatggctagacgtgcacaactttcctggcacttcacggcgacttagtgctcttggctgccagtcgggatacgtgcgtgtggctcatgtcgatcaaagatcaagggaagttctgcagatgtggtctgttctgcaggacggccccattagccgagttatcgtgttcagcctcagtgccgctaaagaaactaaagatcgcccactccaagacgagtattctgtgttggtagcctccatgctagaacccgctgtggtgtacagagatctgttaaaccggggcctagaagatcagttgctgttaccaggcagtgaccagtttgacagcgtgctgtgtagcctcgtaacagatgttgatctcgacggccgtccagaggtgctggtcgccacttacggccaggaactcctttgttacaaataccggggcccagaatctggactacccgaagcacaacacggtttccacctgctgtggcagaggtccttctcctcccccttgctggccatggcccatgttgatctaaccggagacggtctgcaggagcttgcggtcgtaagccttaagggtgtacatattctgcagcattccctgattcaggcctccgaactcgtcctgacaaggctgcgacaccaggtcgaacagagaaggcgaaggctgcagggactggaggatggagccggcgctgggcccgcagagaacgccgccagctag

SEQ ID NO: 170116 - DNA, 1311 bp, Artificial Sequence
  derived and/or modified sequence
atgatgggagaggccgctgtggccgccggcccctgccccctgcgggaggacagcttcacccgcttcagcagccagagcaatgtgtatggcctggccggcggggccggcggccgcggggagctgctggccgccaccctgaagggcaaggtgctgggcttccgctaccaggacctgcggcagaagatccggcctgtggccaaggagctgcagttcaactacatccctgtggatgctgagatcgtgtccattgacaccttcaacaagagcccccccaagaggggcctggtggtgggcatcaccttcatcaaggacagcggggacaagggcagccccttcctgaacatctactgtgactatgagcccggcagcgagtacaacctggacagcatcgcccagagctgcctgaacctggagctgcagttcacccccttccagctgtgccacgccgaggtgcaggtgggggaccagctggagaccgtcttcctgctgtctggaaatgaccctgccatccacctgtacaaggaaaatgaaggcctgcaccagtttgaggagcagcctgtggagaacctcttccctgagctgaccaacctgaccagctctgtgctgtggctggatgtgcacaacttccctggcaccagccggcggctgagcgccctgggctgccagagcggctacgtgcgggtggcccacgtggaccagaggagccgggaggtgctgcagatgtggagcgtgctgcaggacggccccatcagcagggtcatcgtgttcagcctgtctgctgccaaggagaccaaggaccggcccctgcaggatgagtacagcgtgctggtggcctccatgctggagcctgctgtggtgtacagagacctgctgaacagaggcctggaggaccagctgctgctgcccggcagtgaccagtttgattctgtgctgtgcagcctggtgacagatgtggacctggatggccggcctgaggtgctggtggccacctacggccaggagctgctgtgctacaagtaccggggccctgagagcggcctgcctgaggcccagcacggcttccacctgctgtggcagaggagcttcagcagccccctgctggccatggcccacgtggacctgactggagatggcctgcaggagctggccgtggtgtccctgaagggcgtgcacatcctgcagcacagcctcatccaggccagcgagctggtgctgacccggctgcggcaccaggtggagcagaggagaagaaggctgcagggcctggaggatggagctggggccggccctgcagaaaatgctgccagctag

SEQ ID NO: 170117 - DNA, 1311 bp, Artificial Sequence
  derived and/or modified sequence
atgatgggcgaggccgccgtggccgccggcccctgccccctgcgggaagactccttcacaagattcagttcccagagcaacgtgtatggcctcgccgggggcgccggtggacgcggagagctcctggctgccaccctgaaagggaaagttttaggctttaggtaccaagacttgaggcaaaagatcagaccggttgccaaggagctacagttcaactatatacccgtggacgcagagatcgtctcaatcgatacctttaataaatcacccccaaagcgcggactagtggtcggcatcacctttatcaaagattccggggacaagggctccccctttctaaacatttattgtgattatgaaccaggttcagagtacaacttggattcgatcgctcagtcttgcttaaatctcgagctgcaattcacaccttttcagttgtgccacgctgaggtgcaggtgggtgatcagctagaaacagtctttctcctatctggtaacgacccagccattcatctatacaaggaaaacgaaggcctgcaccagttcgaggagcagccagtagaaaacctctttcccgaacttacaaatctgacatcaagcgtcctctggttggatgtgcacaattttcccgggacttctaggagacttagcgccctgggctgtcagagtggctatgtgcgcgtggcacacgttgaccagaggtcacgggaggtactacagatgtggtcagttctgcaggatggccctataagcagagtgattgtgttcagcctttccgctgccaaagagaccaaagatcgccccctccaggatgaatacagcgtgctcgtggcaagtatgctggaacctgctgtggtttaccgtgatttgctgaatcggggtctcgaggaccagctgcttctgccaggttccgatcagttcgacagcgtactttgctcactcgtcaccgatgtcgatttggacgggcggccagaagtcctcgtggctacctatggccaggagctcctgtgctacaaatacaggggtcccgaatctggcctccctgaagcgcagcacgggtttcacctgctgtggcaaaggtccttctccagtcctctgctcgcgatggcccatgttgacctgaccggggacggattacaggagctcgcagtggtgtccttgaaaggcgtgcatattctgcaacacagccttatccaagcttccgaacttgtcctgactcgactccgacatcaggtggagcagaggcgaagaaggctacaggggctcgaggacggtgccggggccggaccagcagaaaatgctgcttcatag

SEQ ID NO: 170118 - DNA, 1311 bp, Artificial Sequence
  derived and/or modified sequence
atgatgggagaagctgcagtggccgcagggccttgcccacttagggaggacagctttactcggttctccagtcagtctaacgtgtacgggctggccggaggagctggaggtcgcggagagctactggccgctacactcaaggggaaggtgttaggcttccgttaccaggacttgagacagaaaatacgacctgtggctaaggaacttcagtttaattatataccagtcgacgccgagattgtaagcatcgacaccttcaacaagagcccacccaagcggggattggtagtgggcataacctttattaaggattctggcgacaagggaagcccctttcttaatatttactgtgattacgagccaggatcagaatacaatctggattccattgctcagtcatgtctgaacctggagttacagtttaccccctttcagttgtgtcacgccgaggtgcaggttggggatcagctggagaccgttttcttactgtccggcaatgaccctgccattcatttgtataaagagaacgagggccttcatcagtttgaagagcaaccagtggagaatctgtttccagaattaacaaacttgacctccagtgtgctttggctcgatgtccacaattttcccggtaccagccgtaggctgagtgctttgggatgtcagtctggctatgtccgagtggcacacgtcgaccaacgctcccgggaagtattgcagatgtggtccgttctacaggatggccctatctccagggtgattgtgtttagcctgagcgccgctaaagaaacgaaagacagacctctccaggacgagtacagtgtgctcgtggcttcaatgctggaacctgcggtggtgtacagggatctgcttaatagggggttagaggatcagctgctactgcccggttcagatcagtttgactccgttctatgcagtttggtcacggacgtcgacctagatggtcgccctgaagtgctggtagcaacctatgggcaggagctcttatgttataagtatcgaggccctgaaagcggactcccagaggcacaacacgggtttcacttgttgtggcagagaagcttttcatctcccctgctggctatggcccacgtagacctcacaggcgatggcctgcaggagttggcagtggtgtctttgaaaggcgttcatatcctgcagcactctctaatacaggcgagcgagctggttctcactagattgcggcaccaagtcgaacaacggagaaggaggttgcaaggattagaggatggcgcaggagccggtcctgctgaaaatgctgcttcgtag

SEQ ID NO: 170119 - DNA, 1623 bp, Artificial Sequence
  derived and/or modified sequence
gcatgatgggggaggcggccgtggccgcggggccttgtccgttgcgcgaggacagcttcacgcgcttctcgtcgcagagcaatgtgtacgggctggcaggcggcgccggcgggcgcggggagctgctggccgccacccttaaaggcaaggtgctcggcttccgctaccaagacctccgacagaaaatccggccagtggccaaggagctgcagttcaactacattcccgtggatgcggagattgtctccatcgacactttcaacaagtcaccccccaagcggggtctggttgtggggatcacgttcatcaaggattcaggggacaagggcagccccttcctgaacatttactgcgactacgagcccggctctgagtacaaccttgactctattgcccagagctgcctgaacctggagctccagttcactccgttccagctgtgccatgcggagtgagtgtcccctgcgcatcgacgcccactccactatggtgggttggatttggtctgcaggtcataacttggccaacctctggtctaacagggtccaggtcggggatcaacttgagactgtgtttctcttgagtgggaacgacccggccattcatctctacaaggagaacgaggggctgcatcagtttgaggaacagcccgtggaaaacctcttcccagagctgacgaacctgaccacgtcctctggctggacgtccacaacttccccggcacgtcccggcgcctctcagctctgggctgtcagagtggttatgtccgtgtcgcccacgtggaccagcggagtcgagaggttctgcagatgtggtcggtcctgcaggacggtcccatctcccgagtgattgtgttcagcctctcggccgccaaggagaccaaggacaggccactacaagatgagtacagcgtgctcgtggccagcatgttggagccagcagtggtgtatcgggacctgctgaaccggggtcttgaagaccagcttctcctgcccggcagtgaccagtttgacagcgtcctctgcagcctggtcaccgatgtggatttggatgggcggccagaagtcctggtggccacctatggacaggaactgctgtgttataagtaccggggcccagagtcggggcttcctgaggcccagcacgggttccatctgctgtggcagcggagcttctccagtcccctgctggccatggctcacgtggacctgaccggggatgggctgcaggagcttgccgtggtctccctgaagggcgtgcacatcctgcagcacagcctgattcaggcctcagagctggtcttgacccggcttcgacatcaagtggagcagaggagacgtcggctacaggggttggaggacggggcaggtgcagggcctgctgagaatgcagcctcttaagcacccatgcacccactcttcccagacctggggcgactcatggcgtgctcacctccagccgctggtggggggtgtcctgaaggacaggatgctctccccagacctccccagggtggtgaagctgtgccctggggccccagctaacccactcctctctctgtacgtcaatgtccctatttgaaagcagggatgatcccattccaccctgtccactctggatgag

SEQ ID NO: 170120 - protein, 1289 aa, Artificial Sequence
  derived and/or modified sequence
MKGGDRAYTRGPSLGWLFAKCCCCFPCRDAYSHSSSENGGKSESVANLQAQPSLNSIHSSPGPKRSTNTLKKWLTSPVRRLNSGKADGNIKKQKKVRDGRKSFDLGSPKPGDETTPQGDSADEKSKKGWGEDEPDEESHTPLPPPMKIFDNDPTQDEMSSSLLAARQASTEVPTAADLVNAIEKLVKNKLSLEGSSYRGSLKDPAGCLNEGMAPPTPPKNPEEEQKAKALRGRMFVLNELVQTEKDYVKDLGIVVEGFMKRIEEKGVPEDMRGKDKIVFGNIHQIYDWHKDFFLAELEKCIQEQDRLAQLFIKHERKLHIYVWYCQNKPRSEYIVAEYDAYFEEVKQEINQRLTLSDFLIKPIQRITKYQLLLKDFLRYSEKAGLECSDIEKAVELMCLVPKRCNDMMNLGRLQGFEGTLTAQGKLLQQDTFYVIELDAGMQSRTKERRVFLFEQIVIFSELLRKGSLTPGYMFKRSIKMNYLVLEENVDNDPCKFALMNRETSERVVLQAANADIQQAWVQDINQVLETQRDFLNALQSPIEYQRKERSTAVMRSQPARLPQASPRPYSSVPAGSEKPPKGSSYNPPLPPLKISTSNGSPGFEYHQPGDKFEASKQNDLGGCNGTSSMAVIKDYYALKENEICVSQGEVVQVLAVNQQNMCLVYQPASDHSPAAEGWVPGSILAPLTKATAAESSDGSIKKSCSWHTLRMRKRAEVENTGKNEATGPRKPKDILGNKVSVKETNSSEESECDDLDPNTSMEILNPNFIQEVAPEFLVPLVDVTCLLGDTVILQCKVCGRPKPTITWKGPDQNILDTDNSSATYTVSSCDSGEITLKICNLMPQDSGIYTCIATNDHGTTSTSATVKVQGVPAAPNRPIAQERSCTSVILRWLPPSSTGNCTISGYTVEYREEGSQIWQQSVASTLDTYLVIEDLSPGCPYQFRVSASNPWGISLPSEPSEFVRLPEYDAAADGATISWKENFDSAYTELNEIGRGRFSIVKKCIHKATRKDVAVKFVSKKMKKKEQAAHEAALLQHLQHPQYITLHDTYESPTSYILILELMDDGRLLDYLMNHDELMEEKVAFYIRDIMEALQYLHNCRVAHLDIKPENLLIDLRIPVPRVKLIDLEDAVQISGHFHIHHLLGNPEFAAPEVIQGIPVSLGTDIWSIGVLTYVMLSGVSPFLDESKEETCINVCRVDFSFPHEYFCGVSNAARDFINVILQEDFRRRPTAATCLQHPWLQPHNGSYSKIPLDTSRLACFIERRKHQNDVRPIPNVKSYIVNRVNQGT

SEQ ID NO: 170121 - protein, 1257 aa, Artificial Sequence
  derived and/or modified sequence
MKGGDRAYTRGPSLGWLFAKCCCCFPCRDAYSHSSSENGGKSESVANLQAQPSLNSIHSSPGPKRSTNTLKKWLTSPVRRLNSGKADGNIKKQKKVRDGRKSFDLGSPKPGDETTPQGDSADEKSKKGWGEDEPDEESHTPLPPPMKIFDNDPTQDEMSLEGSSYRGSLKDPAGCLNEGMAPPTPPKNPEEEQKAKALRGRMFVLNELVQTEKDYVKDLGIVVEGFMKRIEEKGVPEDMRGKDKIVFGNIHQIYDWHKDFFLAELEKCIQEQDRLAQLFIKHERKLHIYVWYCQNKPRSEYIVAEYDAYFEEVKQEINQRLTLSDFLIKPIQRITKYQLLLKDFLRYSEKAGLECSDIEKAVELMCLVPKRCNDMMNLGRLQGFEGTLTAQGKLLQQDTFYVIELDAGMQSRTKERRVFLFEQIVIFSELLRKGSLTPGYMFKRSIKMNYLVLEENVDNDPCKFALMNRETSERVVLQAANADIQQAWVQDINQVLETQRDFLNALQSPIEYQRKERSTAVMRSQPARLPQASPRPYSSVPAGSEKPPKGSSYNPPLPPLKISTSNGSPGFEYHQPGDKFEASKQNDLGGCNGTSSMAVIKDYYALKENEICVSQGEVVQVLAVNQQNMCLVYQPASDHSPAAEGWVPGSILAPLTKATAAESSDGSIKKSCSWHTLRMRKRAEVENTGKNEATGPRKPKDILGNKVSVKETNSSEESECDDLDPNTSMEILNPNFIQEVAPEFLVPLVDVTCLLGDTVILQCKVCGRPKPTITWKGPDQNILDTDNSSATYTVSSCDSGEITLKICNLMPQDSGIYTCIATNDHGTTSTSATVKVQGVPAAPNRPIAQERSCTSVILRWLPPSSTGNCTISGYTVEYREEGSQIWQQSVASTLDTYLVIEDLSPGCPYQFRVSASNPWGISLPSEPSEFVRLPEYDAAADGATISWKENFDSAYTELNEIGRGRFSIVKKCIHKATRKDVAVKFVSKKMKKKEQAAHEAALLQHLQHPQYITLHDTYESPTSYILILELMDDGRLLDYLMNHDELMEEKVAFYIRDIMEALQYLHNCRVAHLDIKPENLLIDLRIPVPRVKLIDLEDAVQISGHFHIHHLLGNPEFAAPEVIQGIPVSLGTDIWSIGVLTYVMLSGVSPFLDESKEETCINVCRVDFSFPHEYFCGVSNAARDFINVILQEDFRRRPTAATCLQHPWLQPHNGSYSKIPLDTSRLACFIERRKHQNDVRPIPNVKSYIVNRVNQGT

SEQ ID NO: 170122 - DNA, 3870 bp, Artificial Sequence
  derived and/or modified sequence
atgaagggcggtgatcgggcctatacacgggggccatccttggggtggctgttcgccaaatgctgttgttgtttcccatgtcgtgacgcctactcccacagctcctctgagaatgggggcaaatccgaaagtgtagcgaatttgcaagcccagccatccttgaacagcattcactcctctcccgggccgaagagatctaccaataccctgaagaagtggctaacttctcccgtgaggagactgaattctggcaaggcagatggaaacattaagaaacaaaaaaaggtgcgtgacgggagaaaatcattcgacctcggatctccaaaacctggtgacgaaaccactccccagggggactctgctgatgagaagtctaagaaggggtggggggaggacgagccagatgaggagtctcacacaccattaccgcctccaatgaagatctttgacaacgatcccacccaggatgagatgagctcatccctcctagccgcccgtcaggcttccaccgaggtgcccacggctgcagacctggttaatgccatcgaaaaactggtgaaaaataagctctccctggagggcagttcctaccggggctctctaaaggaccccgccggctgtctgaacgaaggcatggcgccacccacgccccctaagaatcccgaagaggagcaaaaagctaaagccctccgtggaaggatgttcgtgctcaacgagctggtccagaccgagaaagactatgtgaaggacctcggcattgttgttgaagggtttatgaaacgcatagaggagaaaggtgtgcccgaagacatgcggggcaaagataagattgtgttcggtaatattcaccagatatacgactggcataaagatttttttctcgctgagctggaaaagtgcattcaggagcaggatcgtcttgctcaactattcatcaagcacgaacggaagctccacatttacgtgtggtattgccagaacaaaccgagatcagaatatatcgttgcagaatacgacgcttatttcgaagaagtgaaacaagagattaatcagcgccttactctctcggatttcttaatcaagcctattcagcgcataaccaagtatcaattactgctcaaagatttcctcaggtactccgaaaaggcaggactcgaatgttcagatatcgaaaaagccgttgagctgatgtgtttggtccccaaaagatgtaacgacatgatgaatctaggccgtctccaggggttcgaaggaacactcactgctcaggggaagctattgcagcaggacacattctatgtaattgaattagatgcaggcatgcaatcccggaccaaagagagacgcgtgttcctttttgaacagattgtgatcttctcagaattactgcgcaagggcagtctaacaccaggctatatgtttaaacgatccattaagatgaactatctcgttctggaagagaatgtagacaatgacccctgcaagttcgccttgatgaacagggaaacctctgagagggtggttctgcaagcagctaatgcagatatacagcaggcttgggtgcaagacattaaccaggttctggagactcagcgcgattttctgaatgcgctgcaaagccctattgagtaccaaagaaaggaacggtcaacagccgttatgcgaagccaaccggcccggctgccacaagcctctcctcggccatattcaagtgtcccagccggatccgagaagccaccaaaagggagctcctataatcctcccttaccccctttgaagatatcaactagcaatggaagtcccggatttgaataccatcagcccggggataagttcgaggcctcaaagcaaaacgacctgggcggatgtaatggaaccagttcaatggccgtgatcaaggactattacgcgttgaaagaaaatgaaatctgtgtatctcagggcgaggtggtccaagttctcgcggtaaatcaacagaatatgtgcttggtgtaccaaccggcctcggaccatagcccagccgccgagggctgggtgcctggctcaattctggctccactaacaaaggcgacagcagccgagagcagtgatggcagcataaagaaatcttgcagctggcacacattgcgcatgcgcaagcgggccgaagtggagaacacaggaaaaaatgaagccacaggaccaaggaagcccaaggatatcttgggaaacaaagtttcagttaaggagaccaacagttccgaggagtccgagtgtgacgatctagacccaaacacaagcatggaaatacttaatcccaatttcatccaggaggtggcacccgaatttctggtgcctcttgtggatgtcacctgcctgttgggcgacacagtgatcttgcagtgcaaggtgtgtggtagaccaaaacccactatcacctggaagggccctgatcagaatatactcgataccgataacagctccgctacctacactgttagcagttgcgacagcggcgaaatcaccctgaagatttgtaacctcatgcctcaggacagcggaatctatacctgtatcgccacaaacgaccatgggacaacaagcacgagcgcaacggtcaaagtgcagggcgtacccgctgcaccaaatcggccaattgcacaggagagatcctgcaccagtgtaattcttcggtggctgccaccatcttccactggcaactgcacgatttcaggctacaccgtcgaatatcgggaggagggctcacaaatctggcagcagagtgtggcttcaaccctggacacatacttggtgatcgaggatctgagccctggctgcccctatcagtttcgggtatccgcctccaatccgtggggtatatctctgccttccgagccatcagaattcgtccggttacccgaatatgatgccgccgccgatggtgctacaatctcttggaaggagaactttgacagcgcttacacagaattgaacgaaataggcagggggaggttctcaattgtgaagaaatgcattcataaggccacgaggaaagatgttgccgttaaattcgtatcaaaaaagatgaaaaaaaaagagcaggcagcccatgaggccgccctccttcagcatctgcagcatccccaatatattacactgcatgacacatacgaaagcccaaccagttatatcttgattctggaactaatggatgatggccggttgctggactatctcatgaatcatgatgagcttatggaggagaaagtcgccttctacatcagagacattatggaggccctacagtacctacacaattgtcgggttgcacacctggacataaagccagaaaatctactcatcgacctgcgcattcctgtaccacgcgtcaaattaattgacctggaggatgccgtacaaatctctggccactttcatattcaccatcttctgggcaatcccgaatttgctgcgcccgaggtgatccaaggaatccctgtttcccttggtacagatatctggtctattggagtccttacctacgttatgctatctggcgtgtcacctttcctggacgaaagcaaagaggaaacatgtatcaacgtgtgcagagtggacttctctttcccacacgagtatttttgcggagtgagcaatgcagctagggattttattaacgttattttgcaagaagacttccgccgcagaccaactgcagcaacatgtctgcagcacccctggttgcagcctcataatggcagctattccaagatacctctggacacgagcagattagcatgtttcatcgagcggaggaaacaccaaaacgacgttcggccaattccgaatgtgaagtcatatatcgtaaaccgagttaatcagggtacttag

SEQ ID NO: 170123 - DNA, 3774 bp, Artificial Sequence
  derived and/or modified sequence
atgaagggtggagatcgtgcttacaccagaggaccttcccttggttggttgttcgctaagtgttgttgctgtttcccctgtcgcgatgcctactcacacagcagttctgagaacggggggaagtccgagagcgtggccaacttacaggcccagccttcactgaatagcatccatagctctcctggacctaaaaggtccactaatactctcaaaaaatggctaaccagccctgttaggagactaaactcaggaaaggcagacggtaacattaagaaacagaagaaggtccgtgacggccggaaaagcttcgacctgggctccccaaaaccaggggacgagacaaccccacaaggggactcagcggatgagaaatccaaaaagggctggggagaagacgagccggacgaggaaagccacacacctctgccacctcctatgaagattttcgacaacgatcctacacaagatgaaatgtccctggagggatcctcctatagggggagcctcaaagacccagctggatgtctgaatgagggcatggcacctcctactccacccaagaatcctgaagaggaacaaaaagcaaaggccttaagggggcgcatgttcgtattgaacgaattggtacaaaccgagaaagattatgttaaagatctgggcatcgtcgtggagggctttatgaaacgcatcgaggaaaagggggtgcctgaggatatgcgcggaaaagacaaaatagtcttcggtaacattcaccagatctatgattggcataaggatttttttttagctgaactggaaaagtgcatccaggagcaagaccgtcttgcccagttattcattaagcatgagaggaaactccatatatacgtttggtactgtcaaaataaaccccggagcgaatacatagtggctgagtatgatgcatattttgaggaagtgaaacaggaaatcaatcagagacttaccctgtctgatttcctgatcaagccgatccagagaattactaaatatcagttgctcctgaaagattttctgagatacagcgagaaggccgggcttgaatgttcagacatcgagaaggcggtcgagctaatgtgcctcgtgccaaaaagatgtaatgacatgatgaatctcggaaggctgcagggattcgagggtaccctcaccgcacaagggaagttgctgcagcaggatacgttctacgtgatagaattggatgcaggcatgcaatctcgcacaaaagaaaggcgggttttccttttcgagcagattgttatttttagcgagctgctaaggaaggggtcattgaccccgggatacatgttcaagaggtccataaaaatgaattacttagtgttggaagagaatgtcgataatgatccgtgcaagtttgctctgatgaaccgcgaaacatcggaacgggtcgttttacaagctgcaaacgccgatatccagcaagcctgggtgcaggatataaatcaggtgctggagacacagagggattttctcaatgccctacaaagccctatagaataccagcggaaggaacggtcaacagccgtgatgagaagccagcctgcacgactacctcaggcctctccacggccctacagctctgtccccgcaggttctgaaaagcctccgaaagggtcctcctacaatcctcccctgccccccctgaagatcagcacctccaacggaagccccgggtttgagtatcaccagcctggcgataagttcgaggcctcaaaacagaacgatctgggcgggtgcaatggaacatcctctatggcagtaataaaggactattatgctttgaaggaaaatgaaatatgtgtctcccagggtgaagtggtgcaagttctggccgtgaaccaacagaatatgtgccttgtgtaccagcctgcctctgatcattccccagcagcggaagggtgggtccccgggtccatattagcgcctttaacgaaagcaactgcagccgaatcgtctgacggttctatcaagaaaagctgtagttggcataccctcaggatgaggaagcgggccgaggttgagaacaccgggaagaatgaggccaccggaccgcggaagcctaaggatatcctgggcaataaagtcagtgtgaaagagactaactcatctgaagagtcagaatgcgacgatttggatcctaacacgagcatggagattctgaacccaaactttatccaggaagtggctcctgaatttttggtgccactagtggacgtgacctgtttgttaggtgacacagtgattcttcagtgtaaagtgtgcggcaggccaaaacctacaattacttggaagggtccggatcagaacatcctggacaccgacaactcgagcgccacctacaccgtgtccagttgtgatagcggtgaaattacactgaaaatctgcaatcttatgccgcaggacagtggtatttatacttgcatagctaccaacgaccatggcacaaccagtacctcggccactgtgaaggtgcagggggtgccggctgcgccaaaccgccccatcgcccaagaacgttcatgtacttccgtcatcctccgctggctgccgcctagctctaccggaaactgtaccatctccggctacactgtcgagtacagggaggagggctcacaaatatggcagcagtctgtggcctcaactttagatacctatctcgtgatcgaagatttaagtcctggttgtccttaccagtttagggtgtccgcctcaaatccttgggggatctcactcccttctgaacctagtgagtttgtgagactgcccgaatacgacgcagccgctgatggggcgaccatttcctggaaggagaacttcgatagtgcctacaccgaacttaacgagatcggccgcggccgcttcagcattgtgaaaaagtgcattcataaggcaacccggaaagacgtggctgtgaaattcgtttctaagaagatgaaaaaaaaggagcaggcggcgcacgaagcagctctactgcagcatctacagcatccccagtacatcaccctccacgacacctacgagagcccaacttcttatattctgattttagagttgatggatgacggacggctgctggattaccttatgaatcacgatgaactcatggaggaaaaagtcgcgttctacatccgggacataatggaggcactccagtacctgcacaactgccgcgtcgcccatctggacatcaaaccagaaaatctgcttatagatctcagaatacctgtgcctcgagtgaaactgatcgatttggaagatgctgtgcaaatatccggccatttccacattcaccaccttctgggcaacccagagttcgcagcacccgaggtaattcaaggtattcctgtgagcctaggcacagacatttggagtattggggtgctgacgtatgtgatgcttagtggggtgagtccttttctggacgagtccaaggaagaaacttgtattaacgtgtgtagggttgatttcagctttccccatgagtatttttgcggtgtgagcaatgctgcccgggactttattaatgtgatcctgcaggaagatttccgccggaggcccactgcagcaacttgtctacaacatccatggttacagcctcacaacgggagctactctaagatacctctagatacatccaggctggcctgctttattgagcggaggaaacaccagaacgatgtacggccaatccccaacgtgaaaagttacattgtaaatcgggtcaatcaaggcacctag

SEQ ID NO: 170124 - DNA, 5752 bp, Artificial Sequence
  derived and/or modified sequence
gtggctcccagtaagtcagagctgcggccgcggtgcggggagagcacagcggggagggcgggagccggctctcgggcggcggcgctgaagtttccttcccgccgcgctctcaccccgggctggcgccccgtgccatgcgggagcgctggggcggcggggcaacatgaagggcggcgacagggcttacacccgaggtccctctttggggtggctctttgctaagtgctgctgttgcttcccgtgtagagatgcatactctcattcctcaagcgagaatggaggcaagtccgagtccgtggccaacctgcaggcccagccctccctgaactccatccacagttccccgggtcccaagcgctccaccaacactcttaagaagtggctgacgagtcctgtgcgtcggcttaacagcgggaaggcagatggaaacatcaaaaagcagaagaaagttcgcgatggtcggaagagctttgacctgggatctcccaagcctggggatgaaacaacccctcagggagacagcgctgatgagaagagcaagaaaggttggggtgaagatgagccggatgaagagtcacacacacccctcccaccacctatgaagatttttgacaacgaccctacacaggatgaaatgtcctcctctttgctagcagcccggcaggcttccactgaagtacctactgctgcagaccttgtcaatgcaatagaaaagttggtcaaaaacaagctgagtctagaaggaagctcataccgggggagcttgaaagaccctgcaggctgcctgaatgaggggatggccccacccacacctcctaaaaacccagaagaagaacagaaagccaaggccctgagaggcaggatgtttgtcctgaatgagctggtacagacagagaaagactatgtcaaggatctgggcattgtggtggagggcttcatgaagagaatagaagaaaagggtgtccctgaggatatgcgaggaaaggacaaaatcgtgtttggaaatattcatcagatttatgactggcataaggattttttcctggcggaactggaaaagtgtatccaggagcaagacagattggcacagctctttattaagcacgagcggaagctgcacatctacgtgtggtattgtcagaataagccgcgctcagagtacatcgttgctgagtatgacgcctactttgaggaggtaaaacaggagataaatcagaggctgacactgagtgacttcctcatcaagcccattcagagaataacaaaataccagttgctcctcaaggacttcctgagatacagtgagaaggctggtttggagtgttcagatattgagaaagcagtggagttaatgtgccttgttcccaaacgctgcaatgacatgatgaatctaggacgtctgcagggctttgagggcactctgactgctcaggggaagctgctgcagcaggacacattctatgtgatcgagctggatgcaggcatgcagtcccggaccaaagagaggcgcgtgttcctcttcgagcagattgtcatcttcagtgaactgctcaggaagggatccctcacccctggctacatgttcaaaaggagcatcaagatgaattacttggtcctggaggagaatgtggacaatgatccctgcaagtttgcactcatgaacagagagacttctgagagggttgttctgcaagccgccaacgctgacatccagcaggcctgggtgcaggacatcaatcaagtcttagaaacacagcgagactttttgaatgcactgcaatcgcccattgagtatcaacggaaagaaaggagcacagctgtgatgaggtctcaacctgccaggcttccccaagccagccccaggccctactcctctgttcctgcgggctcagagaagcccccaaagggctccagctataacccacctctgcctcccctgaagatatctacctccaatggcagtccagggtttgaataccaccagcctggggacaagttcgaagccagcaagcagaacgacctgggaggctgcaatgggacctcgtccatggccgtgatcaaagattactatgcactgaaggagaatgaaatctgtgtgagccaaggtgaggtggtccaggtcctcgccgtcaaccagcagaacatgtgtctggtgtaccagcctgccagcgaccattcccccgccgccgagggctgggtcccaggcagcatcctggcgcccctcaccaaagccacagcagcagaaagtagtgacgggagcatcaagaagtcatgttcatggcatactctacgcatgagaaagcgggcggaagtggagaacacgggtaaaaatgaagccacagggcctcgtaaacccaaggatattctgggcaacaaagtctctgttaaagagacgaacagttccgaggaatcagagtgtgatgatcttgaccctaatactagcatggagatcttaaatccaaatttcatccaagaagtggccccagaattccttgtgcccttggtggatgtgacctgcttgcttggggacacagtgatactgcagtgcaaagtctgtgggcggccaaagcccaccatcacttggaagggtccagaccagaacatccttgacactgataacagctcagccacatacacggtctcctcttgtgattctggagaaatcaccctgaagatctgtaatctgatgccccaagacagtgggatttatacctgcatagcaacaaatgaccacgggaccacatcaacgtctgcaacagtcaaagtgcaaggtgttccagcagcccctaaccgccccattgcccaggagagaagctgcacctccgtgattctccgctggctgcccccctccagcacaggaaactgcactatttctggttacactgtggagtacagagaggaaggttctcagatctggcagcagtcagtggcttcgaccttggacacttacctcgtcatcgaagaccttagtcccgggtgtccttatcagttcagagtcagtgccagtaacccctggggaatcagccttcccagcgagccctcggagtttgtgcgacttccagaatatgatgctgctgctgatggtgccaccatttcttggaaggaaaattttgactcagcttacactgagctgaatgaaattggaagaggccgtttctctatagtaaagaaatgcattcacaaagctacccgcaaagatgtggctgtgaaatttgttagcaaaaaaatgaagaagaaagaacaggctgcccacgaggctgccctgcttcagcacctacagcacccccagtacatcactctccatgacacctatgagtcccccacatcctacatcctgatcttggaactgatggatgatggccggctcttagactaccttatgaatcatgatgaactgatggaggaaaaagtagctttctatatccgagacatcatggaggctctgcagtaccttcacaactgcagggttgcacatttggacataaagcctgaaaacctgctcattgacctacggattccagtgcctcgagtgaagctcattgacttggaggatgctgtccagatctcgggtcacttccacattcaccacctgctggggaaccctgagtttgctgccccagaagtcattcaaggcatccccgtctccctggggacagacatctggagcatcggggttctgacatatgtcatgctgagtggggtctcccccttcttggatgagagcaaagaggagacatgtatcaacgtatgcagggtggatttcagcttcccccatgaatacttctgtggtgtgagcaatgctgccagagatttcatcaatgtgatcttacaggaagattttcggaggcggcccacagcagccacatgcttgcagcatccatggctgcagccccataatggcagctactctaagatccccctggacacctcccgcctagcatgcttcatagaacgtcgcaagcaccagaatgatgtgcggcctattcccaatgtcaagagctacattgtcaaccgggtgaaccaagggacgtagccatctcccagcccctatggtttcacatagacgtgcagtgtgaaccaaagcaagactgaatgtgactgtaaataattctgttcatcatttcactccgtgcagttctctgaattgagagatgtacctcttaaacctcgtcagtggttattcagggtctgagcagcagtaaaagtcaccctaaatcaaggggcttttcagaaggtcattctgaagaaataaagaggcaaagggtcacagaagtgttcagaagaagggcaaagataagaacaatattagctgttacgaaattttaactgtatcttccaaaatgagtggttaactgggcaaaccttaagctcacaagagtataaaagatctctggctttgctgaaattttaagcaagaagttctatttaatggagatgtcatgtatatcaactattctggtttagataacttagatatagtttcttaataggatagatacccacatacagtataatatatcccattcaggtttcagagttttctaatatagagatatatatattaaatcaatcacaagtaattttgagtgctccagttaagacagtaatttatttaccgaatcattacattgttttgactaagcacaattagatgacaagtttttttagagcattttatagatcttgtatagaaatcttttaccagaacctgtgcattaagagaaagcaatgttgcccttttgaatgagaaaattttttctgtcaatcgcaggttatttgattaagataggttctttctgtatatgaaacgctccccgcaaattcactggcagctcagaattattctggaaagaaagcctgccaggaaataaattcaaatacagtatgagctgcggggatatttttgtgtctacaccaggtttgaaataagtaaacaaatacaagaggttcatataaaagggcaaatgaaaacctttcctacagttcctatgaacaacgtaccaacactttctgatttcttctacagctgtagaataccatctttcagaaagttggctggctttatttctaactccttattgaagctaaggggtgcttactaaaaggaggcagccatataggccttttaaaggcctggttctaagtcctttttaaagccatggaacaaaacctgatacatcaccctaacagagcattaagttgtaactgagattgcaatacctgtcaccatgcagccgctgatagttctctgaactaaaaggactaattgtactttgaggccaatgctgctttctggtgtatattctccatacaagattattattaactgctctttttccctctggtggaaaaaaaattaaacctgggcatttcatgggttttctttctttatttttgttcatttgttttggagggagggagcttgttttttgtgtttgtacatgatccacccttagttttctagaatgtgtgttgaaaattgcgattatacaagtaagattttaaaaatgtaactcaagtgtttgttcaaatcaggtttaatggtgttgcttctctcctataatgggatagagaaaattaaaatcacgtagtacagaagtgcaagaagagaatttatgaaggatgaatagaactacaaacctatctaaatgaaaaagaaatggtggaaactaagcctgaactttaacatataaaaaacacttattcccacagagaaaatgtaaaattaaaaatcatcatctttttttttcca

SEQ ID NO: 170125 - DNA, 5492 bp, Artificial Sequence
  derived and/or modified sequence
atgaagggcggcgacagggcttacacccgaggtccctctttggggtggctctttgctaagtgctgctgttgcttcccgtgtagagatgcatactctcattcctcaagcgagaatggaggcaagtccgagtccgtggccaacctgcaggcccagccctccctgaactccatccacagttccccgggtcccaagcgctccaccaacactcttaagaagtggctgacgagtcctgtgcgtcggcttaacagcgggaaggcagatggaaacatcaaaaagcagaagaaagttcgcgatggtcggaagagctttgacctgggatctcccaagcctggggatgaaacaacccctcagggagacagcgctgatgagaagagcaagaaaggttggggtgaagatgagccggatgaagagtcacacacacccctcccaccacctatgaagatttttgacaacgaccctacacaggatgaaatgagtctagaaggaagctcataccgggggagcttgaaagaccctgcaggctgcctgaatgaggggatggccccacccacacctcctaaaaacccagaagaagaacagaaagccaaggccctgagaggcaggatgtttgtcctgaatgagctggtacagacagagaaagactatgtcaaggatctgggcattgtggtggagggcttcatgaagagaatagaagaaaagggtgtccctgaggatatgcgaggaaaggacaaaatcgtgtttggaaatattcatcagatttatgactggcataaggattttttcctggcggaactggaaaagtgtatccaggagcaagacagattggcacagctctttattaagcacgagcggaagctgcacatctacgtgtggtattgtcagaataagccgcgctcagagtacatcgttgctgagtatgacgcctactttgaggaggtaaaacaggagataaatcagaggctgacactgagtgacttcctcatcaagcccattcagagaataacaaaataccagttgctcctcaaggacttcctgagatacagtgagaaggctggtttggagtgttcagatattgagaaagcagtggagttaatgtgccttgttcccaaacgctgcaatgacatgatgaatctaggacgtctgcagggctttgagggcactctgactgctcaggggaagctgctgcagcaggacacattctatgtgatcgagctggatgcaggcatgcagtcccggaccaaagagaggcgcgtgttcctcttcgagcagattgtcatcttcagtgaactgctcaggaagggatccctcacccctggctacatgttcaaaaggagcatcaagatgaattacttggtcctggaggagaatgtggacaatgatccctgcaagtttgcactcatgaacagagagacttctgagagggttgttctgcaagccgccaacgctgacatccagcaggcctgggtgcaggacatcaatcaagtcttagaaacacagcgagactttttgaatgcactgcaatcgcccattgagtatcaacggaaagaaaggagcacagctgtgatgaggtctcaacctgccaggcttccccaagccagccccaggccctactcctctgttcctgcgggctcagagaagcccccaaagggctccagctataacccacctctgcctcccctgaagatatctacctccaatggcagtccagggtttgaataccaccagcctggggacaagttcgaagccagcaagcagaacgacctgggaggctgcaatgggacctcgtccatggccgtgatcaaagattactatgcactgaaggagaatgaaatctgtgtgagccaaggtgaggtggtccaggtcctcgccgtcaaccagcagaacatgtgtctggtgtaccagcctgccagcgaccattcccccgccgccgagggctgggtcccaggcagcatcctggcgcccctcaccaaagccacagcagcagaaagtagtgacgggagcatcaagaagtcatgttcatggcatactctacgcatgagaaagcgggcggaagtggagaacacgggtaaaaatgaagccacagggcctcgtaaacccaaggatattctgggcaacaaagtctctgttaaagagacgaacagttccgaggaatcagagtgtgatgatcttgaccctaatactagcatggagatcttaaatccaaatttcatccaagaagtggccccagaattccttgtgcccttggtggatgtgacctgcttgcttggggacacagtgatactgcagtgcaaagtctgtgggcggccaaagcccaccatcacttggaagggtccagaccagaacatccttgacactgataacagctcagccacatacacggtctcctcttgtgattctggagaaatcaccctgaagatctgtaatctgatgccccaagacagtgggatttatacctgcatagcaacaaatgaccacgggaccacatcaacgtctgcaacagtcaaagtgcaaggtgttccagcagcccctaaccgccccattgcccaggagagaagctgcacctccgtgattctccgctggctgcccccctccagcacaggaaactgcactatttctggttacactgtggagtacagagaggaaggttctcagatctggcagcagtcagtggcttcgaccttggacacttacctcgtcatcgaagaccttagtcccgggtgtccttatcagttcagagtcagtgccagtaacccctggggaatcagccttcccagcgagccctcggagtttgtgcgacttccagaatatgatgctgctgctgatggtgccaccatttcttggaaggaaaattttgactcagcttacactgagctgaatgaaattggaagaggccgtttctctatagtaaagaaatgcattcacaaagctacccgcaaagatgtggctgtgaaatttgttagcaaaaaaatgaagaagaaagaacaggctgcccacgaggctgccctgcttcagcacctacagcacccccagtacatcactctccatgacacctatgagtcccccacatcctacatcctgatcttggaactgatggatgatggccggctcttagactaccttatgaatcatgatgaactgatggaggaaaaagtagctttctatatccgagacatcatggaggctctgcagtaccttcacaactgcagggttgcacatttggacataaagcctgaaaacctgctcattgacctacggattccagtgcctcgagtgaagctcattgacttggaggatgctgtccagatctcgggtcacttccacattcaccacctgctggggaaccctgagtttgctgccccagaagtcattcaaggcatccccgtctccctggggacagacatctggagcatcggggttctgacatatgtcatgctgagtggggtctcccccttcttggatgagagcaaagaggagacatgtatcaacgtatgcagggtggatttcagcttcccccatgaatacttctgtggtgtgagcaatgctgccagagatttcatcaatgtgatcttacaggaagattttcggaggcggcccacagcagccacatgcttgcagcatccatggctgcagccccataatggcagctactctaagatccccctggacacctcccgcctagcatgcttcatagaacgtcgcaagcaccagaatgatgtgcggcctattcccaatgtcaagagctacattgtcaaccgggtgaaccaagggacgtagccatctcccagcccctatggtttcacatagacgtgcagtgtgaaccaaagcaagactgaatgtgactgtaaataattctgttcatcatttcactccgtgcagttctctgaattgagagatgtacctcttaaacctcgtcagtggttattcagggtctgagcagcagtaaaagtcaccctaaatcaaggggcttttcagaaggtcattctgaagaaataaagaggcaaagggtcacagaagtgttcagaagaagggcaaagataagaacaatattagctgttacgaaattttaactgtatcttccaaaatgagtggttaactgggcaaaccttaagctcacaagagtataaaagatctctggctttgctgaaattttaagcaagaagttctatttaatggagatgtcatgtatatcaactattctggtttagataacttagatatagtttcttaataggatagatacccacatacagtataatatatcccattcaggtttcagagttttctaatatagagatatatatattaaatcaatcacaagtaattttgagtgctccagttaagacagtaatttatttaccgaatcattacattgttttgactaagcacaattagatgacaagtttttttagagcattttatagatcttgtatagaaatcttttaccagaacctgtgcattaagagaaagcaatgttgcccttttgaatgagaaaattttttctgtcaatcgcaggttatttgattaagataggttctttctgtatatgaaacgctccccgcaaattcactggcagctcagaattattctggaaagaaagcctgccaggaaataaattcaaatacagtatgagctgcggggatatttttgtgtctacaccaggtttgaaataagtaaacaaatacaagaggttcatataaaagggcaaatgaaaacctttcctacagttcctatgaacaacgtaccaacactttctgatttcttctacagctgtagaataccatctttcagaaagttggctggctttatttctaactccttattgaagctaaggggtgcttactaaaaggaggcagccatataggccttttaaaggcctggttctaagtcctttttaaagccatggaacaaaacctgatacatcaccctaacagagcattaagttgtaactgagattgcaatacctgtcaccatgcagccgctgatagttctctgaactaaaaggactaattgtactttgaggccaatgctgctttctggtgtatattctccatacaagattattattaactgctctttttccctctggtggaaaaaaaattaaacctgggcatttcatgggttttctttctttatttttgttcatttgttttggagggagggagcttgttttttgtgtttgtacatgatccacccttagttttctagaatgtgtgttgaaaattgcgattatacaagtaagattttaaaaatgtaactcaagtgtttgttcaaatcaggtttaatggtgttgcttctctcctataatgggatagagaaaattaaaatcacgtagtacagaagtgcaagaagagaatttatgaaggatgaatagaactacaaacctatctaaatgaaaaagaaatggtggaaactaagcctgaactttaacatataaaaaacacttattcccacagagaaaatgtaaaattaaaaatcatcatctttttttttcc

SEQ ID NO: 170126 - DNA, 3870 bp, Artificial Sequence
  derived and/or modified sequence
atgaagggcggggaccgggcctacacccggggccccagcctgggctggctgtttgccaagtgctgctgctgcttcccctgcagagatgcctacagccacagcagcagtgaaaatggaggcaagtctgagagcgtggccaacctgcaggcccagcccagcctgaacagcatccacagcagccctggccccaagaggagcaccaacaccctgaagaagtggctgaccagccctgtgcggcggctgaacagcggcaaggcagatggcaacatcaagaagcagaagaaggtgagagatggcaggaagagctttgacctgggcagccccaagccaggagatgagaccaccccccagggcgacagcgcagatgagaagagcaagaagggctggggagaagatgagccagatgaggagagccacacccccctgcccccacccatgaagatctttgacaatgaccccacccaggatgagatgagcagcagcctgctggccgcccggcaggccagcacagaggtgcccacagctgctgacctggtgaatgccatcgagaagctggtgaagaacaagctgagcctggagggcagcagctaccggggcagcctgaaggaccctgctggctgcctgaatgaaggcatggccccacccaccccacccaagaaccctgaggaggagcagaaggccaaggccctgcggggccgcatgtttgtgctgaatgagctggtgcagacagagaaggactatgtgaaggacctgggcatcgtggtggagggcttcatgaagagaattgaggagaagggcgtgcctgaggacatgaggggcaaggacaagatcgtgtttggaaacatccaccagatctatgactggcacaaggacttcttcctggccgagctggagaagtgcatccaggagcaggaccggctggcccagctgttcatcaagcatgagaggaagctgcacatctacgtgtggtactgccagaacaagcccaggtctgagtacatcgtggccgagtatgatgcctactttgaggaggtgaagcaggagatcaaccagaggctgaccctgagtgacttcctgatcaagcccatccagaggatcaccaagtaccagctgctgctgaaggacttcctgcgctacagcgagaaggccggcctggagtgcagcgacatcgagaaggctgtggagctgatgtgcctggtgcccaagcgctgcaatgacatgatgaacctgggccgcctgcagggctttgagggcaccctgacagcccagggcaagctgctgcagcaggacaccttctacgtgattgagctggatgctggcatgcagagcaggaccaaggagcggcgggtcttcctgtttgagcagatcgtcatcttcagcgagctgctgaggaagggcagcctgaccccaggctacatgttcaagaggagcatcaagatgaactacctggtgctggaggagaatgtggacaatgacccctgcaagtttgccctgatgaaccgggagaccagcgagcgggtggtgctgcaggccgccaatgctgacatccagcaggcctgggtgcaggacatcaaccaggtgctggagacccagagggacttcctgaatgccctgcagagccccatcgagtaccagaggaaggagaggagcacagctgtgatgaggagccagcctgcccggctgccccaggccagcccccggccctacagctctgtgcctgctggcagcgagaagccacccaagggcagcagctacaacccccccctgccccccctgaagatcagcaccagcaatggcagccctggctttgagtaccaccagcccggggacaagtttgaggccagcaagcagaatgacctgggcggctgcaatggcaccagctccatggccgtcatcaaggactactatgccctgaaggaaaatgagatctgtgtgtcccagggcgaggtggtgcaggtgctggccgtgaaccagcagaacatgtgcctggtgtaccagcctgccagtgaccacagccctgctgctgagggctgggtgcccggcagcatcctggcccccctgaccaaggccacagctgctgagagcagtgatggcagcatcaagaagagctgctcctggcacaccctgaggatgaggaagagagctgaggtggagaacacaggcaagaatgaggccaccggccccaggaagcccaaggacatcctgggcaacaaggtgtctgtgaaggagaccaacagcagcgaggagagtgaatgtgatgacctggaccccaacacctccatggagatcctgaaccccaacttcatccaggaggtggcccctgagttcctggtgcccctggtggatgtgacctgcctgctgggggacaccgtcatcctgcagtgcaaggtgtgtggccggcccaagcccaccatcacctggaagggccctgaccagaacatcctggacacagacaacagcagcgccacctacacagtgagcagctgtgacagcggggagatcaccctgaagatctgcaacctgatgccccaggacagcggcatctacacctgcatcgccaccaatgaccacggcaccaccagcaccagcgccaccgtgaaggtgcagggcgtgcctgctgcccccaaccggcccatcgcccaggagaggagctgcaccagcgtcatcctgcgctggctgccccccagcagcacaggcaactgcaccatcagcggctacacagtggagtaccgggaggagggcagccagatctggcagcagagcgtggccagcaccctggacacctacctggtgattgaggacctgagccctggctgcccctaccagttccgggtgtctgccagcaacccctggggcatcagcctgcccagcgagcccagcgagtttgtgcggctgcctgaatatgatgctgctgctgatggagccaccatctcctggaaggaaaattttgattctgcctacacagagctgaatgaaattggccggggccgcttcagcatcgtgaagaagtgcatccacaaggccaccaggaaggatgtggccgtgaagtttgtgtccaagaagatgaagaagaaggagcaggccgcccacgaggccgccctgctgcagcacctgcagcacccccagtacatcaccctgcatgacacctatgagagccccaccagctacatcctgatcctggagctgatggatgatggccgcctgctggactacctgatgaaccatgatgagctgatggaggagaaggtggccttctacatccgggacatcatggaggccctgcagtacctgcacaactgccgggtggcccacctggacatcaagccagagaacctgctgattgacctgcgcatccctgtgccccgggtgaagctgattgacctggaggatgctgtgcagatcagcggccacttccacatccaccacctgctgggcaaccctgagtttgctgcccctgaggtgatccagggcatccctgtgtccctgggcacagacatctggagcattggagtgctgacctacgtgatgctgagcggcgtgagccccttcctggatgagagcaaggaggagacctgcatcaacgtgtgccgggtggacttctccttcccccatgagtacttctgtggggtgtccaatgctgcccgggacttcatcaacgtcatcctgcaggaggacttcagaagaagacccacagctgccacctgcctgcagcacccctggctgcagccccacaacggcagctacagcaagatccccctggacaccagccggctggcctgcttcatcgagaggaggaagcaccagaatgatgtgcggcccatccccaacgtgaagagctacatcgtgaacagagtgaaccagggcacctag

SEQ ID NO: 170127 - DNA, 3774 bp, Artificial Sequence
  derived and/or modified sequence
atgaagggcggggaccgggcctacacccggggccccagcctgggctggctgtttgccaagtgctgctgctgcttcccctgcagagatgcctacagccacagcagcagtgaaaatggaggcaagtctgagagcgtggccaacctgcaggcccagcccagcctgaacagcatccacagcagccctggccccaagaggagcaccaacaccctgaagaagtggctgaccagccctgtgcggcggctgaacagcggcaaggcagatggcaacatcaagaagcagaagaaggtgagagatggcaggaagagctttgacctgggcagccccaagccaggagatgagaccaccccccagggcgacagcgcagatgagaagagcaagaagggctggggagaagatgagccagatgaggagagccacacccccctgcccccacccatgaagatctttgacaatgaccccacccaggatgagatgagcctggagggcagcagctaccggggcagcctgaaggaccctgctggctgcctgaatgaaggcatggccccacccaccccacccaagaaccctgaggaggagcagaaggccaaggccctgcggggccgcatgtttgtgctgaatgagctggtgcagacagagaaggactatgtgaaggacctgggcatcgtggtggagggcttcatgaagagaattgaggagaagggcgtgcctgaggacatgaggggcaaggacaagatcgtgtttggaaacatccaccagatctatgactggcacaaggacttcttcctggccgagctggagaagtgcatccaggagcaggaccggctggcccagctgttcatcaagcatgagaggaagctgcacatctacgtgtggtactgccagaacaagcccaggtctgagtacatcgtggccgagtatgatgcctactttgaggaggtgaagcaggagatcaaccagaggctgaccctgagtgacttcctgatcaagcccatccagaggatcaccaagtaccagctgctgctgaaggacttcctgcgctacagcgagaaggccggcctggagtgcagcgacatcgagaaggctgtggagctgatgtgcctggtgcccaagcgctgcaatgacatgatgaacctgggccgcctgcagggctttgagggcaccctgacagcccagggcaagctgctgcagcaggacaccttctacgtgattgagctggatgctggcatgcagagcaggaccaaggagcggcgggtcttcctgtttgagcagatcgtcatcttcagcgagctgctgaggaagggcagcctgaccccaggctacatgttcaagaggagcatcaagatgaactacctggtgctggaggagaatgtggacaatgacccctgcaagtttgccctgatgaaccgggagaccagcgagcgggtggtgctgcaggccgccaatgctgacatccagcaggcctgggtgcaggacatcaaccaggtgctggagacccagagggacttcctgaatgccctgcagagccccatcgagtaccagaggaaggagaggagcacagctgtgatgaggagccagcctgcccggctgccccaggccagcccccggccctacagctctgtgcctgctggcagcgagaagccacccaagggcagcagctacaacccccccctgccccccctgaagatcagcaccagcaatggcagccctggctttgagtaccaccagcccggggacaagtttgaggccagcaagcagaatgacctgggcggctgcaatggcaccagctccatggccgtcatcaaggactactatgccctgaaggaaaatgagatctgtgtgtcccagggcgaggtggtgcaggtgctggccgtgaaccagcagaacatgtgcctggtgtaccagcctgccagtgaccacagccctgctgctgagggctgggtgcccggcagcatcctggcccccctgaccaaggccacagctgctgagagcagtgatggcagcatcaagaagagctgctcctggcacaccctgaggatgaggaagagagctgaggtggagaacacaggcaagaatgaggccaccggccccaggaagcccaaggacatcctgggcaacaaggtgtctgtgaaggagaccaacagcagcgaggagagtgaatgtgatgacctggaccccaacacctccatggagatcctgaaccccaacttcatccaggaggtggcccctgagttcctggtgcccctggtggatgtgacctgcctgctgggggacaccgtcatcctgcagtgcaaggtgtgtggccggcccaagcccaccatcacctggaagggccctgaccagaacatcctggacacagacaacagcagcgccacctacacagtgagcagctgtgacagcggggagatcaccctgaagatctgcaacctgatgccccaggacagcggcatctacacctgcatcgccaccaatgaccacggcaccaccagcaccagcgccaccgtgaaggtgcagggcgtgcctgctgcccccaaccggcccatcgcccaggagaggagctgcaccagcgtcatcctgcgctggctgccccccagcagcacaggcaactgcaccatcagcggctacacagtggagtaccgggaggagggcagccagatctggcagcagagcgtggccagcaccctggacacctacctggtgattgaggacctgagccctggctgcccctaccagttccgggtgtctgccagcaacccctggggcatcagcctgcccagcgagcccagcgagtttgtgcggctgcctgaatatgatgctgctgctgatggagccaccatctcctggaaggaaaattttgattctgcctacacagagctgaatgaaattggccggggccgcttcagcatcgtgaagaagtgcatccacaaggccaccaggaaggatgtggccgtgaagtttgtgtccaagaagatgaagaagaaggagcaggccgcccacgaggccgccctgctgcagcacctgcagcacccccagtacatcaccctgcatgacacctatgagagccccaccagctacatcctgatcctggagctgatggatgatggccgcctgctggactacctgatgaaccatgatgagctgatggaggagaaggtggccttctacatccgggacatcatggaggccctgcagtacctgcacaactgccgggtggcccacctggacatcaagccagagaacctgctgattgacctgcgcatccctgtgccccgggtgaagctgattgacctggaggatgctgtgcagatcagcggccacttccacatccaccacctgctgggcaaccctgagtttgctgcccctgaggtgatccagggcatccctgtgtccctgggcacagacatctggagcattggagtgctgacctacgtgatgctgagcggcgtgagccccttcctggatgagagcaaggaggagacctgcatcaacgtgtgccgggtggacttctccttcccccatgagtacttctgtggggtgtccaatgctgcccgggacttcatcaacgtcatcctgcaggaggacttcagaagaagacccacagctgccacctgcctgcagcacccctggctgcagccccacaacggcagctacagcaagatccccctggacaccagccggctggcctgcttcatcgagaggaggaagcaccagaatgatgtgcggcccatccccaacgtgaagagctacatcgtgaacagagtgaaccagggcacctag

SEQ ID NO: 170128 - DNA, 3870 bp, Artificial Sequence
  derived and/or modified sequence
atgaagggcggcgaccgggcctacacccggggccccagcctgggctggctgttcgcaaaatgttgctgttgttttccgtgcagggatgcctactcacactcttcatcagaaaatggagggaagtccgagagtgtggctaatctgcaggcccaaccatcactcaatagcatccactctagcccaggccccaagcggtcaacaaataccttgaagaagtggctgactagccctgtgagacgcctcaatagtggaaaggctgatggaaatatcaaaaagcagaagaaagttagggacggccgtaaaagcttcgatctgggctccccaaaacctggagatgagacgacacctcagggcgactcagcagatgagaaatctaaaaagggctggggggaggacgagccagacgaggagagccacacaccacttccccccccaatgaaaattttcgacaacgatccgacacaagacgagatgtctagttcactgctggctgctcgccaggcgtctactgaggtacctacagccgccgacctagtcaacgcaatagaaaagctggtcaagaacaagctaagtctagaaggctctagttatagaggctctctgaaggatccagctgggtgcttaaatgagggcatggcaccgcccacgcctccgaaaaatcccgaggaagagcagaaagccaaggccttaagaggacggatgttcgtgctcaacgagctagtgcagaccgagaaggattatgttaaggatctagggatcgtggtggagggatttatgaaacgcatcgaagagaaaggagttcctgaggacatgcgcggcaaggacaagatcgtcttcggcaatattcaccagatctatgattggcacaaggatttctttctagcagagctagagaaatgtatccaggagcaggacagactggcacagctgtttataaagcacgaacgtaagctacatatctacgtctggtattgtcagaacaagccaagaagtgagtacatcgtcgctgagtatgacgcctacttcgaggaggtgaaacaggagatcaatcagaggctgaccttatcagacttcttgataaagcccattcaaaggatcacaaaatatcaactgctgctgaaagactttctccgttactccgagaaagccggattggaatgttccgatattgagaaagccgtggagcttatgtgcctggtgccaaaacgctgcaatgatatgatgaacctcggaagattgcagggatttgagggaactctgacagcccaaggcaaactgctgcaacaggacactttctacgtgattgagctggacgcagggatgcagtcccggacaaaagaacgccgcgttttcctgttcgagcagatcgtcatcttttccgaactgctgcggaagggctcgttgactcccgggtatatgttcaaacgctctatcaaaatgaattacctcgtcctggaggaaaacgtggacaatgatccttgcaagttcgcattgatgaacagagagacctcagaacgggtcgtgttgcaagcagccaatgcagacattcagcaagcctgggttcaggacattaaccaggtgttagagacacagagagactttctcaacgccctgcaatcccccatcgagtatcagcgtaaggagcgcagtaccgccgtaatgcgatcccagccagcgaggctgcctcaggccagtcccaggccctactccagcgtacccgcgggctccgagaaaccgccgaaagggtcatcttataacccacccctgccccccctgaaaatctcaacctctaatgggagtcccggctttgaataccaccagcctggtgacaaattcgaagcctcaaaacagaacgacctcggaggatgcaatggtacgagtagtatggctgtgataaaagattattatgctcttaaggagaacgaaatttgtgtgagtcagggagaagtcgttcaagttctagccgtgaaccagcaaaacatgtgtttagtgtaccagccggctagtgatcacagccccgccgcggagggttgggtgccaggcagtatcctggctccacttaccaaagcaaccgcagctgaaagctctgatggctcaatcaagaagtcctgttcctggcataccttgagaatgcgcaaaagggctgaagtagagaatacaggtaaaaacgaggcaacggggcccaggaagccgaaggatatcctggggaataaggtcagtgtcaaagaaacaaactcttcagaggaatctgagtgcgatgacctggatccaaataccagtatggagattttaaatcccaactttatacaggaagttgcaccggaattcctggttccacttgtagatgtcacttgcctgctcggcgatacagtcatccttcagtgtaaagtctgcgggagacctaagcccactattacatggaaaggccctgaccaaaatattttagacaccgataattcctccgccacctacactgtgtcatcctgtgactcaggcgaaataaccctgaagatctgcaatcttatgccacaggattcgggaatctacacttgcatcgccacgaacgaccatggaactacatccaccagcgccacagtcaaagttcagggagtgcctgcagctccaaaccgtcccatcgcgcaagagcgttcttgcacatccgtgattcttaggtggctcccaccctcgagtaccgggaactgcacaatcagtgggtataccgtggaatatagggaggagggcagccagatctggcaacagagcgtggcttctacgctggacacttacctggtgattgaggacctgagccccggctgtccatatcagttcagagtaagcgccagcaacccttgggggatcagcctgccaagcgagccttctgagtttgtaaggctgcctgaatacgatgctgctgctgatggcgcgacaataagctggaaggagaactttgacagcgcatacactgagttgaacgaaatcggtcgcgggagattcagcatagtgaagaaatgcattcataaagcgaccaggaaggatgttgccgtgaagtttgtgtctaagaaaatgaaaaaaaaggaacaggcggcacatgaggcagccctgcttcagcacctacagcacccacaatacataactctgcacgatacctacgaaagccctacaagctacattctgattctggagctgatggacgatggccgactgttagactacctgatgaatcatgacgagctcatggaagagaaggtcgcattttacattagagacatcatggaagctttacagtatcttcacaattgccgcgtggcccatctggatatcaagcccgagaacttactaatagacctgcggataccagtaccaagggtgaaactgattgacctggaggatgcagtgcagattagtggccacttccacatccatcacttattgggtaatcctgagttcgccgctcctgaagtgatccaaggtatccctgtctctctgggcacagatatctggagcattggcgtactgacctatgtcatgttgtcaggagtcagccccttcttagacgagtcgaaagaggaaacctgtatcaacgtttgtcgcgtcgacttcagctttcctcacgaatacttctgtggcgtatctaacgctgcccgtgatttcatcaatgtgatccttcaggaggattttagacgtaggcccaccgcagcaacttgcttgcagcacccctggttacagcctcacaacggctcttatagcaagatccctctcgacacttcaagactagcgtgtttcatagagcggaggaagcaccagaacgacgtgcgacctatacctaacgtaaaatcatatattgtcaacagggtaaaccaaggaacatag

SEQ ID NO: 170129 - DNA, 3774 bp, Artificial Sequence
  derived and/or modified sequence
atgaagggcggcgaccgggcctacacccggggccccagcctgggctggctcttcgcaaaatgctgttgctgtttcccttgtagggatgcctattcccattctagtagcgaaaacggcgggaagtctgagtcggtcgctaacctgcaggcgcagccaagcctgaactccatacatagtagccccggccccaagagatctacaaacactcttaagaagtggctgacatcacctgtgcgccgtttgaactcagggaaggccgacggaaacattaagaagcagaagaaagtcagggacgggagaaagtcttttgacttaggatcacccaaaccaggggatgagaccactcctcagggcgacagcgccgatgagaaaagcaagaagggatggggcgaggacgagcccgatgaggagtcccacacacccctgccacctcctatgaagattttcgacaatgatcccacccaggacgagatgtctttagagggcagctcgtaccgggggtccctcaaagaccccgcaggatgtctgaatgagggaatggctccaccaacgcctccaaagaacccggaggaggaacagaaagccaaagctttgagaggacggatgtttgtcctgaatgaactagtacagaccgaaaaagactatgttaaagacctcgggatcgttgtggaggggttcatgaagcgaatcgaggaaaaaggcgtgccagaagatatgcgaggtaaagacaagatagtattcggcaatatccaccagatttatgactggcataaggatttctttcttgcagagcttgaaaaatgcattcaggaacaggataggctagcacaacttttcataaagcatgaaaggaaattgcatatatatgtgtggtactgtcagaacaagccccgttccgagtacattgtcgcagagtacgacgcgtatttcgaggaagtgaagcaggagatcaatcagaggttaaccctgtccgatttcttgataaagcccatacaacgaattacaaaataccagctgctcttgaaggattttctaaggtacagcgagaaggctggactggaatgttctgatatcgagaaggctgtagagctgatgtgtttagtgccaaagcggtgtaatgacatgatgaacctgggccgactgcaggggttcgaaggaacattaacggcccaggggaagctgctgcagcaagataccttctacgtcatcgagctggatgccggcatgcaatctagaaccaaggagcgccgtgtgttcttattcgaacaaattgtgatcttctccgaactgttaagaaagggatcactgacgcccggttacatgttcaagcgaagtattaagatgaattacctagtgttggaagagaatgtagacaacgatccttgtaagtttgcactgatgaacagagagaccagtgaacgcgtggtgctccaggctgccaatgccgatatccagcaggcttgggtccaggatatcaatcaagtcctcgagactcagcgagacttcttgaatgccctgcagagcccaatcgaataccagagaaaagagcgcagcaccgctgtgatgcgcagccagcccgcccgtttgcctcaggccagcccaagaccctactccagcgtgccggctggttccgaaaaaccccctaaggggtcttcatataacccgccattgcctccactaaagatttctaccagcaatggctcgcctggttttgagtaccaccaacctggggacaaattcgaagcctccaaacagaatgaccttgggggctgtaatggaaccagctctatggctgtgatcaaggattactatgccctcaaggagaatgaaatctgtgttagtcaaggggaggtagtccaggtgctggctgtgaaccaacagaacatgtgcttagtttatcagccggcatccgatcacagccccgctgctgagggctgggtccctggttcaatcctggcaccacttaccaaggccacagccgctgaatcgtcagatggaagcattaagaagtcttgtagctggcacaccctgagaatgaggaagagagcagaggtggaaaacacaggtaagaatgaggccaccggacctagaaagccaaaggatatccttggaaataaagtgagtgttaaagaaactaactccagcgaggaatcagaatgtgacgaccttgatcctaatacgtccatggagatcctaaaccctaatttcatccaggaagtggctcccgaatttttggttcccttggtggacgtcacatgcttgctcggtgacacagtaatactccagtgcaaagtgtgcggccggcctaaacctacgatcacgtggaaaggccccgatcagaatatcctggataccgacaattcaagtgccacatatactgtctccagctgtgattctggagagatcaccctgaaaatatgtaaccttatgccacaggactcgggaatttacacctgcatagctacaaatgaccacggtacgaccagtacgagcgctaccgtaaaggtccagggggtacccgccgcccctaatcggccaatagcccaggaacgtagttgtacatcagtaattcttcggtggttgcccccgagtagcactggcaattgcactatttcggggtacaccgtggaatatagagaggaaggatctcagatctggcaacagtccgtggcctccactctggatacgtatttggtcatcgaggacctcagccccggctgcccttaccaattcagagtcagcgctagcaacccttggggcatctcgcttccctctgagccatccgaatttgtcagactgcccgagtacgacgccgctgctgatggggctactatctcctggaaagaaaactttgacagcgcatacactgagctcaatgagattggcagaggaagattctctatcgttaagaaatgcattcataaagccaccagaaaggacgttgccgtgaaattcgtatcaaagaaaatgaaaaagaaggaacaggccgctcacgaagccgccttgctacaacatctccaacaccctcagtacatcactctgcacgacacatacgagtcacctaccagctatattttaattctggaacttatggatgacggaagactgctggactacctcatgaaccatgacgaactgatggaagagaaggttgccttctatatccgcgatatcatggaagccctacagtatttacataactgcagggtggcacatctcgatatcaaacctgagaatctactaatcgatctcaggatccccgtgcccagggtgaaactgatcgacctggaagatgctgtgcagatctcgggacacttccatattcatcatttgctcggtaatccggagttcgcagctcccgaagtcattcaaggaatccccgttagcctcggcactgacatctggtcaataggcgtgctgacttatgtgatgctctcgggggtcagcccttttttggatgagagtaaggaggagacttgcattaatgtgtgcagggtggatttcagtttcccgcacgagtacttttgcggggtgtccaacgccgctcgcgacttcatcaacgtcatcctccaggaagacttccgaaggcgtcctaccgccgccacatgtctgcagcatccctggctgcagccacataatggctcatactcaaagattccgctggataccagcagattggcttgctttatcgaacggcgcaagcaccagaacgacgtgcgcccgattcccaacgtgaagtcttacatcgttaatcgagtgaatcagggaacttag

SEQ ID NO: 170130 - DNA, 3870 bp, Artificial Sequence
  derived and/or modified sequence
atgaagggcggtgatcgagcctacacccgcggtccctccctcggctggctgttcgcaaaatgttgttgctgcttcccttgcagggatgcttacagccacagctcttccgagaacgggggtaagtccgagtccgttgcaaacctgcaggcccagcccagtttgaactctattcattcttctcccggacctaagcgtagcaccaacacactcaagaaatggctgacctcacccgtcaggagattgaactcaggaaaggcagatggcaacataaagaaacagaaaaaagtgagagatggacgaaagtccttcgacctgggaagcccaaaacccggtgatgaaactacaccacagggagatagtgctgatgagaagtccaagaaaggctggggcgaagacgaacctgacgaggagtcccatactccgttgccacctccaatgaagatcttcgataacgatcccacccaagacgagatgtcgtcatctttgcttgcggctcgccaggcctccactgaagtgccgacagccgctgatctggtcaatgcaatcgagaaactggtgaaaaacaaactgtctctagagggttcaagctatcgtggatcattgaaggatcctgccggttgcttaaacgagggaatggcaccccctactccacctaaaaatccagaagaggagcagaaggccaaagccctgcgcggtcggatgtttgtacttaacgagctggtccaaaccgagaaggattacgtcaaagacttgggaattgtcgtggaagggtttatgaaaaggattgaggaaaaaggggtccctgaagatatgcgaggcaaggacaagatagtcttcggcaacattcaccaaatctatgactggcacaaagatttcttcctggccgagcttgagaaatgtatacaggaacaggacagactggcccagctgttcatcaagcacgagcgcaagttgcatatctacgtctggtattgtcaaaacaagcctaggtctgaatatatagtggctgagtacgacgcctactttgaggaggtgaagcaagagattaaccagcgcctcactctctcagactttcttatcaaacccattcagcgcatcaccaaatatcagctcttgctaaaagattttctgcgatactccgaaaaggctggcttggagtgtagcgatattgagaaagccgtcgagctgatgtgtctggtgcccaaaagatgtaatgatatgatgaacctcggcagactgcagggcttcgaaggtaccctcactgcccaaggcaagctgctccaacaagatacattttacgtcatcgagctggacgccggtatgcagagcaggaccaaagaacggagggtttttcttttcgagcagattgtaatcttcagcgagctcttgagaaagggcagcttgacacctggctatatgtttaagcggtccattaagatgaattatcttgtcctggaggaaaacgtcgacaacgacccatgcaagtttgccctcatgaatcgagagacatctgaaagggttgtgctccaggctgcaaacgccgacatccagcaggcttgggtgcaggatataaaccaggtcctcgaaacacagagggattttcttaatgcacttcagtctccaatagaatatcagaggaaggaaagatctacagccgtaatgcggtcacagcctgctcgtcttccacaggccagcccccgaccctatagttcggtgccagctggctccgaaaagccacctaaaggcagctcttacaacccacccctgccccctctcaagatatcaacttctaatggcagccccggtttcgagtatcaccagccaggggacaaattcgaggctagcaaacagaatgaccttggtggctgtaacggcactagttctatggccgtcatcaaagactactatgcccttaaggagaacgagatctgcgtgtcgcaaggagaagtcgtgcaggttcttgcagtcaaccagcagaatatgtgtttggtgtatcagcccgcatctgaccattctcctgccgctgagggctgggttcccggttcaatcctggctcccctcacgaaggcgaccgcagcagaatcttctgatggctcaattaaaaaatcctgcagctggcacactctgaggatgcggaaaagagctgaggtcgagaacaccggaaagaacgaagcgaccggacctcgcaaacccaaggacatccttgggaacaaggtgtcagtgaaggagactaactctagcgaggagagcgaatgcgacgatctggatccaaatacctcgatggagattctgaatccgaactttatacaggaggtggcaccagagttcctcgtccccctggtggatgtcacatgtctcctgggcgatactgtgatcctgcagtgtaaggtatgcggccgtccgaagcccactatcacctggaagggccctgatcaaaatatactggataccgacaattcaagcgccacatacacagtgtcctcgtgcgactcaggcgagataaccctcaagatttgcaaccttatgccccaggactcaggaatatacacctgtatcgccactaatgatcacgggacaacttcaaccagtgccaccgttaaagtgcagggcgtgcccgctgccccaaatagaccaattgcccaggaacgctcctgcacttcagttatcctgaggtggctaccacctagtagcacaggcaattgcacaattagtggatatactgtggaatacagagaggagggatctcagatctggcaacagagcgtagccagcacacttgacacgtaccttgtcattgaggacctgtcccccggttgtccttaccagtttcgtgtctcggcgtcaaatccttggggcattagcctaccgtccgaaccttcggaatttgtcaggctacctgaatatgatgcagctgcagacggagctaccatctcatggaaagaaaattttgacagtgcctacacggagctaaacgaaattggacggggacgattctctattgtgaagaaatgtattcacaaagctacacggaaagatgtcgctgttaagttcgtcagcaagaagatgaagaagaaggaacaggccgctcatgaggccgcactgcttcagcacctgcaacatcctcagtatatcacgctacacgacacctacgaatcccccacttcgtatatcctgatattggaactgatggacgacggacgattgctcgactatttgatgaatcacgacgagttgatggaagaaaaagtagcgttctacatcagggacattatggaggctcttcagtatcttcacaattgccgagtggctcacctcgatatcaagccagaaaacctcttgattgacctgcggatccctgtgcccagggtgaagctgatcgatttagaggacgctgtgcagatcagcggccattttcatatacaccatttgctcggtaatcccgaatttgctgccccagaagtcatccagggcatccctgtctccttagggactgatatttggtcaataggagtgcttacctatgtaatgttgagcggagtgagcccatttttggacgagtccaaggaggaaacttgcataaacgtgtgtcgcgtagacttttccttcccgcatgaatacttttgcggggtgagtaatgccgcaagagactttatcaatgttattttgcaggaggatttcagacggcgacccaccgctgccacgtgcttacagcacccatggctccagccacataatggctcgtacagtaagatacccctcgacacttccagactggcctgctttatcgagagacgaaagcaccagaacgacgtcagacccataccaaatgtaaagagctacattgtgaatagagtgaatcagggtacctag

SEQ ID NO: 170131 - DNA, 3774 bp, Artificial Sequence
  derived and/or modified sequence
atgaagggaggcgacagagcttatacccgcggaccctcacttggttggttattcgccaaatgctgctgttgcttcccatgcagagatgcatatagccatagtagctccgagaacggcggaaaaagcgagtccgtcgctaatttgcaggcccaacctagtcttaactctatccatagttcccccggacctaagcggtcaaccaataccctcaagaaatggctcacttcccctgttagacggctgaactccggaaaggcagatggaaatattaagaaacagaagaaagttcgagatggtcgaaagtccttcgatctaggcagccctaaaccaggcgacgaaactactccccaaggagacagtgcggacgaaaagtctaaaaagggctggggagaggacgaacccgacgaggagtcacatacccctctgcctccaccgatgaaaatcttcgataatgatccgactcaggacgaaatgtccctcgaaggttccagctatagaggaagccttaaggatccagcaggttgtttaaatgagggcatggccccacccacaccccctaagaatcctgaagaggaacagaaggctaaggccctccggggaaggatgttcgttttgaatgagttggttcagacggaaaaggactacgtcaaggacctgggcatcgttgtagaaggcttcatgaagcggatagaagagaaaggcgttcctgaggatatgaggggaaaggacaaaattgtgttcggcaacattcaccaaatttacgattggcataaggacttctttttggcagagctggagaagtgtattcaggaacaggacaggcttgctcaactgttcatcaaacacgaaagaaaattacacatttacgtctggtactgccagaacaagcctcgttccgagtatatcgtggcggaatacgacgcatatttcgaggaagttaaacaagaaattaaccagcgtctgaccctaagcgatttcctgatcaagccaattcagagaataacaaaatatcagttgctcctgaaggattttctgaggtactccgagaaggcaggcctggaatgttccgatatcgagaaagctgtggaactgatgtgcctggttcctaagcggtgcaacgacatgatgaatctggggcgacttcaggggtttgaaggcaccttgaccgctcagggaaagctgttgcagcaggatacattctacgtcatagagctcgacgcgggaatgcagagccgcacgaaagagcgacgagtctttctttttgaacagatcgtgattttcagtgagttgctgagaaagggtagtctgacacccggttacatgtttaagcgctctatcaaaatgaactacctggtgctggaagagaatgtagataacgatccatgcaagttcgcgctgatgaaccgagaaacatccgagcgcgtggtgctgcaagcggcaaacgcggacattcagcaggcgtgggtgcaggacattaatcaagtattagagacacagcgggatttcttaaatgccctgcaatcaccaattgagtatcagcggaaagagaggtctaccgctgtcatgcggtctcagcctgctcgtctacctcaggcatccccacgaccatactcgtcagtacccgcagggtcagagaaacctcccaaaggttctagttataacccaccccttcccccacttaaaatctcaaccagcaacggcagtcccggatttgaatatcaccagcccggagacaagtttgaggctagtaagcaaaatgatctggggggttgtaacgggacgtcctctatggctgtgataaaagactactacgccctcaaagagaatgaaatctgcgtttctcagggcgaggtggtccaggtgctggcagtgaaccagcaaaacatgtgtctcgtgtatcaaccggcatcagatcacagtcctgcagccgagggatgggtgcccggatccatattagcccctctgactaaagctaccgcagccgaatcatctgatggtagtatcaaaaaaagctgttcctggcacacactgcggatgagaaaaagagcagaagtggagaacactggcaaaaatgaggccacagggccacggaagcctaaagacatccttggaaacaaggtaagcgttaaagaaactaattcttcagaagagtccgagtgtgacgacctcgatccaaataccagcatggaaattctcaaccctaatttcatccaggaagtcgcgccagagtttctggtgcctctcgtggacgtgacatgcctgctaggcgacacagtcattctgcaatgcaaggtatgcggccgtcccaaacctaccatcacatggaaaggaccagatcagaacatcctcgacacggacaatagctctgccacttacacagtgtctagctgcgacagcggggagattaccttgaaaatttgcaacctgatgcctcaggactctggaatttacacctgtatagccaccaacgaccatggtactacgtctacatccgcgaccgtgaaagtgcagggcgtcccagcagctcccaatcgccctatcgcacaagagcggtcatgtacgtctgtcatccttaggtggctgcccccaagctccaccggcaattgcacaatctctgggtatacagtcgagtaccgagaagagggaagtcagatctggcagcaatctgttgcctccacactggatacctatctggtaatcgaagatttgtccccaggttgcccttatcaatttagggtgtccgcatcaaatccatggggaataagtctgccatcagaaccatccgagttcgtccgattgcccgaatacgacgctgccgcagatggagccaccatctcctggaaggagaattttgatagcgcgtacacagaactgaacgagatcgggagggggcgatttagcattgttaagaaatgtatccataaggcaacccgcaaggatgtcgctgtcaagtttgtgtcgaaaaaaatgaaaaagaaggaacaggcagcccacgaggccgcattgttacaacatctgcagcatcctcagtatatcaccttgcacgatacctacgagagtccaacaagttacatcctaatcctggagctaatggacgacggaaggctcttagactatctcatgaaccacgatgagctgatggaggagaaggtcgctttctacatccgggacatcatggaggctttgcaataccttcacaattgtcgggtggcccatctcgacatcaaaccagagaatctgcttattgacctgcgtataccagtgcccagggttaagctgatcgacctcgaggacgcagtgcagatcagcggtcacttccacatccatcatctgctgggcaatccagagtttgccgctcccgaggtgattcaaggaatcccagtgagcctcggcaccgatatctggagcattggtgtgctgacttacgttatgctttccggtgtaagccctttcctagatgaaagcaaggaagaaacatgcatcaacgtttgtcgggtggattttagcttccctcatgagtacttttgcggcgtgtctaatgctgccagagatttcataaacgtgatccttcaagaggactttcgcaggaggcccaccgccgcaacatgtctgcagcacccttggttgcaaccacacaatgggtcctacagcaagataccacttgacacctcccgcctcgcatgtttcatcgagcggcgtaaacaccagaatgatgttcggccaatcccgaacgtcaaatcttacattgtgaatcgcgtcaaccagggaacctag

SEQ ID NO: 170132 - DNA, 3870 bp, Artificial Sequence
  derived and/or modified sequence
atgaagggcggcgacagagcctacaccagaggccccagcctgggctggctgttcgccaagtgctgctgctgcttcccctgcagagacgcctacagccacagcagcagcgagaacggcggcaagagcgagagcgtggccaacctgcaggcccagcccagcctgaacagcatccacagcagccccggccccaagagaagcaccaacaccctgaagaagtggctgaccagccccgtgagaagactgaacagcggcaaggccgacggcaacatcaagaagcagaagaaggtgagagacggcagaaagagcttcgacctgggcagccccaagcccggcgacgagaccaccccccagggcgacagcgccgacgagaagagcaagaagggctggggcgaggacgagcccgacgaggagagccacacccccctgcccccccccatgaagatcttcgacaacgaccccacccaggacgagatgagcagcagcctgctggccgccagacaggccagcaccgaggtgcccaccgccgccgacctggtgaacgccatcgagaagctggtgaagaacaagctgagcctggagggcagcagctacagaggcagcctgaaggaccccgccggctgcctgaacgagggcatggccccccccaccccccccaagaaccccgaggaggagcagaaggccaaggccctgagaggcagaatgttcgtgctgaacgagctggtgcagaccgagaaggactacgtgaaggacctgggcatcgtggtggagggcttcatgaagagaatcgaggagaagggcgtgcccgaggacatgagaggcaaggacaagatcgtgttcggcaacatccaccagatctacgactggcacaaggacttcttcctggccgagctggagaagtgcatccaggagcaggacagactggcccagctgttcatcaagcacgagagaaagctgcacatctacgtgtggtactgccagaacaagcccagaagcgagtacatcgtggccgagtacgacgcctacttcgaggaggtgaagcaggagatcaaccagagactgaccctgagcgacttcctgatcaagcccatccagagaatcaccaagtaccagctgctgctgaaggacttcctgagatacagcgagaaggccggcctggagtgcagcgacatcgagaaggccgtggagctgatgtgcctggtgcccaagagatgcaacgacatgatgaacctgggcagactgcagggcttcgagggcaccctgaccgcccagggcaagctgctgcagcaggacaccttctacgtgatcgagctggacgccggcatgcagagcagaaccaaggagagaagagtgttcctgttcgagcagatcgtgatcttcagcgagctgctgagaaagggcagcctgacccccggctacatgttcaagagaagcatcaagatgaactacctggtgctggaggagaacgtggacaacgacccctgcaagttcgccctgatgaacagagagaccagcgagagagtggtgctgcaggccgccaacgccgacatccagcaggcctgggtgcaggacatcaaccaggtgctggagacccagagagacttcctgaacgccctgcagagccccatcgagtaccagagaaaggagagaagcaccgccgtgatgagaagccagcccgccagactgccccaggccagccccagaccctacagcagcgtgcccgccggcagcgagaagccccccaagggcagcagctacaacccccccctgccccccctgaagatcagcaccagcaacggcagccccggcttcgagtaccaccagcccggcgacaagttcgaggccagcaagcagaacgacctgggcggctgcaacggcaccagcagcatggccgtgatcaaggactactacgccctgaaggagaacgagatctgcgtgagccagggcgaggtggtgcaggtgctggccgtgaaccagcagaacatgtgcctggtgtaccagcccgccagcgaccacagccccgccgccgagggctgggtgcccggcagcatcctggcccccctgaccaaggccaccgccgccgagagcagcgacggcagcatcaagaagagctgcagctggcacaccctgagaatgagaaagagagccgaggtggagaacaccggcaagaacgaggccaccggccccagaaagcccaaggacatcctgggcaacaaggtgagcgtgaaggagaccaacagcagcgaggagagcgagtgcgacgacctggaccccaacaccagcatggagatcctgaaccccaacttcatccaggaggtggcccccgagttcctggtgcccctggtggacgtgacctgcctgctgggcgacaccgtgatcctgcagtgcaaggtgtgcggcagacccaagcccaccatcacctggaagggccccgaccagaacatcctggacaccgacaacagcagcgccacctacaccgtgagcagctgcgacagcggcgagatcaccctgaagatctgcaacctgatgccccaggacagcggcatctacacctgcatcgccaccaacgaccacggcaccaccagcaccagcgccaccgtgaaggtgcagggcgtgcccgccgcccccaacagacccatcgcccaggagagaagctgcaccagcgtgatcctgagatggctgccccccagcagcaccggcaactgcaccatcagcggctacaccgtggagtacagagaggagggcagccagatctggcagcagagcgtggccagcaccctggacacctacctggtgatcgaggacctgagccccggctgcccctaccagttcagagtgagcgccagcaacccctggggcatcagcctgcccagcgagcccagcgagttcgtgagactgcccgagtacgacgccgccgccgacggcgccaccatcagctggaaggagaacttcgacagcgcctacaccgagctgaacgagatcggcagaggcagattcagcatcgtgaagaagtgcatccacaaggccaccagaaaggacgtggccgtgaagttcgtgagcaagaagatgaagaagaaggagcaggccgcccacgaggccgccctgctgcagcacctgcagcacccccagtacatcaccctgcacgacacctacgagagccccaccagctacatcctgatcctggagctgatggacgacggcagactgctggactacctgatgaaccacgacgagctgatggaggagaaggtggccttctacatcagagacatcatggaggccctgcagtacctgcacaactgcagagtggcccacctggacatcaagcccgagaacctgctgatcgacctgagaatccccgtgcccagagtgaagctgatcgacctggaggacgccgtgcagatcagcggccacttccacatccaccacctgctgggcaaccccgagttcgccgcccccgaggtgatccagggcatccccgtgagcctgggcaccgacatctggagcatcggcgtgctgacctacgtgatgctgagcggcgtgagccccttcctggacgagagcaaggaggagacctgcatcaacgtgtgcagagtggacttcagcttcccccacgagtacttctgcggcgtgagcaacgccgccagagacttcatcaacgtgatcctgcaggaggacttcagaagaagacccaccgccgccacctgcctgcagcacccctggctgcagccccacaacggcagctacagcaagatccccctggacaccagcagactggcctgcttcatcgagagaagaaagcaccagaacgacgtgagacccatccccaacgtgaagagctacatcgtgaacagagtgaaccagggcacctag

SEQ ID NO: 170133 - DNA, 3774 bp, Artificial Sequence
  derived and/or modified sequence
atgaagggcggcgacagagcctacaccagaggccccagcctgggctggctgttcgccaagtgctgctgctgcttcccctgcagagacgcctacagccacagcagcagcgagaacggcggcaagagcgagagcgtggccaacctgcaggcccagcccagcctgaacagcatccacagcagccccggccccaagagaagcaccaacaccctgaagaagtggctgaccagccccgtgagaagactgaacagcggcaaggccgacggcaacatcaagaagcagaagaaggtgagagacggcagaaagagcttcgacctgggcagccccaagcccggcgacgagaccaccccccagggcgacagcgccgacgagaagagcaagaagggctggggcgaggacgagcccgacgaggagagccacacccccctgcccccccccatgaagatcttcgacaacgaccccacccaggacgagatgagcctggagggcagcagctacagaggcagcctgaaggaccccgccggctgcctgaacgagggcatggccccccccaccccccccaagaaccccgaggaggagcagaaggccaaggccctgagaggcagaatgttcgtgctgaacgagctggtgcagaccgagaaggactacgtgaaggacctgggcatcgtggtggagggcttcatgaagagaatcgaggagaagggcgtgcccgaggacatgagaggcaaggacaagatcgtgttcggcaacatccaccagatctacgactggcacaaggacttcttcctggccgagctggagaagtgcatccaggagcaggacagactggcccagctgttcatcaagcacgagagaaagctgcacatctacgtgtggtactgccagaacaagcccagaagcgagtacatcgtggccgagtacgacgcctacttcgaggaggtgaagcaggagatcaaccagagactgaccctgagcgacttcctgatcaagcccatccagagaatcaccaagtaccagctgctgctgaaggacttcctgagatacagcgagaaggccggcctggagtgcagcgacatcgagaaggccgtggagctgatgtgcctggtgcccaagagatgcaacgacatgatgaacctgggcagactgcagggcttcgagggcaccctgaccgcccagggcaagctgctgcagcaggacaccttctacgtgatcgagctggacgccggcatgcagagcagaaccaaggagagaagagtgttcctgttcgagcagatcgtgatcttcagcgagctgctgagaaagggcagcctgacccccggctacatgttcaagagaagcatcaagatgaactacctggtgctggaggagaacgtggacaacgacccctgcaagttcgccctgatgaacagagagaccagcgagagagtggtgctgcaggccgccaacgccgacatccagcaggcctgggtgcaggacatcaaccaggtgctggagacccagagagacttcctgaacgccctgcagagccccatcgagtaccagagaaaggagagaagcaccgccgtgatgagaagccagcccgccagactgccccaggccagccccagaccctacagcagcgtgcccgccggcagcgagaagccccccaagggcagcagctacaacccccccctgccccccctgaagatcagcaccagcaacggcagccccggcttcgagtaccaccagcccggcgacaagttcgaggccagcaagcagaacgacctgggcggctgcaacggcaccagcagcatggccgtgatcaaggactactacgccctgaaggagaacgagatctgcgtgagccagggcgaggtggtgcaggtgctggccgtgaaccagcagaacatgtgcctggtgtaccagcccgccagcgaccacagccccgccgccgagggctgggtgcccggcagcatcctggcccccctgaccaaggccaccgccgccgagagcagcgacggcagcatcaagaagagctgcagctggcacaccctgagaatgagaaagagagccgaggtggagaacaccggcaagaacgaggccaccggccccagaaagcccaaggacatcctgggcaacaaggtgagcgtgaaggagaccaacagcagcgaggagagcgagtgcgacgacctggaccccaacaccagcatggagatcctgaaccccaacttcatccaggaggtggcccccgagttcctggtgcccctggtggacgtgacctgcctgctgggcgacaccgtgatcctgcagtgcaaggtgtgcggcagacccaagcccaccatcacctggaagggccccgaccagaacatcctggacaccgacaacagcagcgccacctacaccgtgagcagctgcgacagcggcgagatcaccctgaagatctgcaacctgatgccccaggacagcggcatctacacctgcatcgccaccaacgaccacggcaccaccagcaccagcgccaccgtgaaggtgcagggcgtgcccgccgcccccaacagacccatcgcccaggagagaagctgcaccagcgtgatcctgagatggctgccccccagcagcaccggcaactgcaccatcagcggctacaccgtggagtacagagaggagggcagccagatctggcagcagagcgtggccagcaccctggacacctacctggtgatcgaggacctgagccccggctgcccctaccagttcagagtgagcgccagcaacccctggggcatcagcctgcccagcgagcccagcgagttcgtgagactgcccgagtacgacgccgccgccgacggcgccaccatcagctggaaggagaacttcgacagcgcctacaccgagctgaacgagatcggcagaggcagattcagcatcgtgaagaagtgcatccacaaggccaccagaaaggacgtggccgtgaagttcgtgagcaagaagatgaagaagaaggagcaggccgcccacgaggccgccctgctgcagcacctgcagcacccccagtacatcaccctgcacgacacctacgagagccccaccagctacatcctgatcctggagctgatggacgacggcagactgctggactacctgatgaaccacgacgagctgatggaggagaaggtggccttctacatcagagacatcatggaggccctgcagtacctgcacaactgcagagtggcccacctggacatcaagcccgagaacctgctgatcgacctgagaatccccgtgcccagagtgaagctgatcgacctggaggacgccgtgcagatcagcggccacttccacatccaccacctgctgggcaaccccgagttcgccgcccccgaggtgatccagggcatccccgtgagcctgggcaccgacatctggagcatcggcgtgctgacctacgtgatgctgagcggcgtgagccccttcctggacgagagcaaggaggagacctgcatcaacgtgtgcagagtggacttcagcttcccccacgagtacttctgcggcgtgagcaacgccgccagagacttcatcaacgtgatcctgcaggaggacttcagaagaagacccaccgccgccacctgcctgcagcacccctggctgcagccccacaacggcagctacagcaagatccccctggacaccagcagactggcctgcttcatcgagagaagaaagcaccagaacgacgtgagacccatccccaacgtgaagagctacatcgtgaacagagtgaaccagggcacctag

SEQ ID NO: 170134 - protein, 378 aa, Artificial Sequence
  derived and/or modified sequence
MVDYSVWDHIEVSDDEDETHPNIDTASLFRWRHQARVERMEQFQKEKEELDRGCRECKRKVAECQRKLKELEVAEGGKAELERLQAEAQQLRKEERSWEQKLEEMRKKEKSMPWNVDTLSKDGFSKSMVNTKPEKTEEDSEEVREQKHKTFVEKYEKQIKHFGMLRRWDDSQKYLSDNVHLVCEETANYLVIWCIDLEVEEKCALMEQVAHQTIVMQFILELAKSLKVDPRACFRQFFTKIKTADRQYMEGFNDELEAFKERVRGRAKLRIEKAMKEYEEEERKKRLGPGGLDPVEVYESLPEELQKCFDVKDVQMLQDAISKMDPTDAKYHMQRCIDSGLWVPNSKASEAKEGEEAGPGDPLLEAVPKTGDEKDVSV

SEQ ID NO: 170135 - DNA, 1137 bp, Artificial Sequence
  derived and/or modified sequence
atggtggactacagcgtgtgggaccacatcgaggtgagcgacgacgaggacgagacccaccccaacatcgacaccgccagcctgttcagatggagacaccaggccagagtggagagaatggagcagttccagaaggagaaggaggagctggacagaggctgcagagagtgcaagagaaaggtggccgagtgccagagaaagctgaaggagctggaggtggccgagggcggcaaggccgagctggagagactgcaggccgaggcccagcagctgagaaaggaggagagaagctgggagcagaagctggaggagatgagaaagaaggagaagagcatgccctggaacgtggacaccctgagcaaggacggcttcagcaagagcatggtgaacaccaagcccgagaagaccgaggaggacagcgaggaggtgagagagcagaagcacaagaccttcgtggagaagtacgagaagcagatcaagcacttcggcatgctgagaagatgggacgacagccagaagtacctgagcgacaacgtgcacctggtgtgcgaggagaccgccaactacctggtgatctggtgcatcgacctggaggtggaggagaagtgcgccctgatggagcaggtggcccaccagaccatcgtgatgcagttcatcctggagctggccaagagcctgaaggtggaccccagagcctgcttcagacagttcttcaccaagatcaagaccgccgacagacagtacatggagggcttcaacgacgagctggaggccttcaaggagagagtgagaggcagagccaagctgagaatcgagaaggccatgaaggagtacgaggaggaggagagaaagaagagactgggccccggcggcctggaccccgtggaggtgtacgagagcctgcccgaggagctgcagaagtgcttcgacgtgaaggacgtgcagatgctgcaggacgccatcagcaagatggaccccaccgacgccaagtaccacatgcagagatgcatcgacagcggcctgtgggtgcccaacagcaaggccagcgaggccaaggagggcgaggaggccggccccggcgaccccctgctggaggccgtgcccaagaccggcgacgagaaggacgtgagcgtgtag

SEQ ID NO: 170136 - DNA, 1137 bp, Artificial Sequence
  derived and/or modified sequence
atggtcgattactctgtctgggaccacattgaagtctctgacgatgaagatgagacacacccgaatattgataccgcctctctgtttcggtggcggcaccaagcacgagtggaacgaatggagcaatttcagaaagaaaaggaagagttggaccgcggctgccgtgaatgtaagcgtaaagtggctgaatgccagcgcaagttaaaggagctcgaagtggccgaaggtggcaaggccgaactcgagcggctccaggctgaagcacagcagctgcggaaggaggaacgaagctgggaacagaagctggaggagatgcggaaaaaggaaaaatcaatgccctggaacgtggatacactgagtaaagacggattttctaagtctatggtcaacaccaagccggagaagacagaggaggacagcgaagaggtcagagagcaaaagcacaagacatttgtcgagaagtacgaaaaacagatcaagcattttggcatgctgcggaggtgggatgacagtcagaaatatctttctgataacgttcatctcgtgtgcgaagagactgccaactaccttgttatctggtgcatcgacctggaagtagaagagaagtgcgccctgatggagcaggtggcccaccagactatcgttatgcaattcatcttagagctcgccaagagcctcaaggttgatccccgggcctgtttccgccagttcttcaccaagattaaaactgccgatcggcagtatatggaaggattcaatgacgagctcgaagcctttaaggaaagagtgcgcggccgggctaaactgcgtatcgaaaaagcgatgaaggaatacgaggaggaggaacggaaaaagaggctggggccaggaggccttgatcccgtcgaggtgtatgagtcactgccggaggagctacagaagtgttttgacgttaaagacgtgcagatgttgcaagatgctatctctaagatggatcccacagatgcaaagtaccacatgcaacgttgcatcgacagcggcctgtgggttccaaacagcaaagcctcggaggcaaaggaaggggaggaggccggacccggagatccgctgcttgaagccgtgccaaagaccggggatgaaaaggatgtctcagtatag

SEQ ID NO: 170137 - DNA, 1137 bp, Artificial Sequence
  derived and/or modified sequence
atggtggactacagcgtgtgggaccacatcgaggtgtctgatgatgaagatgagacccaccccaacatcgacacagccagcctcttccgctggaggcaccaggcccgggtggagaggatggagcagttccagaaggagaaggaggagctggaccggggctgccgggagtgcaagaggaaggtggccgagtgccagaggaagctgaaggagctggaggtggccgagggcggcaaggccgagctggagcggctgcaggccgaggcccagcagctgaggaaggaggagaggtcctgggagcagaagctggaggagatgaggaagaaggagaagtccatgccctggaatgtggacaccctgagcaaggatggcttcagcaagtccatggtgaacaccaagccagagaagacagaggaggacagcgaggaggtgcgggagcagaagcacaagacctttgtggagaagtatgagaagcagatcaagcacttcggcatgctgcggcgctgggatgacagccagaagtacctgagtgacaacgtgcacctggtgtgtgaggagacagccaactacctggtgatctggtgcatcgacctggaggtggaggagaagtgtgccctgatggagcaggtggcccaccagaccatcgtgatgcagttcatcctggagctggccaagagcctgaaggtggacccccgggcctgcttccggcagttcttcaccaagatcaagacagctgaccggcagtacatggagggcttcaatgatgagctggaggccttcaaggagcgggtgcggggccgggccaagctgagaattgagaaggccatgaaggagtatgaggaggaggagaggaagaagaggctgggccctgggggcctggaccctgtggaggtgtatgagagcctgcctgaggagctgcagaagtgctttgatgtgaaggatgtgcagatgctgcaggatgccatcagcaagatggaccccacagatgccaagtaccacatgcagcgctgcattgattctggcctgtgggtgcccaacagcaaggccagcgaggccaaggagggggaggaggccggccctggggaccccctgctggaggccgtgcccaagacaggagatgagaaggatgtgtctgtgtag

SEQ ID NO: 170138 - DNA, 1137 bp, Artificial Sequence
  derived and/or modified sequence
atggtggactacagcgtgtgggaccacatcgaggtgagcgacgacgaggatgaaacgcacccaaatatcgacactgccagcttattcaggtggcgacaccaggcacgggttgaacggatggaacagtttcagaaggaaaaagaggagctggatagaggctgtcgtgagtgcaagcggaaagtggccgaatgccagcgtaagctgaaggaactcgaggtggccgagggcggcaaggctgaacttgaacgcttacaggccgaggcccagcagttacgtaaggaagagcgaagttgggaacagaagcttgaggagatgcggaagaaggagaaatccatgccctggaatgtggatacactttcaaaggacgggttcagcaagtccatggtcaacacaaagcccgagaaaacggaggaggactctgaagaagtgcgagaacagaagcataaaactttcgtcgaaaaatatgaaaagcagattaagcactttggcatgctccggagatgggatgatagtcagaaatacttaagcgataacgtccatctggtgtgcgaggagacggccaattatttggtgatctggtgtattgatcttgaggtggaggagaagtgtgctctgatggaacaggtggcccaccagaccatcgtcatgcagtttattttagaactggctaaaagtctgaaagtggacccgcgtgcctgttttagacagttttttacaaaaattaaaacagccgacagacaatacatggagggatttaatgatgagctcgaggcattcaaggaacgggtgaggggacgggcaaaactcagaattgagaaggccatgaaagagtacgaagaggaggaacgtaaaaagaggctggggcccggggggctggatcctgtggaggtgtacgagtccctgcccgaggagctgcagaagtgcttcgacgtgaaagacgtgcaaatgttgcaggacgccatttccaaaatggaccctacagacgctaagtaccatatgcagcggtgtattgactctggactgtgggtacctaactcaaaagcgagcgaggcaaaggaaggcgaggaagccggcccaggtgaccctctcttagaagctgtccccaaaaccggcgacgagaaggacgtttcagtgtag

SEQ ID NO: 170139 - DNA, 1137 bp, Artificial Sequence
  derived and/or modified sequence
atggtggattacagcgtgtgggaccatatcgaagtttcagacgacgaagatgaaacacacccaaatatcgacacagcttcattgttccgctggagacatcaggcaagagtcgagcgtatggaacaattccagaaggagaaggaagaactggaccgcggatgtcgggagtgcaagcggaaagttgctgagtgccaacgcaagctgaaagaactggaggttgccgagggtggaaaagctgagcttgagagacttcaggccgaggctcagcagctcaggaaagaagagcgttcttgggagcagaaactggaagagatgcgcaaaaaagaaaagtctatgccttggaacgtggacacattgagcaaggacggcttttctaaatccatggtaaacactaagcccgaaaaaactgaggaagattcagaggaggttagagaacagaagcacaaaacatttgtggagaagtacgagaagcagattaagcacttcggaatgctgagacgctgggatgactctcagaagtacctgtctgacaatgtacacctggtgtgtgaagagacggcaaattacctggtgatttggtgtattgacctggaagtggaagaaaaatgcgcgctgatggagcaggtcgctcaccaaactatcgtcatgcagtttattttggaattggcgaaatctcttaaggtggatccccgagcctgctttcgtcagttcttcacgaaaatcaagacagccgatcgacagtatatggagggctttaacgatgaactcgaggcctttaaagagcgagtccgtgggcgagcaaaactccgtatcgagaaggcaatgaaggagtacgaggaggaggaacggaaaaagcggctcggacccggagggctcgatcccgttgaagtgtacgagtcgttacccgaagagcttcaaaaatgtttcgatgtgaaggatgtgcagatgctccaggatgctatcagcaaaatggaccccactgacgccaagtaccacatgcagaggtgtattgatagcggactctgggtgccaaatagcaaggcatcagaggccaaagagggcgaggaagccggtccaggggatcctctactagaggcggtcccaaaaacaggagatgagaaggatgtatccgtgtag

SEQ ID NO: 170140 - DNA, 1671 bp, Artificial Sequence
  derived and/or modified sequence
ggcggggtttcccgcgctcggcggaagcggaaggggcggggctccgcgctcctagtctccactgctgccgccgtcgccgccacccgagccggagcgggctgggccgccaaggcaagatggtggactacagcgtgtgggaccacattgaggtgtctgatgatgaagacgagacgcaccccaacatcgacacggccagtctcttccgctggcggcatcaggcccgggtggaacgcatggagcagttccagaaggagaaggaggaactggacaggggctgccgcgagtgcaagcgcaaggtggccgagtgccagaggaaactgaaggagctggaggtggccgagggcggcaaggcagagctggagcgcctgcaggccgaggcacagcagctgcgcaaggaggagcggagctgggagcagaagctggaggagatgcgcaagaaggagaagagcatgccctggaacgtggacacgctcagcaaagacggcttcagcaagagcatggtaaataccaagcccgagaagacggaggaggactcagaggaggtgagggagcagaaacacaagaccttcgtggaaaaatacgagaaacagatcaagcactttggcatgcttcgccgctgggatgacagccaaaagtacctgtcagacaacgtccacctggtgtgcgaggagacagccaattacctggtcatttggtgcattgacctagaggtggaggagaaatgtgcactcatggagcaggtggcccaccagacaatcgtcatgcaatttatcctggagctggccaagagcctaaaggtggacccccgggcctgcttccggcagttcttcactaagattaagacagccgatcgccagtacatggagggcttcaacgacgagctggaagccttcaaggagcgtgtgcggggccgtgccaagctgcgcatcgagaaggccatgaaggagtacgaggaggaggagcgcaagaagcggctcggccccggcggcctggaccccgtcgaggtctacgagtccctccctgaggaactccagaagtgcttcgatgtgaaggacgtgcagatgctgcaggacgccatcagcaagatggaccccaccgacgcaaagtaccacatgcagcgctgcattgactctggcctctgggtccccaactctaaggccagcgaggccaaggagggagaggaggcaggtcctggggacccattactggaagctgttcccaagacgggcgatgagaaggatgtcagtgtgtgacctgccccagctaccaccgccacctgcttccaggcccctatgtgccccttttcagaaaacagatagatgccatctcgcccgctcctgacttcctctacttgcgctgctcggcccagcctggggggcccgcccagccctccctggcctctccactgtctccactctccagcgcccattcaagtctctgctttgagtcaaggggcttcactgcctgcagccccccatcagcattatgccaaaggcccgggggtccggggaagggcagaggtcaccaggctggtctaccaggtagttggggagggtccccagccaaggggccggctctcgtcactgggctctgttttcactgttcgtctgctgtctgtgtcttctatttggcaaacagcaatgatcttccaataaaagatttcagatgctc

SEQ ID NO: 170141 - protein, 611 aa, Artificial Sequence
  derived and/or modified sequence
MPRRKRNAGSSSDGTEDSDFSTDLEHTDSSESDGTSRRSARVTRSSARLSQSSQDSSPVRNLQSFGTEEPAYSTRRVTRSQQQPTPVTPKKYPLRQTRSSGSETEQVVDFSDRETKNTADHDESPPRTPTGNAPSSESDIDISSPNVSHDESIAKDMSLKDSGSDLSHRPKRRRFHESYNFNMKCPTPGCNSLGHLTGKHERHFSISGCPLYHNLSADECKVRAQSRDKQIEERMLSHRQDDNNRHATRHQAPTERQLRYKEKVAELRKKRNSGLSKEQKEKYMEHRQTYGNTREPLLENLTSEYDLDLFRRAQARASEDLEKLRLQGQITEGSNMIKTIAFGRYELDTWYHSPYPEEYARLGRLYMCEFCLKYMKSQTILRRHMAKCVWKHPPGDEIYRKGSISVFEVDGKKNKIYCQNLCLLAKLFLDHKTLYYDVEPFLFYVMTEADNTGCHLIGYFSKEKNSFLNYNVSCILTMPQYMRQGYGKMLIDFSYLLSKVEEKVGSPERPLSDLGLISYRSYWKEVLLRYLHNFQGKEISIKEISQETAVNPVDIVSTLQALQMLKYWKGKHLVLKRQDLIDEWIAKEAKRSNSNKTMDPSCLKWTPPKGT

SEQ ID NO: 170142 - protein, 455 aa, Artificial Sequence
  derived and/or modified sequence
MSLKDSGSDLSHRPKRRRFHESYNFNMKCPTPGCNSLGHLTGKHERHFSISGCPLYHNLSADECKVRAQSRDKQIEERMLSHRQDDNNRHATRHQAPTERQLRYKEKVAELRKKRNSGLSKEQKEKYMEHRQTYGNTREPLLENLTSEYDLDLFRRAQARASEDLEKLRLQGQITEGSNMIKTIAFGRYELDTWYHSPYPEEYARLGRLYMCEFCLKYMKSQTILRRHMAKCVWKHPPGDEIYRKGSISVFEVDGKKNKIYCQNLCLLAKLFLDHKTLYYDVEPFLFYVMTEADNTGCHLIGYFSKEKNSFLNYNVSCILTMPQYMRQGYGKMLIDFSYLLSKVEEKVGSPERPLSDLGLISYRSYWKEVLLRYLHNFQGKEISIKEISQETAVNPVDIVSTLQALQMLKYWKGKHLVLKRQDLIDEWIAKEAKRSNSNKTMDPSCLKWTPPKGT

SEQ ID NO: 170143 - DNA, 3600 bp, Artificial Sequence
  derived and/or modified sequence
gaggcactagggatcgtccgcaggattgggactgatacagaggccgccacggagcccgccggagccaccgttcctgctgctgccgccgctgcccgaatcggaaccgtcgggccgcagccgccggcaatgccgcgaaggaagaggaatgcaggcagtagttcagatggaaccgaagattccgatttttctacagatctcgagcacacagacagttcagaaagtgatggcacatcccgacgatctgctcgagtcacccgctcctcagccaggctaagccagagttctcaagattccagtcctgttcgaaatctgcagtcttttggcactgaggagcctgcttactctaccagaagagtgacccgtagtcagcagcagcctaccccagtgacaccgaaaaaataccctcttcggcagactcgttcatctggttcagaaactgagcaagtggttgatttttcagatagagaaactaaaaatacagctgatcatgatgagtcaccgcctcgaactccaactggaaatgcgccttcttctgagtctgacatagacatctccagccccaatgtatctcacgatgagagcattgccaaggacatgtccctgaaggactcaggcagtgatctctctcatcgccccaagcgccgtcgcttccatgaaagctacaacttcaatatgaagtgtcctacaccaggctgtaactctctaggacaccttacaggaaaacatgagagacatttctccatctcaggatgcccactgtatcataacctctcagctgacgaatgcaaggtgagagcacagagccgggataagcagatagaagaaaggatgctgtctcacaggcaagatgacaacaacaggcatgcaaccaggcaccaggcaccaacggagaggcagcttcgatataaggaaaaagtggctgaactcaggaagaaaagaaattctggactgagcaaagaacagaaagagaaatatatggaacacagacagacctatgggaacacacgggaacctcttttagaaaacctgacaagcgagtatgacttggatcttttccgaagagcacaagcccgggcttcagaggatttggagaagttaaggctgcaaggccaaatcacagagggaagcaacatgattaaaacaattgcttttggccgctatgagcttgatacctggtaccattctccatatcctgaagaatatgcacggctgggacgtctctatatgtgtgaattctgtttaaaatatatgaagagccaaacgatactccgccggcacatggccaaatgtgtgtggaaacacccacctggtgatgagatatatcgcaaaggttcaatctctgtgtttgaagtggatggcaagaaaaacaagatctactgccaaaacctgtgcctgttggccaaactttttctggaccacaagacattatattatgatgtggagcccttcctgttctatgttatgacagaggcggacaacactggctgtcacctgattggatatttttctaaggaaaagaattcattcctcaactacaacgtctcctgtatccttactatgcctcagtacatgagacagggctatggcaagatgcttattgatttcagttatttgctttccaaagtcgaagaaaaagttggctccccagaacgtccactctcagatctggggcttataagctatcgcagttactggaaagaagtacttctccgctacctgcataattttcaaggcaaagagatttctatcaaagaaatcagtcaggagacggctgtgaatcctgtggacattgtcagcactctgcaagcccttcagatgctcaaatactggaagggaaaacacctagttttaaagagacaggacctgattgatgagtggatagccaaagaggccaaaaggtccaactccaataaaaccatggatcccagctgcttaaaatggacccctcccaagggcacttaaagtgacctgtcattccgagccagcgaaccccagcagtaggaatccgtaccctagggatctgtctgtcatttctctgttgctcttgtgattggcaagtacagtatcctttgggaaggccatccccctcaggactgtcctggctccgacctttgtgtacactgcagacgctggttctgaggaactgttgtttcggcctcagtgaggttgcctggatgggatctgtattagacttgagtgcaggtctctcagcactgacccaaggagttctgttatggtactgtacctgtccagtcactggttctctcctcatgtcctctcgccccatgaggttgtgttgtgtcttctaagcgtggtactagtgcttgccacctggtcaccagacctccaaatatggctgccaccaccaggacctttccagttactccttatatgtgtgttctatggaggggcagggaaaaggtggcacttgtgagtgtgtgtggattggcagggggtccattcactttgggttccatcttgctttaaatttcttcattttgattaagagacctctttttgatctgtattgggctaaccagagccaaatacttttgaagagtttcccagggactagtcatggtaatagcatataattgatctgaatgagatggagagaagaatgaaggggtggtggttctgggtttgatttgagttcacctgtgggcagtgggcagtgggcagtgtcttggtgaaagggaacggatactactttttgcctcaccgtaaagtactcactagtaaatatttccttctctctttactcccactttttacgtttgcaggtgccaaagtaatgtccacttttccctttcatgctgcatattaactggttaattatactgcagaaaccttttcacctccactagtctgatacagtacatctgtacttccatataccttgcactgattttgtctgagtgccctgggagaagtagaaaatgattgaaagtgacttccgtatctcagcccatgactcagcaaggcagaatggccacccctgccaaagtttgcttctcttttcaacagtgcctcaccctccctctaggattaaagtgcttctgcccttccacgaactcctcctccatttcctttttgggatttgtcaccatccttctattctctggtcttctatttttggtgttgttcaagtgaaggaagagatgttccctctaatttctctctagcccattataacctgctatcttggggcaacttttgatgtatgacatgtcacccttcccaacttggtctcctccaacatgctgtcttcatgtggagccctcaccacaatccctgactccggtcatttgtgcccttctcttgtcatctctgtacactacttatattcactgtgggttgggggagctaattttaagcatgttcagtggcagctcccctccagtttcagtgtcactgttaaaatttatcaaaaagcaacttcactaggggttttcttaagggataaaggccttttacagaagctaaacccttccccacatgtggtagaatgtgctcttctatatctactcctcaataaagcatgttctctgctcaaaaaaaaaaaaaaaaaaaaaaaaaaaaaaaaaaaaaaaaaaaaaa

SEQ ID NO: 170144 - DNA, 3710 bp, Artificial Sequence
  derived and/or modified sequence
aaaatggcgcccactagcttcaccaaaaggatcgaacttcccagcaccctctctggcccgtaacgtcaggtgacgcgagacccagccggaagtgaaggaaaaagcgcttcagcccgcggcgcctgcgcagaacgctccagacgctgagaggcaggaggcactagggatcgtccgcaggattgggactgatacagaggccgccacggagcccgccggagccaccgttcctgctgctgccgccgctgcccgaatcggaaccgtcgggccgcagccgccggcaatgccgcgaaggaagaggaatgcaggcagtagttcagatggaaccgaagattccgatttttctacagatctcgagcacacagacagttcagaaagtgatggcacatcccgacgatctgctcgagtcacccgctcctcagccaggctaagccagagttctcaagattccagtcctgttcgaaatctgcagtcttttggcactgaggagcctgcttactctaccagaagagtgacccgtagtcagcagcagcctaccccagtgacaccgaaaaaataccctcttcggcagactcgttcatctggttcagaaactgagcaagtggttgatttttcagatagagaaactaaaaatacagctgatcatgatgagtcaccgcctcgaactccaactggaaatgcgccttcttctgagtctgacatagacatctccagccccaatgtatctcacgatgagagcattgccaaggacatgtccctgaaggactcaggcagtgatctctctcatcgccccaagcgccgtcgcttccatgaaagctacaacttcaatatgaagtgtcctacaccaggctgtaactctctaggacaccttacaggaaaacatgagagacatttctccatctcaggatgcccactgtatcataacctctcagctgacgaatgcaaggtgagagcacagagccgggataagcagatagaagaaaggatgctgtctcacaggcaagatgacaacaacaggcatgcaaccaggcaccaggcaccaacggagagacagcttcgatataaggaaaaagtggctgaactcaggaagaaaagaaattctggactgagcaaagaacagaaagagaaatatatggaacacagacagacctatgggaacacacgggaacctcttttagaaaacctgacaagcgagtatgacttggatcttttccgaagagcacaagcccgggcttcagaggatttggagaagttaaggctgcaaggccaaatcacagagggaagcaacatgattaaaacaattgcttttggccgctatgagcttgatacctggtatcattctccatatcctgaagaatatgcacggctgggacgtctctatatgtgtgaattctgtttaaaatatatgaagagccaaacgatactccgccggcacatggccaaatgtgtgtggaaacacccacctggtgatgagatatatcgcaaaggttcaatctctgtgtttgaagtggatggcaagaaaaacaagatctactgccaaaacctgtgcctgttggccaaactttttctggaccacaagacattatattatgatgtggagcccttcctgttctatgttatgacagaggcggacaacactggctgtcacctgattggatatttttctaaggaaaagaattcattcctcaactacaacgtctcctgtatccttactatgcctcagtacatgagacagggctatggcaagatgcttattgatttcagttatttgctttccaaagtcgaagaaaaagttggctccccagaacgtccactctcagatctggggcttataagctatcgcagttactggaaagaagtacttctccgctacctgcataattttcaaggcaaagagatttctatcaaagaaatcagtcaggagacggctgtgaatcctgtggacattgtcagcactctgcaagcccttcagatgctcaaatactggaagggaaaacacctagttttaaagagacaggacctgattgatgagtggatagccaaagaggccaaaaggtccaactccaataaaaccatggatcccagctgcttaaaatggacccctcccaagggcacttaaagtgacctgtcattccgagccagcgaaccccagcagtaggaatccgtaccctagggatctgtctgtcatttctctgttgctcttgtgattggcaagtacagtatcctttgggaaggccatccccctcaggactgtcctggctccgacctttgtgtacactgcagacgctggttctgaggaactgttgtttcggcctcagtgaggttgcctggatgggatctgtattagacttgagtgcaggtctctcagcactgacccaaggagttctgttatggtactgtacctgtccagtcactggttctctcctcatgtcctctcgccccatgaggttgtgttgtgtcttctaagcgtggtactagtgcttgccacctggtcaccagacctccaaatatggctgccaccaccaggacctttccagttactccttatatgtgtgttctatggaggggcagggaaaaggtggcacttgtgagtgtgtgtggattggcagggggtccattcactttgggttccatcttgctttaaatttcttcattttgattaagagacctctttttgatctgtattgggctaaccagagccaaatacttttgaagagtttcccagggactagtcatggtaatagcatataattgatctgaatgagatggagagaagaatgaaggggtggtggttctgggtttgatttgagttcacctgtgggcagtgggcagtgggcagtgtcttggtgaaagggaacggatactactttttgcctcaccgtaaagtactcactagtaaatatttccttctctctttactcccactttttacgtttgcaggtgccaaagtaatgtccacttttccctttcatgctgcatattaactggttaattatactgcagaaaccttttcacctccactagtctgatacagtacatctgtacttccatataccttgcactgattttgtctgagtgccctgggagaagtagaaaatgattgaaagtgacttccgtatctcagcccatgactcagcaaggcagaatggccacccctgccaaagtttgcttctcttttcaacagtgcctcaccctccctctaggattaaagtgcttctgcccttccacgaactcctcctccatttcctttttgggatttgtcaccatccttctattctctggtcttctatttttggtgttgttcaagtgaaggaagagatgttccctctaatttctctctagcccattataacctgctatcttggggcaacttttgatgtatgacatgtcacccttcccaacttggtctcctccaacatgctgtcttcatgtggagccctcaccacaatccctgactccggtcatttgtgcctttctcttgtcatctctgtacactacttatattcactgtgggttgggggagctaattttaagcatgttcagtggcagctcccctccagtttcagtgtcactgttaaaatttatcaaaaagcaacttcactaggggttttcttaagggataaaggccttttacagaagctaaacccttccccacatgtggtagaatgtgctcttctatatctactcctcaataaagcatgttctctgctcaa

SEQ ID NO: 170145 - DNA, 3996 bp, Artificial Sequence
  derived and/or modified sequence
acaacaaagcagaagactgggtggtgggaagccagcgcccactcgcaggggatccctctcaggccagttgcctctttccttatttgctagttcgacagcgcctagaaaatgcagttggtaaaaactaaaaacttctagaattagaaggcacttagaagatcacccaggaatggccccgtcgtttcttcttacagctgaactaacggaggcccatggagtgccgcaagccactcaggcagtggcagatccagaatatagaacaaatctaactcaattcaacaaatgtctattgactactttctgcgcggtggttgctgtggattcagaaattaattagatgtgatccctggcttaagggtgtcacagcccgataggagaaaacagacatgaataatcttagaaggatctagtaagttctcagcttggaggtgtatacaaggtgttgctggaaggaagtgaaggagcagttaagtctgccctggagtacaatgggagatatattggtaaaagccacagagaagagctgagttccaggatcaagccaggaaggaataagtctcacgtcaaggctttaaatatctcgaggaatgcaggcagtagttcagatggaaccgaagattccgatttttctacagatctcgagcacacagacagttcagaaagtgatggcacatcccgacgatctgctcgagtcacccgctcctcagccaggctaagccagagttctcaagattccagtcctgttcgaaatctgcagtcttttggcactgaggagcctgcttactctaccagaagagtgacccgtagtcagcagcagcctaccccagtgacaccgaaaaaataccctcttcggcagactcgttcatctggttcagaaactgagcaagtggttgatttttcagatagagaaactaaaaatacagctgatcatgatgagtcaccgcctcgaactccaactggaaatgcgccttcttctgagtctgacatagacatctccagccccaatgtatctcacgatgagagcattgccaaggacatgtccctgaaggactcaggcagtgatctctctcatcgccccaagcgccgtcgcttccatgaaagctacaacttcaatatgaagtgtcctacaccaggctgtaactctctaggacaccttacaggaaaacatgagagacatttctccatctcaggatgcccactgtatcataacctctcagctgacgaatgcaaggtgagagcacagagccgggataagcagatagaagaaaggatgctgtctcacaggcaagatgacaacaacaggcatgcaaccaggcaccaggcaccaacggagagacagcttcgatataaggaaaaagtggctgaactcaggaagaaaagaaattctggactgagcaaagaacagaaagagaaatatatggaacacagacagacctatgggaacacacgggaacctcttttagaaaacctgacaagcgagtatgacttggatcttttccgaagagcacaagcccgggcttcagaggatttggagaagttaaggctgcaaggccaaatcacagagggaagcaacatgattaaaacaattgcttttggccgctatgagcttgatacctggtatcattctccatatcctgaagaatatgcacggctgggacgtctctatatgtgtgaattctgtttaaaatatatgaagagccaaacgatactccgccggcacatggccaaatgtgtgtggaaacacccacctggtgatgagatatatcgcaaaggttcaatctctgtgtttgaagtggatggcaagaaaaacaagatctactgccaaaacctgtgcctgttggccaaactttttctggaccacaagacattatattatgatgtggagcccttcctgttctatgttatgacagaggcggacaacactggctgtcacctgattggatatttttctaaggaaaagaattcattcctcaactacaacgtctcctgtatccttactatgcctcagtacatgagacagggctatggcaagatgcttattgatttcagttatttgctttccaaagtcgaagaaaaagttggctccccagaacgtccactctcagatctggggcttataagctatcgcagttactggaaagaagtacttctccgctacctgcataattttcaaggcaaagagatttctatcaaagaaatcagtcaggagacggctgtgaatcctgtggacattgtcagcactctgcaagcccttcagatgctcaaatactggaagggaaaacacctagttttaaagagacaggacctgattgatgagtggatagccaaagaggccaaaaggtccaactccaataaaaccatggatcccagctgcttaaaatggacccctcccaagggcacttaaagtgacctgtcattccgagccagcgaaccccagcagtaggaatccgtaccctagggatctgtctgtcatttctctgttgctcttgtgattggcaagtacagtatcctttgggaaggccatccccctcaggactgtcctggctccgacctttgtgtacactgcagacgctggttctgaggaactgttgtttcggcctcagtgaggttgcctggatgggatctgtattagacttgagtgcaggtctctcagcactgacccaaggagttctgttatggtactgtacctgtccagtcactggttctctcctcatgtcctctcgccccatgaggttgtgttgtgtcttctaagcgtggtactagtgcttgccacctggtcaccagacctccaaatatggctgccaccaccaggacctttccagttactccttatatgtgtgttctatggaggggcagggaaaaggtggcacttgtgagtgtgtgtggattggcagggggtccattcactttgggttccatcttgctttaaatttcttcattttgattaagagacctctttttgatctgtattgggctaaccagagccaaatacttttgaagagtttcccagggactagtcatggtaatagcatataattgatctgaatgagatggagagaagaatgaaggggtggtggttctgggtttgatttgagttcacctgtgggcagtgggcagtgggcagtgtcttggtgaaagggaacggatactactttttgcctcaccgtaaagtactcactagtaaatatttccttctctctttactcccactttttacgtttgcaggtgccaaagtaatgtccacttttccctttcatgctgcatattaactggttaattatactgcagaaaccttttcacctccactagtctgatacagtacatctgtacttccatataccttgcactgattttgtctgagtgccctgggagaagtagaaaatgattgaaagtgacttccgtatctcagcccatgactcagcaaggcagaatggccacccctgccaaagtttgcttctcttttcaacagtgcctcaccctccctctaggattaaagtgcttctgcccttccacgaactcctcctccatttcctttttgggatttgtcaccatccttctattctctggtcttctatttttggtgttgttcaagtgaaggaagagatgttccctctaatttctctctagcccattataacctgctatcttggggcaacttttgatgtatgacatgtcacccttcccaacttggtctcctccaacatgctgtcttcatgtggagccctcaccacaatccctgactccggtcatttgtgcctttctcttgtcatctctgtacactacttatattcactgtgggttgggggagctaattttaagcatgttcagtggcagctcccctccagtttcagtgtcactgttaaaatttatcaaaaagcaacttcactaggggttttcttaagggataaaggccttttacagaagctaaacccttccccacatgtggtagaatgtgctcttctatatctactcctcaataaagcatgttctctgctc

SEQ ID NO: 170146 - DNA, 1836 bp, Artificial Sequence
  derived and/or modified sequence
atgccgcggagaaaacgcaacgctggttcatctagcgacggcacagaagactccgatttttccaccgacctcgaacacaccgactctagtgagagcgacggaacatctcgacgctccgccagagtgaccaggagtagcgcgcgcctgtcccagtcttcccaagactcgtcccctgtgagaaaccttcagagttttggaacagaggaacccgcctatagcacaagaagagtgactcgctcacagcagcagcccacccccgtgaccccaaagaagtaccccctgcggcagacccgatcctccggctctgagacagaacaggttgtcgatttctccgatcgcgaaaccaaaaacaccgcagaccatgacgagtctcctcccagaacgccaacaggcaatgcacctagctccgaaagtgatattgatatcagtagcccaaatgtctctcacgatgagtccatcgccaaggatatgtcactgaaagattctggaagtgatctgtcccaccgccccaagcgaaggcgatttcacgagagttacaactttaatatgaagtgccctacgccaggatgtaattcccttggccatctcactgggaaacatgagcgccacttctctattagcggctgccctctctaccataatctgtcggccgatgagtgcaaggtgcgtgcccaaagtagagacaagcagatcgaggagcgtatgttatctcacaggcaagatgataacaacaggcacgctaccagacatcaggcccccactgagcgccagctgcggtataaggaaaaagttgccgagctcagaaagaagcggaatagtggactctccaaggagcagaaggagaagtacatggagcatcgtcagacgtacggaaataccagggaacccctgctagagaacttgacaagcgagtacgatctggacctttttcgccgcgcacaagcgcgggcatccgaagacttggaaaaattacggctccagggacagattactgagggctcaaacatgattaagacaatagctttcggccgctacgaactcgacacctggtatcactccccgtatccagaggagtacgcccgactaggacggctttatatgtgtgaattttgtcttaaatacatgaagtcccagacaatcctgcggcggcacatggcaaagtgtgtttggaagcatccccccggagacgaaatttatcgaaagggaagcattagtgtcttcgaagtggacgggaagaagaataaaatctattgtcaaaatctgtgcctgttggccaagctgtttctggaccataagactctgtattacgatgtggaaccttttcttttttacgtgatgacagaagcagacaacactggctgccatctgatcggctacttcagtaaggaaaagaactcattcctgaattataatgtttcatgcattttgactatgccccagtacatgcgccagggttatggcaagatgttgatagacttttcttacctgctgtcaaaggtggaagaaaaagtgggaagccctgaacgacctttgagtgacctgggcctcatatcctatcggagctactggaaggaagtcctcctgcggtacttacacaatttccaaggtaaagaaatcagcattaaagagattagtcaggagaccgcagtgaaccctgtggacatcgtctccaccctgcaagccctgcaaatgctcaagtattggaagggtaaacacctggtgctgaagagacaggacctgatcgatgaatggatcgctaaggaagccaagaggagcaactctaataaaaccatggatccttcatgtctgaaatggactcctccaaaaggaacgtag

SEQ ID NO: 170147 - DNA, 1368 bp, Artificial Sequence
  derived and/or modified sequence
atgtcactcaaggatagtggctccgatctgagtcacagacctaagcgcaggcggttccatgagagctataattttaatatgaaatgccccacacccggctgcaattccctgggccatctgaccggcaaacatgagaggcatttttcgataagcggttgcccgctgtatcacaatctgagtgctgacgaatgcaaggtacgggcgcagtctagggacaaacaaatcgaggagcgtatgctgtctcatcggcaggatgacaacaatagacacgccacccggcaccaggccccaacggagcggcagttgaggtacaaggaaaaggtagccgagttgcgaaaaaaacgcaacagcggactcagcaaggagcagaaggagaaatatatggagcatcgacagacatacggaaatacgcgcgagcctttgcttgaaaacttgaccagcgagtatgaccttgacctctttcggagagcacaagctcgggccagtgaggatctggagaaactccggctccagggacagataacggaaggctcaaatatgatcaaaacaatcgcgtttggtaggtacgagctcgatacctggtatcactcaccttatcctgaggagtatgctcgtctcggaaggctttacatgtgcgaattctgtctgaaatatatgaaaagccaaacaatcctgcgccggcacatggccaaatgtgtatggaagcatcctccgggcgacgagatctataggaaagggtccatctctgtgtttgaagtggatggcaagaaaaataagatttactgccaaaatctgtgcctgttagccaaactcttcctggaccacaaaaccttgtactatgatgtcgaaccgttcctcttctacgtaatgacagaagcagataatacaggctgtcacctcattggctattttagtaaggagaagaattctttcttaaactacaatgtgagctgtattttaacaatgccacagtacatgcgccaaggatacggaaagatgcttattgacttttcttacctgctcagtaaggtggaagagaaggtgggctctcccgaacgcccgcttagcgatttgggacttatcagttacagatcctattggaaagaggtgctgctgcggtacctccacaacttccagggaaaggaaatctctattaaggaaatcagccaagagactgccgtcaatcccgtcgatattgtctctactctgcaagcgttacagatgcttaaatactggaagggtaagcacttggtcctgaaaaggcaagacctcatcgatgagtggattgctaaagaagcgaaaaggagcaatagcaataaaaccatggatccctcctgcttgaagtggacgcctcctaagggtacatag

SEQ ID NO: 170148 - DNA, 1836 bp, Artificial Sequence
  derived and/or modified sequence
atgcccaggaggaagagaaatgccggcagcagcagtgatggaacagaggacagcgacttcagcacagacctggagcacacagacagcagcgagagtgatggcaccagcagaagaagtgcccgggtgaccaggagcagcgcccggctgagccagagcagccaggacagcagccctgtgaggaacctgcagagctttggaacagaggagcccgcctacagcaccaggagagtgaccaggagccagcagcagcccacccctgtgacccccaagaagtaccccctgcggcagaccaggagcagcggcagcgagacagagcaggtggtggacttcagtgaccgggagaccaagaacacagctgaccatgatgagagcccccccaggacccccactggaaatgcccccagcagcgagagtgacatcgacatcagcagccccaacgtgtcccatgatgagagcatcgccaaggacatgagcctgaaggacagcggcagtgacctgagccaccggcccaagagaagacgcttccacgagagctacaacttcaacatgaagtgccccaccccaggctgcaacagcctgggccacctgaccgggaagcatgagcggcacttcagcatcagcggctgccccctgtaccacaacctgtctgcagatgagtgcaaggtgcgggcccagagccgggacaagcagatcgaggagaggatgctgagccaccggcaggatgacaacaacagacatgccaccaggcaccaggcccccacagagcggcagctgcgctacaaggagaaggtggccgagctgaggaagaagagaaattctggcctgagcaaggagcagaaggagaagtacatggagcaccggcagacctacggcaacacccgggagcccctgctggagaacctgaccagtgaatatgacctggacctcttcagaagagcccaggcccgggccagcgaggacctggagaagctgcggctgcagggccagatcacagagggcagcaacatgatcaagaccatcgccttcggccgctatgagctggacacctggtaccacagcccctacccagaggagtatgcccggctgggccgcctgtacatgtgtgagttctgcctgaagtacatgaagagccagaccatcctgcggcggcacatggccaagtgtgtgtggaagcaccccccaggagatgagatctacaggaagggcagcatctctgtgtttgaggtggatggcaagaagaacaagatctactgccagaacctgtgcctgctggccaagctgttcctggaccacaagaccctgtactatgatgtggagcccttcctgttctacgtgatgacagaagctgacaacacaggctgccacctgattggctacttcagcaaggagaagaacagcttcctgaactacaacgtgtcctgcatcctgaccatgccccagtacatgaggcagggctacggcaagatgctgattgacttctcctacctgctgagcaaggtggaggagaaggtgggcagccctgagcggcccctgagtgacctgggcctcatctcctaccgcagctactggaaggaggtgctgctgcgctacctgcacaacttccagggcaaggagatcagcatcaaggagatcagccaggagacagctgtgaaccctgtggacatcgtgtccaccctgcaggccctgcagatgctgaagtactggaagggcaagcacctggtgctgaagaggcaggacctgattgatgagtggatcgccaaggaggccaagaggagcaacagcaacaagaccatggaccccagctgcctgaagtggaccccacccaagggcacctag

SEQ ID NO: 170149 - DNA, 1368 bp, Artificial Sequence
  derived and/or modified sequence
atgagcctgaaggacagcggcagtgacctgagccaccggcccaagagaagacgcttccacgagagctacaacttcaacatgaagtgccccaccccaggctgcaacagcctgggccacctgaccgggaagcatgagcggcacttcagcatcagcggctgccccctgtaccacaacctgtctgcagatgagtgcaaggtgcgggcccagagccgggacaagcagatcgaggagaggatgctgagccaccggcaggatgacaacaacagacatgccaccaggcaccaggcccccacagagcggcagctgcgctacaaggagaaggtggccgagctgaggaagaagagaaattctggcctgagcaaggagcagaaggagaagtacatggagcaccggcagacctacggcaacacccgggagcccctgctggagaacctgaccagtgaatatgacctggacctcttcagaagagcccaggcccgggccagcgaggacctggagaagctgcggctgcagggccagatcacagagggcagcaacatgatcaagaccatcgccttcggccgctatgagctggacacctggtaccacagcccctacccagaggagtatgcccggctgggccgcctgtacatgtgtgagttctgcctgaagtacatgaagagccagaccatcctgcggcggcacatggccaagtgtgtgtggaagcaccccccaggagatgagatctacaggaagggcagcatctctgtgtttgaggtggatggcaagaagaacaagatctactgccagaacctgtgcctgctggccaagctgttcctggaccacaagaccctgtactatgatgtggagcccttcctgttctacgtgatgacagaagctgacaacacaggctgccacctgattggctacttcagcaaggagaagaacagcttcctgaactacaacgtgtcctgcatcctgaccatgccccagtacatgaggcagggctacggcaagatgctgattgacttctcctacctgctgagcaaggtggaggagaaggtgggcagccctgagcggcccctgagtgacctgggcctcatctcctaccgcagctactggaaggaggtgctgctgcgctacctgcacaacttccagggcaaggagatcagcatcaaggagatcagccaggagacagctgtgaaccctgtggacatcgtgtccaccctgcaggccctgcagatgctgaagtactggaagggcaagcacctggtgctgaagaggcaggacctgattgatgagtggatcgccaaggaggccaagaggagcaacagcaacaagaccatggaccccagctgcctgaagtggaccccacccaagggcacctag

SEQ ID NO: 170150 - DNA, 1836 bp, Artificial Sequence
  derived and/or modified sequence
atgccccggcggaagcggaacgccggcagcagcagcgacggcaccgaggacagtgacttctctacagatcttgaacataccgacagctcagagagtgatggaacatcccgtcgaagtgcgagggtgactaggtctagtgccagactcagtcagtccagccaagattctagcccagtccgtaatctccagagctttggcactgaggagccagcttattccactagacgcgtcacccgaagtcagcagcagccaactcccgtgacaccaaaaaagtatccactgaggcagacacgttcgtccggcagtgagacagaacaagtcgtggacttttccgacagagaaactaagaataccgctgaccatgacgaaagccccccgaggaccccgaccgggaatgcgcctagcagtgagagcgacatcgacatttctagccctaacgtctcccacgatgaatctatagcaaaggatatgtccctcaaagactccggaagcgacctttcccacaggcccaaaaggcggcggttccacgaaagctacaacttcaacatgaaatgtcctactccaggctgcaactccttgggtcacctgaccggcaagcatgagagacatttcagtattagtggatgccccctgtaccataacctgagcgccgacgaatgcaaggttcgggcccaaagcagggacaagcagattgaagaacgcatgctatcccatcgccaagacgataacaaccgtcatgccacccgccaccaggcacctaccgaacgccagctccgatacaaggagaaagtggctgaactacggaagaaaaggaactccggcctgagtaaagagcagaaggaaaagtatatggagcatagacagacatatggaaacacacgtgagcctctgttggaaaacctcacatcagagtacgatctggacttatttcgcagggcccaagcaagggcttcggaggatcttgagaaattgcgactgcagggtcagataacagaaggaagcaacatgatcaaaaccattgcctttggtcggtatgaactggacacgtggtaccactcgccctacccagaagaatacgcccgcctggggcgtttatacatgtgcgagttctgcctcaaatacatgaaaagtcaaacaatcctccggcgacatatggctaagtgtgtgtggaaacatccgcccggcgatgaaatttatcgcaagggatctatctctgtctttgaagttgacggaaagaagaacaaaatttactgtcagaatctgtgcctgctcgcaaagctcttcctggatcataaaactctgtattacgatgttgaaccatttctgttctacgtgatgacggaggctgacaatactgggtgtcacctaatcggttatttctcgaaagaaaagaacagctttttaaactacaatgtgtcttgtatcctgaccatgccgcagtacatgcggcagggttacggcaaaatgctcatagacttctcttatttgctctccaaagtcgaggaaaaggtaggcagtcctgagcgacccctgtctgacctgggtctgatcagctaccgttcatactggaaggaggtcttgctgcggtatctgcataatttccagggaaaggaaattagcatcaaggagatctctcaggagacggccgtcaacccggttgatatcgtctccaccctgcaggccctgcagatgttaaagtattggaagggaaagcacctggtgttgaagcgacaggacttaatcgatgagtggattgcaaaagaagctaagagatccaactccaataagacaatggatcccagctgcctgaaatggaccccacccaagggcacctag

SEQ ID NO: 170151 - DNA, 1368 bp, Artificial Sequence
  derived and/or modified sequence
atgagcctgaaggacagcggcagcgacctgagccaccggcccaagaggcgccgctttcacgagagctataattttaacatgaagtgcccaacacctggttgtaatagcctcggtcacttgacagggaaacatgaacgccatttctctatttccggctgtcccctgtatcataatttgagcgccgatgaatgtaaggtgcgggctcaatctcgtgacaagcagatagaggagcgaatgctgtcgcatagacaggatgacaacaatcgacatgcaacccgacatcaggcaccgaccgagaggcagctccggtataaagagaaggtggcggagctgcgtaaaaaaagaaactctggtttgtccaaggaacagaaagaaaagtatatggaacataggcagacctacggaaacaccagggagccactcttagagaatttgactagcgaatatgatctggacctatttagaagggcgcaggctcgggcgtcagaagatctcgagaaactccggttgcagggacaaatcacagagggatcaaatatgatcaagactatcgcattcggacgatacgaactcgacacgtggtatcacagtccttatcccgaagaatatgcgaggctgggccgattgtatatgtgtgaattttgcctcaagtacatgaagagccagacaatattgaggaggcatatggcgaagtgtgtgtggaagcacccccccggggatgagatctataggaaaggctcgatctcagtgttcgaggtggacggtaagaagaacaaaatttattgtcagaatctctgcttactcgccaagctgttcctggatcataaaacactgtactatgatgttgaaccattcctattttatgttatgacagaggcagacaatactggctgccacctgattggctatttcagcaaggaaaagaattcattccttaactataacgttagttgtatcctcaccatgccgcagtacatgcgacaaggttacgggaaaatgcttattgatttttcttacctcctctctaaagttgaggaaaaagttggctctcctgagcgtccgctgagcgatctggggctgataagctacagatcttactggaaagaggtgttattgaggtatctccacaacttccagggtaaggagatttcaattaaagagatctctcaggagactgcagtgaacccagtggacatcgtatccacactgcaggccctacagatgctgaaatattggaaaggcaagcatctggtgcttaaacggcaagaccttatcgatgagtggatagccaaagaagccaaaaggtctaacagcaacaaaacaatggacccatcctgcctcaaatggactcctccaaaaggaacttag

SEQ ID NO: 170152 - DNA, 1836 bp, Artificial Sequence
  derived and/or modified sequence
atgccccgtaggaaacggaacgccggatccagcagcgacggcactgaagattccgatttctcaacagacctggaacacaccgattcaagtgagtctgacgggacctctcggagaagcgcaagagtgacacggtcttccgcaagattgagccagtcgtctcaggacagcagtcccgtgaggaacctgcaaagttttgggactgaagagcccgcttactctacacgcagggttacccgctcccagcagcagcctacacctgttacccccaagaaatatccccttcgccagacacgctctagcggcagtgaaactgagcaggtggtggatttctcagatcgagagaccaagaacaccgcggaccacgacgagtctccccctcggactcctaccggcaatgctccttcttccgaatccgacatcgacatctcttcacctaacgtatcccacgatgagtcaatagcaaaggacatgagcttgaaggactccggatccgatctgtctcaccgtcccaaacggagaaggttccacgaatcttacaatttcaacatgaaatgtccaaccccgggatgtaattcgttgggccatctgaccggaaaacatgagaggcatttctcgatctctggctgtcccctgtatcacaacctatcagccgatgagtgtaaggttagggcacagagtcgggataaacagatcgaagaaaggatgcttagtcacaggcaggatgataataataggcatgccacccggcatcaggccccaacagagcggcaactacggtacaaggaaaaagtggctgagctacgtaagaaacggaattccggcttgtctaaggaacagaaggagaagtatatggagcaccgtcaaacttacggaaacacccgggagcccctgttagaaaatctcacttccgaatacgacctcgatctgttccgcagagcccaagccagggcctcagaagatctggagaagttaagattgcagggccagatcactgagggcagcaacatgatcaagacaatcgcattcggacgatacgaactagacacatggtaccacagtccctatcccgaagaatatgctaggttggggagactgtacatgtgtgagttttgtttaaaatacatgaagagtcagactattctgcgtcgtcacatggccaaatgtgtttggaagcacccgcctggggatgaaatctaccgtaaaggctctatttctgtcttcgaggtggatggaaaaaagaacaagatttactgccaaaatctttgtctgctagcaaagctcttcctggatcacaagacactgtactacgatgtcgaaccttttttattctacgtcatgacagaagccgacaataccggctgtcacttgatcggttatttttctaaagaaaagaattcatttctgaactataacgtctcatgtatcttgacaatgccacagtacatgcggcagggttacgggaagatgcttatagacttttcctatctgctttcgaaggtggaggagaaggtcggaagtccagaacgtcctctctctgacctaggtcttatttcatacaggtcatactggaaggaggtgctgttacgttacctgcataacttccaaggaaaagagataagtatcaaggagatatctcaagaaaccgctgtcaatcccgtggatatagtctcaacactgcaggcactccaaatgctgaaatactggaaaggtaaacacctggtgctcaaacggcaggatctgatcgatgagtggatagccaaagaggcaaagagaagcaatagtaataaaactatggatccctcttgcctgaaatggacccctccaaaggggacttag

SEQ ID NO: 170153 - DNA, 1368 bp, Artificial Sequence
  derived and/or modified sequence
atgtccctgaaagactcagggtctgatttgagccatcggcctaagcgacgacgctttcacgagagttataactttaatatgaaatgtcccacacccggatgcaatagcctcggtcacctcactggtaaacacgagagacatttctccatcagtggctgccccctgtatcacaacctctccgccgacgaatgtaaggtcagggcacagtctcgcgataagcagattgaagagagaatgctgagtcatagacaggatgacaataacaggcacgcgacgaggcaccaagccccaactgagaggcagctccgatacaaggagaaagtcgcagagctccgtaaaaagaggaattccggactgtccaaagagcagaaggaaaaatacatggaacaccgtcagacctacgggaatacgcgtgagccactgctagagaacctgactagtgagtacgatctggacctgtttcgacgcgctcaggctcgagcatccgaggatctggagaaactgcgactgcaaggtcagattaccgaggggtccaatatgatcaaaactatagctttcggacggtacgagctggacacttggtaccactccccatatcctgaagagtatgctcgtctgggaaggctgtacatgtgcgagttttgccttaaatatatgaagagtcaaaccatcctccggcgacacatggcaaagtgcgtatggaagcaccctcctggagatgagatctatcggaagggtagtatatcggtgtttgaggtggatgggaagaagaataaaatttactgtcagaatctttgtctgctggccaaattgttcctggaccacaagactctgtactatgatgtggaaccttttctgttctacgtcatgacggaggcagacaacaccggatgccacttgattgggtacttctccaaagaaaagaattccttcctcaactataacgtctcatgcattctcactatgccccaatatatgaggcaggggtatgggaagatgttaatcgacttttcgtatttgcttagcaaggtggaggagaaagttggcagtcccgagcgccctctgtccgatctcggtctgatcagttaccgttcttactggaaagaagtgctgctgcgctatcttcacaactttcaggggaaggagatctccatcaaggaaatatcccaggaaacagctgtgaatcctgtcgacattgtgtccacactgcaggccttacagatgctgaagtactggaaaggcaaacacttggtgttgaaacgccaggatctgatagacgagtggattgctaaagaggccaagcggtctaattctaataaaacaatggatcctagctgtctcaaatggaccccccctaaaggcacctag

SEQ ID NO: 170154 - DNA, 1836 bp, Artificial Sequence
  derived and/or modified sequence
atgcccagaagaaagagaaacgccggcagcagcagcgacggcaccgaggacagcgacttcagcaccgacctggagcacaccgacagcagcgagagcgacggcaccagcagaagaagcgccagagtgaccagaagcagcgccagactgagccagagcagccaggacagcagccccgtgagaaacctgcagagcttcggcaccgaggagcccgcctacagcaccagaagagtgaccagaagccagcagcagcccacccccgtgacccccaagaagtaccccctgagacagaccagaagcagcggcagcgagaccgagcaggtggtggacttcagcgacagagagaccaagaacaccgccgaccacgacgagagcccccccagaacccccaccggcaacgcccccagcagcgagagcgacatcgacatcagcagccccaacgtgagccacgacgagagcatcgccaaggacatgagcctgaaggacagcggcagcgacctgagccacagacccaagagaagaagattccacgagagctacaacttcaacatgaagtgccccacccccggctgcaacagcctgggccacctgaccggcaagcacgagagacacttcagcatcagcggctgccccctgtaccacaacctgagcgccgacgagtgcaaggtgagagcccagagcagagacaagcagatcgaggagagaatgctgagccacagacaggacgacaacaacagacacgccaccagacaccaggcccccaccgagagacagctgagatacaaggagaaggtggccgagctgagaaagaagagaaacagcggcctgagcaaggagcagaaggagaagtacatggagcacagacagacctacggcaacaccagagagcccctgctggagaacctgaccagcgagtacgacctggacctgttcagaagagcccaggccagagccagcgaggacctggagaagctgagactgcagggccagatcaccgagggcagcaacatgatcaagaccatcgccttcggcagatacgagctggacacctggtaccacagcccctaccccgaggagtacgccagactgggcagactgtacatgtgcgagttctgcctgaagtacatgaagagccagaccatcctgagaagacacatggccaagtgcgtgtggaagcacccccccggcgacgagatctacagaaagggcagcatcagcgtgttcgaggtggacggcaagaagaacaagatctactgccagaacctgtgcctgctggccaagctgttcctggaccacaagaccctgtactacgacgtggagcccttcctgttctacgtgatgaccgaggccgacaacaccggctgccacctgatcggctacttcagcaaggagaagaacagcttcctgaactacaacgtgagctgcatcctgaccatgccccagtacatgagacagggctacggcaagatgctgatcgacttcagctacctgctgagcaaggtggaggagaaggtgggcagccccgagagacccctgagcgacctgggcctgatcagctacagaagctactggaaggaggtgctgctgagatacctgcacaacttccagggcaaggagatcagcatcaaggagatcagccaggagaccgccgtgaaccccgtggacatcgtgagcaccctgcaggccctgcagatgctgaagtactggaagggcaagcacctggtgctgaagagacaggacctgatcgacgagtggatcgccaaggaggccaagagaagcaacagcaacaagaccatggaccccagctgcctgaagtggaccccccccaagggcacctag

SEQ ID NO: 170155 - DNA, 1368 bp, Artificial Sequence
  derived and/or modified sequence
atgagcctgaaggacagcggcagcgacctgagccacagacccaagagaagaagattccacgagagctacaacttcaacatgaagtgccccacccccggctgcaacagcctgggccacctgaccggcaagcacgagagacacttcagcatcagcggctgccccctgtaccacaacctgagcgccgacgagtgcaaggtgagagcccagagcagagacaagcagatcgaggagagaatgctgagccacagacaggacgacaacaacagacacgccaccagacaccaggcccccaccgagagacagctgagatacaaggagaaggtggccgagctgagaaagaagagaaacagcggcctgagcaaggagcagaaggagaagtacatggagcacagacagacctacggcaacaccagagagcccctgctggagaacctgaccagcgagtacgacctggacctgttcagaagagcccaggccagagccagcgaggacctggagaagctgagactgcagggccagatcaccgagggcagcaacatgatcaagaccatcgccttcggcagatacgagctggacacctggtaccacagcccctaccccgaggagtacgccagactgggcagactgtacatgtgcgagttctgcctgaagtacatgaagagccagaccatcctgagaagacacatggccaagtgcgtgtggaagcacccccccggcgacgagatctacagaaagggcagcatcagcgtgttcgaggtggacggcaagaagaacaagatctactgccagaacctgtgcctgctggccaagctgttcctggaccacaagaccctgtactacgacgtggagcccttcctgttctacgtgatgaccgaggccgacaacaccggctgccacctgatcggctacttcagcaaggagaagaacagcttcctgaactacaacgtgagctgcatcctgaccatgccccagtacatgagacagggctacggcaagatgctgatcgacttcagctacctgctgagcaaggtggaggagaaggtgggcagccccgagagacccctgagcgacctgggcctgatcagctacagaagctactggaaggaggtgctgctgagatacctgcacaacttccagggcaaggagatcagcatcaaggagatcagccaggagaccgccgtgaaccccgtggacatcgtgagcaccctgcaggccctgcagatgctgaagtactggaagggcaagcacctggtgctgaagagacaggacctgatcgacgagtggatcgccaaggaggccaagagaagcaacagcaacaagaccatggaccccagctgcctgaagtggaccccccccaagggcacctag

SEQ ID NO: 170156 - protein, 340 aa, Artificial Sequence
  derived and/or modified sequence
MKEDQVVAEEPGFQDEEESLFQDIDLLQKHGINVADIKKLKSVGICTIKGIQMTTRRALCNVKGLSEAKVDKIKEAANKLIEPGFLTAFEYSEKRKMVFHITTGSQEFDKLLGGGIESMAITEAFGEFRTGKTQLSHTLCVTAQLPGAGGYPGGKIIFIDTENTFRPDRLRDIADRFNVDHDAVLDNVLYARAYTSEHQMELLDYVAAKFHEEAGIFKLLIIDSIMALFRVDFSGRGELAERQQKLAQMLSRLQKISEEYNVAVFVTNQMTADPGATMTFQADPKKPIGGHILAHASTTRISLRKGRGELRIAKIYDSPEMPENEATFAITAGGIGDAKE

SEQ ID NO: 170157 - protein, 139 aa, Artificial Sequence
  derived and/or modified sequence
MKEDQVVAEEPGFQDEEESLFQDIDLLQKHGINVADIKKLKSVGICTIKGIQMTTRRALCNVKGLSEAKVDKIKEAANKLIEPGFLTAFEYSEKRKMVFHITTGSQEFDKLLGGGIESMAITEAFGEFRTGKTQLSHTL

SEQ ID NO: 170158 - DNA, 498 bp, Artificial Sequence
  derived and/or modified sequence
atgaaggaggaccaggtggtggccgaggagcccggcttccaggacgaggaggagagcctgttccaggacatcgacctgctgcagaagcacggcatcaacgtggccgacatcaagaagctgaagagcgtgggcatctgcaccatcaagggcatccagatgaccaccagaagagccctgtgcaacgtgaagggcctgagcgaggccaaggtggacaagatcaaggaggccgccaacaagctgatcgagcccggcttcctgaccgccttcgagtacagcgagaagagaaagatggtgttccacatcaccaccggcagccaggagttcgacaagctgctgggcggcggcatcgagagcatggccatcaccgaggccttcggcgagttcagaaccggcaagacccagctgagccacaccctgtgcgtgaccgcccagctgcccggcgccggcggctaccccggcggcaagatcatcttcatcgacaccgagaacaccctgtag

SEQ ID NO: 170159 - DNA, 2371 bp, Artificial Sequence
  derived and/or modified sequence
gcccctcgtcgccctctgtaggcctgctccctccccgcccttccaccctcaccctgcgccccgccccggccccttggtcctcgccccgccctcctcgtttggcgccaaaccctgtggtcaacggcgcgcgggtctccaggctccgtgttctaggcccgagttagaatcctgtcagctgaggaggtcgggcggggcagaggggcttcaccttgaaaatctcggggagactgtgggtacgagggggaagtgattatttttctgttgcccacttttcaatatgaaggaggatcaagttgtggcggaagaaccaggattccaagatgaagaggaatctttgtttcaagatattgacctgttacagaaacatggaattaacgtggctgacattaagaaactgaaatcagtaggaatctgtaccatcaaaggtatacagatgacaacaagaagagctctatgcaatgtcaaaggactctcagaagccaaagtagacaagattaaagaggcagcgaacaaactaattgaaccaggattcttgactgcatttgagtatagtgaaaagaggaaaatggttttccatatcaccaccgggagccaggaatttgataagttactaggaggtggaattgaaagtatggcaattacagaagcttttggagaatttcgtactggaaaaacccagctttctcataccctctgtgtgacagctcaacttccaggagctggtggctacccaggaggaaagattatcttcattgatacagaaaatactttccgtccagatcgccttagggacattgctgatcgctttaatgtagaccatgatgcagtactggacaacgtactttatgcacgtgcatatactagtgaacatcagatggagctacttgattatgtagcagcaaagttccatgaagaagctggcatcttcaagctattgattatcgattcaataatggcactttttcgagtggatttcagtggccgtggggagttggccgaacggcagcaaaaattggcccagatgttgtcacgactccaaaaaatctcagaagaatataacgtggctgtttttgtgaccaatcaaatgactgccgatccaggagcaactatgacctttcaggcagatcccaaaaaacccattgggggacacattctggctcatgcttcaacaacaagaataagcttgcgaaagggaagaggagagctcagaattgccaagatttatgacagtcctgagatgcctgaaaatgaagccaccttcgcaataactgctggaggaattggggatgccaaggagtaggtggtgaattgatgcaaattgcttcttagtgcttattaggagctgaagaaatggaaaagcagtctccaatttcacatcttgaaatagaggttttttcccacatgttactaaagaaaagtcagcaaagagatttaaatcttatatttatcttaaaagtccctgatttatgataactatacattgtatgtaaattcagggatatgtatatgtatgtttgtgtgtgtgtgtgtttgtgtgtgtatacctgacatatatagtagatatatatacctattgaaattctctcactctgtgtatgtatatatacctatggaaaactagttgttgggaaaggagtacgtgattccctccctttcacttttcaaagtgagccactaaacagaaagtctaagagttcagaaatgtcccattctcctaaggactttcccttcaccatttttctagggtatagtgccactgacttacatagctagatgtttttccacaagaggatttaagggaggaatgtttataggacacacacacaaaagctctttctatttataatatcaaactgcatattcacctttatagcaacagaaaacagacattaaattaagccaaattttaaatcatttgactttgacaagcagaaattacttttaaaaaatgtatttatggctgggcgtggtggctcacacctgtaatcccagcactttgggaggccgaggcaggtggatcacttgaggtcaggagttcaagaccagcctggccaacatggagaaaccccatctctactaaaaatacaaaaattagccaagtgcagtggcatgtgcttgtaatcccagctactctggaggctgaggcaggagaattgcttgaacccaggaggcagagattgcggtgagccaagatggcaccactgcactccagcctaggtgacagagtgagactccgtctcaaaaaaaaaaaaaaaacttttttaaaatgttaaaattaatttaaatgtaaaatttctgaatactaatcttagaaatgtgtaaaagatattattttgattgttaaacaaataaaatcctgttttcaaaatgc

SEQ ID NO: 170160 - DNA, 1595 bp, Artificial Sequence
  derived and/or modified sequence
cgccaaaccctgtggtcaacggcgcgcgggtctccaggctccgtgttctaggcccgagttagaatcctgtcagctgaggaggtcgggcggggcagaggggcttcaccttgaaaatctcggggagactgtgggtacgagggggaagtgattatttttctgttgcccacttttcaatatgaaggaggatcaagttgtggcggaagaaccaggattccaagatgaagaggaatctttgtttcaagatattgacctgttacagaaacatggaattaacgtggctgacattaagaaactgaaatcagtaggaatctgtaccatcaaaggtatacagatgacaacaagaagagctctatgcaatgtcaaaggactctcagaagccaaagtagacaagattaaagaggcagcgaacaaactaattgaaccaggattcttgactgcatttgagtatagtgaaaagaggaaaatggttttccatatcaccaccgggagccaggaatttgataagttactaggaggtggaattgaaagtatggcaattacagaagcttttggagaatttcgtactggaaaaacccagctttctcataccctctgtgtgacagctcaacttccaggagctggtggctacccaggaggaaagattatcttcattgatacagaaaatactttgtaacctttttatttaaagttgctaacataatagtgtgatataggaatgttaccactgaagagtttgtctgagatatacaatctttgtagtcattccataaaccagtagtaatgagacaaaccaaagggaaaacaattactgtttaagttctccaatcactttgtatttaatgaggtttcacttcttcatatgggtttatgagacaaaacaaatacatgagaggaaattatatcatcatttttaatcctcttacttctctaaagatgttgcttaatagttagaaaaaagatttttttttttttgagacggaatctccctgttgcccaggctggagtccagtggggcaatctcggctcactgcaacctccatctcttgggttcaatcaattctcctgcctcagcctaccgagtagctgggattacaggtgtgtgccaccacacctggctaatttttttgtatttttagtagagacagggttttgacatgttgaccaggctgttctggaactcctgacctcaggtgatccacctgcctcagcctcccacagtgctaggattacaggcgtgagccacgatgcccggcctgcaatttggattttactaagaacaataggaatacttaggagctaagtcatatgcaagagagagtggagaagaacagctgggtgggggtgcagggcactgtggcaagggccacattggagtgttctcattctttccgtgtctcatacttatactgctgtctcttgatagttttctttttatatgtttatattttgcctccttaattatgttttaaatttacctagggcataggttgtcttaggactccttatatcctccataatgctttgccttggtaattgattaatatggtaattaattccatatggtaattggttaataaatatttataattgatctg

SEQ ID NO: 170161 - DNA, 498 bp, Artificial Sequence
  derived and/or modified sequence
atgaaagaggaccaggtggtcgcagaggagcctggttttcaggatgaagaagagagccttttccaggacatagatctcctccagaagcatggcatcaacgtagctgacatcaagaagctgaagagcgtggggatctgtacaatcaaaggcattcagatgacaacacgtcgcgccctgtgcaacgtgaaggggttaagtgaggcgaaggtggacaagattaaggaggccgccaacaagctaatcgagcccgggttccttacggccttcgagtacagcgaaaagcggaaaatggtatttcatatcactacgggatcccaagaattcgacaagttgttaggaggagggatcgaatcaatggcgatcaccgaagcgtttggtgagttccggacagggaagacacagctgtctcacactctatgcgtcacggctcaattgccaggcgcgggagggtaccccggcggaaagatcatctttatcgacactgagaacaccctgtag

SEQ ID NO: 170162 - DNA, 498 bp, Artificial Sequence
  derived and/or modified sequence
atgaaggaggaccaggtggtggccgaggagcccggcttccaggatgaggaggagagcctcttccaggacatcgacctgctgcagaagcacggcatcaacgtggccgacatcaagaagctgaagtctgtgggcatctgcaccatcaagggcatccagatgaccacccggcgggccctgtgcaatgtgaagggcctgtctgaggccaaggtggacaagatcaaggaggccgccaacaagctgattgagcccggcttcctgacagcctttgagtacagcgagaagaggaagatggtgttccacatcaccaccggcagccaggagtttgacaagctgctgggcggcggcatcgagagcatggccatcacagaggcctttggagagttcagaacaggcaagacccagctgagccacaccctgtgtgtgacagcccagctgcccggggccggcggctacccaggcggcaagatcatcttcatcgacacagagaacaccctgtag

SEQ ID NO: 170163 - DNA, 498 bp, Artificial Sequence
  derived and/or modified sequence
atgaaggaggaccaggtggtggccgaggagcccggcttccaggacgaggaggagtcgctcttccaagacattgatctgctccagaaacacggcataaacgtggctgacataaaaaagctgaagtctgtaggcatctgcacaataaagggtatacagatgacgacacgacgagctctgtgcaatgtcaagggactgtctgaggccaaagtggacaagatcaaagaagccgcaaataagctgatcgagcctgggttcttgactgcctttgagtacagtgagaagcgtaaaatggtttttcacattactaccggcagccaagagtttgataaactgcttggggggggaattgagtccatggctattacggaagcctttggcgagtttcgtactggcaaaacacagctgagccatacgctgtgcgtcacagcccagcttcctggtgctggcggctatcccggaggaaagattatctttattgacacggagaatactctgtag

SEQ ID NO: 170164 - DNA, 498 bp, Artificial Sequence
  derived and/or modified sequence
atgaaggaggatcaggtcgtggccgaggagcctggcttccaggacgaggaagagtccctttttcaggacatcgacctactgcagaaacacggtatcaatgtggccgatataaagaagttaaagtccgtggggatctgcacaattaagggaatccagatgaccactagaagagcattgtgcaatgtgaaaggcttatcagaagcgaaggtcgataagatcaaggaggctgctaataagctgatcgaaccgggttttctgaccgcttttgagtacagtgaaaagcgaaaaatggtgtttcatataaccacaggaagtcaggaatttgacaaactcctggggggaggcatcgagtctatggctatcacggaagccttcggtgaatttaggacagggaagacccagctgtcgcacactttatgtgtgactgcccagttaccaggcgctggcggatacccaggtggaaaaatcatattcatcgatactgaaaatacgctttag

SEQ ID NO: 170165 - DNA, 1023 bp, Artificial Sequence
  derived and/or modified sequence
atgaaggaggaccaggtggtggccgaggagcctggcttccaagacgaagaagaatcactgtttcaggatatcgatctccttcagaaacatggcatcaacgtggcagatatcaaaaaactgaaaagcgtgggcatatgtacaataaagggaatacagatgaccacgcggagagcgctctgcaatgttaaggggctgtccgaagctaaggtggataagattaaggaggctgccaacaagctgatagaaccagggtttctgaccgcattcgagtatagcgaaaagaggaagatggtattccacattaccacgggttcacaggaattcgacaagctgctgggcggcggtatcgagagcatggctattactgaggcctttggcgagtttcgcacagggaagacccaactttctcatacgctgtgtgtaacagcccaactgcccggcgctggcggttaccccgggggcaagattattttcattgatacggagaatacatttagacccgatcgcctcagggatattgcggacagatttaacgtggatcacgatgctgtcctggacaatgtgctttatgcccgtgcctacacgagtgagcatcaaatggaacttctggattacgtggcggccaagttccacgaagaggccgggatcttcaagctgttgataattgattccatcatggctctgtttagagtcgattttagcggaagaggagaactcgccgagagacagcagaagttggcccagatgctgtcccgtttgcagaaaattagcgaggaatataatgttgccgtgttcgtcaccaatcagatgactgctgaccccggggctaccatgacatttcaagcagaccccaaaaagcctattggcggtcacatcctggcacacgcgtcaactaccaggatctcgcttaggaagggaagaggagagctgcgcatcgccaagatatatgactcccccgagatgccagagaatgaggctaccttcgctattaccgcgggtggaatcggggacgcgaaggaatag

SEQ ID NO: 170166 - DNA, 1023 bp, Artificial Sequence
  derived and/or modified sequence
atgaaggaggaccaggtggtggccgaggagcccggcttccaggatgaggaggagagcctcttccaggacatcgacctgctgcagaagcacggcatcaacgtggccgacatcaagaagctgaagtctgtgggcatctgcaccatcaagggcatccagatgaccacccggcgggccctgtgcaatgtgaagggcctgtctgaggccaaggtggacaagatcaaggaggccgccaacaagctgattgagcccggcttcctgacagcctttgagtacagcgagaagaggaagatggtgttccacatcaccaccggcagccaggagtttgacaagctgctgggcggcggcatcgagagcatggccatcacagaggcctttggagagttcagaacaggcaagacccagctgagccacaccctgtgtgtgacagcccagctgcccggggccggcggctacccaggcggcaagatcatcttcatcgacacagagaacaccttccggccagaccggctgcgggacattgctgaccgcttcaacgtggaccatgatgctgtgctggacaacgtgctgtatgcccgggcctacaccagcgagcaccagatggagctgctggactatgtggccgccaagttccacgaggaggccggcatcttcaagctgctgatcatcgacagcatcatggccctcttccgggtggacttcagcggccgcggggagctggccgagcggcagcagaagctggcccagatgctgagccggctgcagaagatcagcgaggagtacaacgtggccgtgtttgtgaccaaccagatgacagctgaccccggggccaccatgaccttccaggccgaccccaagaagcccatcggcggccacatcctggcccacgccagcaccacccgcatcagcctgaggaagggccgcggggagctgcgcatcgccaagatctatgacagccctgagatgccagaaaatgaggccacctttgccatcacagctgggggcattggagatgccaaggagtag

SEQ ID NO: 170167 - DNA, 1023 bp, Artificial Sequence
  derived and/or modified sequence
atgaaggaggaccaggtggtggccgaggagcccggcttccaggacgaggaagagagcttgtttcaggatatcgaccttctgcaaaaacacggcattaacgtggccgacatcaagaagctgaagagtgtggggatatgcactattaagggaattcagatgactacgcgtcgcgccttgtgtaatgttaagggcctctctgaggcaaaagtcgacaaaataaaagaggccgcaaacaagctgattgagccagggttcctgacagcctttgagtacagtgagaaaaggaagatggtcttccacattacaactggtagccaggaattcgacaaactcttggggggcggcattgagagtatggcgatcacagaagccttcggtgaatttcgaaccgggaaaactcaattgtctcacacactctgcgtaacagcccagctgcctggcgccgggggctacccgggcggaaaaatcatattcatcgacacagagaacacattccggcccgaccgcctgcgcgacatcgccgatcgattcaatgtggatcatgacgccgttctagacaacgtcctgtatgcccgagcatatacaagcgagcaccagatggagctccttgattacgtggcagccaagtttcatgaggaggctggaatctttaagctccttataattgactctataatggccctgttcagggtcgactttagcggcaggggggagctggctgaacgtcaacaaaaactagcccagatgttgagtcgcctccaaaaaattagcgaggagtacaacgtggccgtgttcgtcaccaaccagatgaccgccgatccgggagcaactatgacattccaggctgatcccaaaaaacccattgggggccacatcctggcacacgcaagtaccactaggatttccctgaggaagggccgcggagaactgcgtatcgccaagatctatgacagcccggaaatgcccgagaatgaggctacattcgcaattaccgccggcggcattggcgatgctaaggaatag

SEQ ID NO: 170168 - DNA, 1023 bp, Artificial Sequence
  derived and/or modified sequence
atgaaggaagaccaggtcgttgcggaggagccgggatttcaagacgaggaggagtcgctctttcaagacatagatctcttgcagaaacatgggattaatgtggctgatatcaaaaagctcaagagcgtgggaatctgcaccatcaagggcatccaaatgacaacacgtagagccctttgtaacgtaaagggcctctctgaggctaaagtggacaaaatcaaagaagctgcaaacaaactgatagagccagggtttttgaccgcctttgagtatagcgagaaacgcaagatggtgtttcacattacaacaggaagccaggagtttgacaaattactgggcggtggcatagaaagtatggcaatcactgaggcattcggcgagtttcgcaccggcaagacccagctgagccataccctgtgtgtgaccgcacagctgcctggggctggaggctatcccggtgggaagattatattcatcgacacagagaacacttttaggcccgaccgcctccgagacatagctgatcgcttcaacgtggatcacgacgccgttttggacaatgttctttatgcccgtgcctatacatccgagcaccaaatggagctcttagactacgttgcagctaaatttcatgaagaggctggtatcttcaaactcctgatcatcgacagcatcatggctctctttcgggtcgactttagcggaaggggcgaattagcggaaagacaacaaaagttggctcagatgctctcccgccttcagaagatctcagaggagtacaacgttgctgtgttcgtcaccaaccagatgaccgcagatcccggagctaccatgaccttccaggcagatcccaaaaagcctattgggggacacatactggcccacgcttcaactacccggatttcactcagaaaaggtcgcggtgagctgaggattgccaaaatttatgactcacccgaaatgcctgaaaacgaagcaacctttgccatcaccgccggtgggatcggagacgccaaagaatag

SEQ ID NO: 170169 - DNA, 1023 bp, Artificial Sequence
  derived and/or modified sequence
atgaaggaggaccaggtggtggccgaggagcccggcttccaggacgaggaggagagcctgttccaggacatcgacctgctgcagaagcacggcatcaacgtggccgacatcaagaagctgaagagcgtgggcatctgcaccatcaagggcatccagatgaccaccagaagagccctgtgcaacgtgaagggcctgagcgaggccaaggtggacaagatcaaggaggccgccaacaagctgatcgagcccggcttcctgaccgccttcgagtacagcgagaagagaaagatggtgttccacatcaccaccggcagccaggagttcgacaagctgctgggcggcggcatcgagagcatggccatcaccgaggccttcggcgagttcagaaccggcaagacccagctgagccacaccctgtgcgtgaccgcccagctgcccggcgccggcggctaccccggcggcaagatcatcttcatcgacaccgagaacaccttcagacccgacagactgagagacatcgccgacagattcaacgtggaccacgacgccgtgctggacaacgtgctgtacgccagagcctacaccagcgagcaccagatggagctgctggactacgtggccgccaagttccacgaggaggccggcatcttcaagctgctgatcatcgacagcatcatggccctgttcagagtggacttcagcggcagaggcgagctggccgagagacagcagaagctggcccagatgctgagcagactgcagaagatcagcgaggagtacaacgtggccgtgttcgtgaccaaccagatgaccgccgaccccggcgccaccatgaccttccaggccgaccccaagaagcccatcggcggccacatcctggcccacgccagcaccaccagaatcagcctgagaaagggcagaggcgagctgagaatcgccaagatctacgacagccccgagatgcccgagaacgaggccaccttcgccatcaccgccggcggcatcggcgacgccaaggagtag

SEQ ID NO: 170170 - protein, 162 aa, Artificial Sequence
  derived and/or modified sequence
MRAPIPEPKPGDLIEIFRPFYRHWAIYVGDGYVVHLAPPSEVAGAGAASVMSALTDKAIVKKELLYDVAGSDKYQVNNKHDDKYSPLPCSKIIQRAEELVGQEVLYKLTSENCEHFVNELRYGVARSDQVRDVIIAASVAGMGLAAMSLIGVMFSRNKRQKQ

SEQ ID NO: 170171 - DNA, 489 bp, Artificial Sequence
  derived and/or modified sequence
atgagagcccccattcccgaacctaagcctggggacctcatcgagattttccgtcccttctacaggcattgggccatctacgtgggtgatggctacgttgtgcatctggcaccaccatccgaagttgcgggagcaggagccgcatccgttatgagtgcattgacggataaagctatcgtaaaaaaggagttgctttacgatgtcgcaggctctgataaatatcaggtcaataataaacacgacgataagtacagccccctcccgtgttccaagattatccagcgtgcagaggaactcgtgggccaggaggttctgtataaactgacctctgagaactgcgagcattttgttaatgagttgcgatatggggtggcgcggtcggatcaggtaagggacgtgatcattgccgcttctgttgctggtatgggtctggcagctatgagcctgattggggtcatgttttctaggaacaagcgtcagaagcagtag

SEQ ID NO: 170172 - DNA, 489 bp, Artificial Sequence
  derived and/or modified sequence
atgcgggccccgatcccggagcccaagcccggggacctgatcgaaatctttcgccctttctaccgccattgggctatctatgtgggtgacggctacgtggtacacttggcccccccgagtgaagttgctggagccggggccgcctccgttatgtcagctcttacagataaggctattgttaagaaggagctgctctatgacgtagctggatcagacaagtaccaggtgaacaacaaacacgatgacaaatacagccccctgccctgttccaagattatccagagggctgaggaactcgtcgggcaggaagttctgtataaactgacatcagagaactgtgaacatttcgttaatgaactccgttatggtgtggcacgatctgaccaagtgagggacgtgatcatagctgcatctgtcgcaggcatggggctcgccgccatgtcactcataggagtgatgttctcccgaaataagcgtcaaaaacagtag

SEQ ID NO: 170173 - DNA, 489 bp, Artificial Sequence
  derived and/or modified sequence
atgagggcccccatccctgagcccaagccaggggacctgattgagatcttccggcccttctaccgccactgggccatctacgtgggagatggctacgtggtgcacctggccccacccagcgaggtggccggggccggggccgcctctgtgatgtctgccctgacagacaaggccatcgtgaagaaggagctgctgtatgatgtggccggcagtgacaagtaccaggtgaacaacaagcatgatgacaagtacagccccctgccctgcagcaagatcatccagagagctgaggagctggtgggccaggaggtgctgtacaagctgaccagcgagaactgtgagcactttgtgaatgagctgcgctatggagtggcccggagtgaccaggtgagagatgtgatcatcgccgcctctgtggccggcatgggcctggccgccatgagcctcatcggcgtgatgttcagcaggaacaagaggcagaagcagtag

SEQ ID NO: 170174 - DNA, 489 bp, Artificial Sequence
  derived and/or modified sequence
atgcgggcccccatccccgagcccaagcccggcgacctgatcgagatatttcgtccattttatcgccactgggcgatctacgttggcgatggctatgttgtacatctagcccccccatccgaggtcgccggagctggggccgcctccgttatgagtgccctgaccgacaaagccatagtgaagaaggagctgctgtatgatgtggcgggaagcgataagtaccaggtgaataataaacacgatgataagtattcccccctgccttgtagcaagatcattcaacgggccgaggagcttgtgggtcaggaagtcctctataaattaacaagcgagaattgtgaacatttcgtcaacgaacttcgttacggagtcgcaaggtctgaccaagtgagagatgttatcatagccgcctcagtcgctggaatgggacttgcagccatgagcttgatcggcgtcatgttctcccgaaataaaaggcaaaagcagtag

SEQ ID NO: 170175 - DNA, 489 bp, Artificial Sequence
  derived and/or modified sequence
atgcgggcccccatccccgagcccaagcccggcgacctgatcgagatcttcagacctttctatcgacactgggctatctatgtgggtgatgggtatgtcgtgcacctggctcctccctcagaggttgcaggggcgggagccgcctccgtgatgagcgcgttgacggacaaggccatagtgaagaaggagttactgtatgatgtggccggtagcgacaaataccaggtgaataacaagcacgatgataaatactcacctctgccttgttccaaaatcatccagagggccgaggagctagttggtcaggaggtgttgtacaagctgacgagcgagaactgtgaacactttgttaatgagctgcgttacggagtggcccgcagtgaccaggtgcgagatgtcattatcgccgctagcgtcgccgggatgggtctcgcggccatgtcactgatcggcgtgatgtttagtcgaaataagagacagaagcaatag

SEQ ID NO: 170176 - DNA, 2594 bp, Artificial Sequence
  derived and/or modified sequence
cttcctggaagggtgcgataaggccgggcgaggtgcctgggatgcttctccccttccgcgaggaagagatctaattgggtagggcgggtgtagactagcctgccgagccgcccgctggcacctgcagcctcctgggcgcccgccgggccccggcgagaaagttgttaaagggagcgaggtggttgttcctggggtccgaggcgcgcctctcacgccctgcccaacagaagccgcagtcccgtggggtctggagacgcagtttcctgttaatgacaataaatccctgctccccctgcctcagacatctacgcagcgaaatcgagcctggccttgagggtccacaccgcgagggaagatgcgtgcgcccattccagagcctaagcctggagacctgattgagatttttcgccctttctacagacactgggccatctatgttggcgatggatatgtggttcatctggcccctccaagtgaggtcgcaggagctggtgcagccagtgtcatgtccgccctgactgacaaggccatcgtgaagaaggaattgctgtatgatgtggccgggagtgacaagtaccaggtcaacaacaaacatgatgacaagtactcgccgctgccctgcagcaaaatcatccagcgggcggaggagctggtggggcaggaggtgctctacaagctgaccagtgagaactgcgagcactttgtgaatgagctgcgctatggagtcgcccgcagtgaccaggtcagagatgtcatcatcgctgcaagcgttgcaggaatgggcttggcagccatgagccttattggagtcatgttctcaagaaacaagcgacaaaagcaataactgaaaaagactgtcctgtcagcgatgactttatacatcaagggggtcttgttttgctagagagtttggggtttggtttgtggatttcattgtgatttataataaggcttattttcacagaataaaataaagcaaaacgagggaggattttattgggggaagtgcagcaagaactgcctggtgtgaagtctgttcagggaacagccgggctgtcttcctggtcagggattgtctttcactttctttttgcgtgctgtgttctttgcattgcaggaggcagagtccagctccagttatctcaagtagagggcgtttctggtcgtcaggatacatgcggggcggaagggagacagaaagacataatacacaagaacagaaagcagcagacagccaggacccttggcccggaactagatctaggatggcctctgagactcagcagctggagtctgtagatgttcagctgagttgaaaaaaaaaaagtcctcggctataaggaaatttagtatagatgcttgccaatcttactaaaatttcccttattttcctttgctctacacgtctttcctttgccttgttgcttccatctccttggcactcctgcttcctcactgcttctgcttgccatgatccccaagtctctgacccaccttcctgcctgctcctctcctcccacattggctcagattctttccccgctgtctgtgggtccacactcccagtggcacctccaggagagaatctgattggctcagttcgccagataactcaactttcccattggctacctttgggtcaggtgatctccactagacctatcgcctatgcctgatggtgggtcacatggtgcaaatgttgcctgagagcttagtggattagggatgtggctgggctcatggttgacgtccctgctgctgagcccttacgggtcaggctgggagaaggtaccatgttgtgtgactggtcatttgaggtcttgcagctgttgcttgctgggcttggcaggtgttcaaagtgaccatttttctgaagggtttttttctgagtattcctcagatgtactcccctggggccgacggtctttccttccacagggcgatgcttccctacttgcttgtgaatgtttccttcatctccaggttgtctggggacaattctgtcttttggaggcctgggcaggatttacagagggctccatgccagctccttcctgccgggtccacttctggtgtagggtaaacacctgcccattcatgtcctagtgttgatagaataatcattttctttcagtacagtttcctttttttttttttttgccccggctttttagatgtagcacttaatgccagttctcgagctccccaaacttaagggacacaggtcaacaagcagtaggtctttggaagctcgctctctcacatggtataaggtgagggggacacatggaatgtaaacctccaaactaattatgggggaaaaaggaatgagaaaaacaaacacaagaaggcaaaacaaaaacacctggttcaattaaaaacaacaacaaagcaaaacaaaaaaaacccaaaaccaaaccacacaataaatgagaaaaaaattacataaaacagatgacatgtatagaaataaaaaaatagaatggaggaactaattccaaatatataagtaatcctaagtggactaaatttgcaaagtaaaaggcaaacattacactggattaaaaaacaaatccagggaatacagtttacag

SEQ ID NO: 170177 - DNA, 1099 bp, Artificial Sequence
  derived and/or modified sequence
gggtgacctcacgccggcccggccaccgcggccattagacccggtccaattgctggggctgcagcgctgcctccgagaccgcgagacatctacgcagcgaaatcgagcctggccttgagggtccacaccgcgagggaagatgcgtgcgcccattccagagcctaagcctggagacctgattgagatttttcgccctttctacagacactgggccatctatgttggcgatggatatgtggttcatctggcccctccaagtgaggtcgcaggagctggtgcagccagtgtcatgtccgccctgactgacaaggccatcgtgaagaaggaattgctgtatgatgtggccgggagtgacaagtaccaggtcaacaacaaacatgatgacaagtactcgccgctgccctgcagcaaaatcatccagcgggcggaggagctggtggggcaggaggtgctctacaagctgaccagtgagaactgcgagcactttgtgaatgagctgcgctatggagtcgcccgcagtgaccaggtcagagatgtcatcatcgctgcaagcgttgcaggaatgggcttggcagccatgagccttattggagtcatgttctcaagaaacaagcgacaaaagcaataactgaaaaagactgtcctgtcagcgatgactttatacatcaagggggtcttgttttgctagagagtttggggtttggtttgtggatttcattgtgatttataataaggcttattttcacagaataaaataaagcaaaacgagggaggattttattgggggaagtgcagcaagaactgcctggtgtgaagtctgttcagggaacagccgggctgtcttcctggtcagggattgtctttcactttctttttgcgtgctgtgttctttgcattgcaggaggcagagtccagctccagttatctcaagtagagggcgtttctggtcgtcaggatacatgcggggcggaagggagacagaaagacataatacacaagaacagaaagcagcagacagccaggacccttggcccggaactagatctaggatggcctctgagactcagcagctggagtctgtagatgttcagctgagttg

SEQ ID NO: 170178 - DNA, 489 bp, Artificial Sequence
  derived and/or modified sequence
atgcgggctcctatcccagaacccaagcctggagacctgatcgagatctttaggccgttttatcgacattgggctatatacgtgggtgacggatacgttgtgcacctcgcaccaccgtcagaggtggcaggcgctggagctgcttctgtgatgtctgccctcacagacaaggcaatcgtgaagaaagaactgctgtatgatgttgcaggtagcgacaaataccaggtcaacaacaaacatgatgataagtactctccgctgccttgtagcaagattatccagcgcgcagaggaactcgtggggcaggaggtgctgtataagttaacgtcagagaactgcgagcacttcgtaaacgagctacggtatggtgtggcgcgtagcgaccaagtccgagacgtgatcattgcggctagcgtggcgggaatggggctcgcggctatgtcactgatcggtgtgatgtttagcagaaacaaaagacagaagcagtag

SEQ ID NO: 170179 - DNA, 489 bp, Artificial Sequence
  derived and/or modified sequence
atgagagcccctatcccggagccgaagcctggtgatctgatcgagatttttcgacccttctatagacattgggccatttatgttggggacggctatgtggtccacctggctccaccatctgaagtcgcaggcgcaggggctgcatccgtcatgagcgctctcactgacaaagctatagttaaaaaggaactgctgtacgacgtcgccggtagcgataagtatcaggtgaataataagcacgacgataagtatagccctttgccgtgctccaaaattatacagcgagccgaagagctggtaggacaggaagtgctgtataagttgacgtccgagaattgcgagcacttcgtgaatgaactccggtacggggtcgcacggtccgatcaggttcgggacgtgattattgcagcttccgtggctggaatggggcttgccgcaatgagcctgattggcgtgatgttctcccgcaacaagcgtcagaaacagtag

SEQ ID NO: 170180 - DNA, 489 bp, Artificial Sequence
  derived and/or modified sequence
atgagagcccccatccccgagcccaagcccggcgacctgatcgagatcttcagacccttctacagacactgggccatctacgtgggcgacggctacgtggtgcacctggccccccccagcgaggtggccggcgccggcgccgccagcgtgatgagcgccctgaccgacaaggccatcgtgaagaaggagctgctgtacgacgtggccggcagcgacaagtaccaggtgaacaacaagcacgacgacaagtacagccccctgccctgcagcaagatcatccagagagccgaggagctggtgggccaggaggtgctgtacaagctgaccagcgagaactgcgagcacttcgtgaacgagctgagatacggcgtggccagaagcgaccaggtgagagacgtgatcatcgccgccagcgtggccggcatgggcctggccgccatgagcctgatcggcgtgatgttcagcagaaacaagagacagaagcagtag

SEQ ID NO: 170181 - protein, 414 aa, Artificial Sequence
  derived and/or modified sequence
MKAQTALSFFLILITSLSGSQGIFPLAFFIYVPMNEQIVIGRLDEDIILPSSFERGSEVVIHWKYQDSYKVHSYYKGSDHLESQDPRYANRTSLFYNEIQNGNASLFFRRVSLLDEGIYTCYVGTAIQVITNKVVLKVGVFLTPVMKYEKRNTNSFLICSVLSVYPRPIITWKMDNTPISENNMEETGSLDSFSINSPLNITGSNSSYECTIENSLLKQTWTGRWTMKDGLHKMQSEHVSLSCQPVNDYFSPNQDFKVTWSRMKSGTFSVLAYYLSSSQNTIINESRFSWNKELINQSDFSMNLMDLNLSDSGEYLCNISSDEYTLLTIHTVHVEPSQETASHNKGLWILVPSAILAAFLLIWSVKCCRAQLEARRSRHPADGAQQERCCVPPGERCPSAPDNGEENVPLSGKV

SEQ ID NO: 170182 - protein, 145 aa, Artificial Sequence
  derived and/or modified sequence
MKAQTALSFFLILITSLSGSQGIFPLAFFIYVPMNEQIVIGRLDEDIILPSSFERGSEVVIHWKYQDSYKVHSYYKGSDHLESQDPRYANRTSLFYNEIQNGNASLFFRRVSLLDEGIYTCYVGTAIQVITNKVVLKVGVFLTPV

SEQ ID NO: 170183 - protein, 136 aa, Artificial Sequence
  derived and/or modified sequence
MKAQTALSFFLILITSLSGSQGIFPLAFFIYVPMNEQIVIGRLDEDIILPSSFERGSEVVIHWKYQDSYKVHSYYKGSDHLESQDPRYANRTSLFYNEIQNGNASLFFRRVSLLDEGIYTCYVGTAIQVITNKVVL

SEQ ID NO: 170184 - DNA, 1245 bp, Artificial Sequence
  derived and/or modified sequence
atgaaggcccagaccgccctgagcttcttcctgatcctgatcaccagcctgagcggcagccagggcatcttccccctggccttcttcatctacgtgcccatgaacgagcagatcgtgatcggcagactggacgaggacatcatcctgcccagcagcttcgagagaggcagcgaggtggtgatccactggaagtaccaggacagctacaaggtgcacagctactacaagggcagcgaccacctggagagccaggaccccagatacgccaacagaaccagcctgttctacaacgagatccagaacggcaacgccagcctgttcttcagaagagtgagcctgctggacgagggcatctacacctgctacgtgggcaccgccatccaggtgatcaccaacaaggtggtgctgaaggtgggcgtgttcctgacccccgtgatgaagtacgagaagagaaacaccaacagcttcctgatctgcagcgtgctgagcgtgtaccccagacccatcatcacctggaagatggacaacacccccatcagcgagaacaacatggaggagaccggcagcctggacagcttcagcatcaacagccccctgaacatcaccggcagcaacagcagctacgagtgcaccatcgagaacagcctgctgaagcagacctggaccggcagatggaccatgaaggacggcctgcacaagatgcagagcgagcacgtgagcctgagctgccagcccgtgaacgactacttcagccccaaccaggacttcaaggtgacctggagcagaatgaagagcggcaccttcagcgtgctggcctactacctgagcagcagccagaacaccatcatcaacgagagcagattcagctggaacaaggagctgatcaaccagagcgacttcagcatgaacctgatggacctgaacctgagcgacagcggcgagtacctgtgcaacatcagcagcgacgagtacaccctgctgaccatccacaccgtgcacgtggagcccagccaggagaccgccagccacaacaagggcctgtggatcctggtgcccagcgccatcctggccgccttcctgctgatctggagcgtgaagtgctgcagagcccagctggaggccagaagaagcagacaccccgccgacggcgcccagcaggagagatgctgcgtgccccccggcgagagatgccccagcgcccccgacaacggcgaggagaacgtgcccctgagcggcaaggtgtag

SEQ ID NO: 170185 - DNA, 1245 bp, Artificial Sequence
  derived and/or modified sequence
atgaaagcccagactgctttgtctttctttctcattctcattacgagcttgagtggtagtcaaggcatcttccctttagcgttttttatctacgtgcctatgaacgaacagatcgtgattgggcggcttgacgaggacattatactgccaagttctttcgagcgtggttctgaggtcgtaatacactggaaataccaggacagctacaaggtccattcatactacaagggcagcgaccacttggagtcgcaggacccccggtacgcgaaccgcacttcactgttctacaatgagatccagaacggcaacgccagtctatttttcaggcgcgtttcattgctggatgaggggatttatacatgttacgttggtacagccattcaggttattactaacaaagtcgtcctgaaggtaggcgtgtttttaaccccagtgatgaagtatgaaaaaaggaacactaacagctttcttatctgcagtgtgctctccgtttatcccaggccaatcataacctggaagatggacaacaccccaatttcagaaaacaacatggaggaaacaggatcccttgattctttttccattaactctcccctgaatatcaccgggtccaacagttcttacgagtgcactatcgagaatagcctgttaaagcagacatggacaggccgctggacaatgaaggatgggcttcacaaaatgcagtctgagcacgtcagcctcagctgccagcccgtgaacgactacttctcccctaaccaggatttcaaagtcacatggagcagaatgaaatccgggaccttcagcgtgctggcctactacctgtctagcagtcagaatacgatcatcaacgagtcgcggttctcctggaacaaggagctgattaaccaatccgatttttcaatgaatctcatggacttgaacttatccgatagtggcgagtacttgtgcaatatctcgagcgacgagtatacattactgaccatacatactgttcatgttgagccttcacaggaaacagcgagccacaacaagggtctttggatactcgtaccttccgcaatactcgctgcctttctcctcatctggtccgtgaaatgttgccgggcacagttagaggctcgccgctctcgccatcctgccgatggtgcacagcaggagagatgctgcgttccaccaggcgagcgttgtcctagtgctccagacaatggcgaagaaaacgtacccctatcaggaaaagtatag

SEQ ID NO: 170186 - DNA, 1245 bp, Artificial Sequence
  derived and/or modified sequence
atgaaggcccagacagctctatcatttttcctcatactcattaccagtctctctggttcccaggggatctttccactcgcatttttcatttatgtccctatgaacgagcaaatcgtcatcgggagactggatgaggatattattctgccgtcatcatttgagcgcggctcagaggtggttatccactggaagtatcaagactcttacaaagtgcattcctactacaaagggtcagatcatctcgagtcccaagaccccagatatgctaatcgtacgagtcttttttacaacgaaatccagaacggcaacgcctccctgttttttcggcgggtctcgctgctggatgaggggatctatacatgctacgtgggaacggccatccaggtcataaccaacaaggtggtgctcaaggtgggtgtctttctgactccagtcatgaagtacgaaaagagaaacacaaacagcttcctgatttgcagcgtattgtccgtctaccctaggcccatcattacctggaagatggataatacgcctatttccgagaacaacatggaggagactggatcactggactccttctctatcaattctcccctgaacattacagggagcaattcttcttacgaatgtaccattgaaaattccttgctgaaacagacttggaccgggcgttggaccatgaaggacggtttgcacaagatgcaaagcgaacacgtgagcctctcttgtcagcctgtgaatgattactttagccctaatcaggatttcaaggtcacttggtccagaatgaaatctggaacgttttccgttctggcttactatttatcttcaagtcagaacacaatcattaacgaatcccgcttttcctggaataaagagctgatcaaccagagtgatttctccatgaatcttatggacttaaatctaagtgattccggagaatacttgtgcaacatcagtagcgacgagtacacactcctcacaatccatacggtacatgttgaacctagccaggaaaccgcctcccacaataaagggttgtggattctggtgccaagcgccatcctggccgcatttctcctgatctggtccgtgaagtgttgtagggcgcagcttgaagcccgaagatcacgccatccagctgacggcgctcagcaggagcgctgctgcgtgccgcctggagaacgctgcccttctgcccctgacaatggagaagagaacgtgcctctgagcggaaaagtttag

SEQ ID NO: 170187 - DNA, 1245 bp, Artificial Sequence
  derived and/or modified sequence
atgaaggctcagaccgctctttcctttttcctgatcctcattacatccctgagtgggtcacagggcatcttccctctggcatttttcatctacgtgcccatgaatgagcaaatcgtgattggccggctggacgaagacattatcttaccatcgagtttcgaaaggggctctgaggtcgtaattcactggaagtatcaagactcttacaaagtgcacagttactataaaggttccgatcatcttgagagtcaggatccccggtatgcgaataggacctccttgttctacaatgaaattcagaacgggaatgcctcactgttttttagacgggtttcacttctggacgagggtatctacacctgctatgtcggtaccgctattcaagtgattaccaacaaggtagtactgaaggtgggagtgttcctcacaccggtgatgaagtacgagaagagaaatacgaactcctttttgatttgtagtgtgctgagcgtgtatccacgccccatcataacctggaagatggacaacacacctatctctgaaaacaatatggaagaaaccgggagcctggattcgtttagtatcaactcccccctaaacattaccggctctaattcctcgtatgaatgcactatagagaactctctccttaagcagacctggaccggacggtggaccatgaaggacggactgcacaaaatgcaatccgagcacgtctctctgtcgtgccagcctgtcaatgactatttctccccaaaccaggactttaaggttacctggtcccggatgaaatcaggcaccttttctgtactggcatactacctgagcagcagccagaatacgattatcaatgagtcacgcttttcctggaataaagaacttatcaaccagagtgacttttcaatgaacctcatggacctcaatctctccgattcaggcgagtatctgtgtaatattagctcagacgaatatacgttactgacaattcataccgttcatgtagagccttctcaggagacagcctctcacaacaagggactctggatccttgtgccctcagccatactcgctgcatttttgctcatttggagtgtgaagtgctgccgagctcagctcgaagccaggaggagtcgccaccccgccgatggggcccagcaggaaaggtgctgtgtgcccccgggggagcgctgccctagtgcaccagataacggtgaggagaatgtgcctctatccggcaaggtgtag

SEQ ID NO: 170188 - DNA, 2666 bp, Artificial Sequence
  derived and/or modified sequence
agttctcttcaagtcatgtaatcgacttttttgaattagttttcagtttcattttgttttccctaattcaagttgggaacacttcattttccccaattcaagttgggaacacttccttggtatttccttgctacatggactttagcaaatgctactttactctccttccagctactcaggaggctgaggcaggagaatcgcttgaacccgggaggcggaggttacagtgagccttttcctagttttactgttggaagcctaactcacaggagagattatgcaatacagtcctgaagtcaagggaggagagcatgtaggagaatactaaccctgcacagattgtgatggtgatgtggaatatactaaagcctagaacgcacctcctctgcatgactaatatgttctgcacaagacatgaaggcacagacagcactgtctttcttcctcattctcataacatctctgagtggatctcaaggcatattccctttggctttcttcatttatgttcctatgaatgaacaaatcgtcattggaagacttgatgaagatataattctcccttcttcatttgagaggggatccgaagtcgtaatacactggaagtatcaagatagctataaggttcacagttactacaaaggcagtgaccatttggaaagccaagatcccagatatgcaaacaggacatcccttttctataatgagattcaaaatgggaatgcgtcgctatttttcagaagagtaagccttctggacgaaggaatttacacctgctatgtaggaacagcaattcaagtgattacaaacaaagtggtgctaaaggtgggagtttttctcacacccgtgatgaagtatgaaaagaggaacacaaacagcttcttaatatgcagcgtgttaagtgtttatcctcgtccaattatcacgtggaaaatggacaacacacctatctctgaaaacaacatggaagaaacagggtctttggattctttttctattaacagcccactgaatattacaggatcaaattcatcttatgaatgtacaattgaaaattcactgctgaagcaaacatggacagggcgctggacgatgaaagatggccttcataaaatgcaaagtgaacacgtttcactctcatgtcaacctgtaaatgattatttttcaccaaaccaagacttcaaagttacttggtccagaatgaaaagtgggactttctctgtcctggcttactatctgagctcctcacaaaatacaattatcaatgaatcccgattctcatggaacaaagagctgataaaccagagtgacttctctatgaatttgatggatcttaatctttcagacagtggggaatatttatgcaatatttcttcggatgaatatactttacttaccatccacacagtgcatgtagaaccgagccaagaaacagcttcccataacaaaggcttatggattttggtgccctctgcgattttggcagcttttctgctgatttggagcgtaaaatgttgcagagcccagctagaagccaggaggagcagacaccctgctgatggagcccaacaagaaagatgttgtgtccctcctggtgagcgctgtcccagtgcacccgataatggcgaagaaaatgtgcctctttcaggaaaagtataggaaatgagagaagactgtgacaactcatgacctgcatccttaatatccagtgacttcatctcccctttcttcaccacaattccaggcaatggcctgtcggagcagacaattctaccactgcaaagagttgtaaccattttctggtatcacatttatttttcaagacatacttttcaagacatcattcactgacccactacctgcattgagtataaatgcctggatgttaaggattccaatttaactttgaaaagaactgtctcattcatttacatttctgttacagtcagcccaggaggttacagtgagctctccactaagaatctggaagaaatgcatcactaggggttgattcccaatctgatcaactgataatgggtgagagagcaggtaagagccaaagtcaccttagtggaaaggttaaaaaccagagcctggaaaccaagatgattgatttgacaaggtattttagtctagttttatatgaacggttgtatcagggtaaccaactcgatttgggatgaatcttagggcaccaaagactaagacagtatctttaagattgctagggaaaagggccctatgtgtcaggcctctgagcccaagccaagcatcgcatcccctgtgatttgcacgtatacatccagatggcctaaagtaactgaagatccacaaaagaagtaaaaatagccttaactgatgacattccaccattgtgatttgttcctgccccaccctaactgatcaatgtactttgtaatctcccccacccttaagaaggtactttgtaatcttccccacccttaagaaggttctttgtaattctccccacccttgagaatgtactttgtgagatccaccctgcccacaaaacattgctcttaacttcaccgcctaacccaaaacctataagaactaatgataatccatcacccttcgctgactctcttttcggactcagcccacctgcacccaggtgaaataaacagctttattgctcacacaaa

SEQ ID NO: 170189 - DNA, 2379 bp, Artificial Sequence
  derived and/or modified sequence
atttctcatctcagcacatatagaactggatgcccttgtggtacatctcaaggctgatttgaaagcttgagagaccatcaagaattggatttggggaagagcatgactaatatgttctgcacaagacatgaaggcacagacagcactgtctttcttcctcattctcataacatctctgagtggatctcaaggcatattccctttggctttcttcatttatgttcctatgaatgaacaaatcgtcattggaagacttgatgaagatataattctcccttcttcatttgagaggggatccgaagtcgtaatacactggaagtatcaagatagctataaggttcacagttactacaaaggcagtgaccatttggaaagccaagatcccagatatgcaaacaggacatcccttttctataatgagattcaaaatgggaatgcgtcgctatttttcagaagagtaagccttctggacgaaggaatttacacctgctatgtaggaacagcaattcaagtgattacaaacaaagtggtgctaaaggtgggagtttttctcacacccgtgatgaagtatgaaaagaggaacacaaacagcttcttaatatgcagcgtgttaagtgtttatcctcgtccaattatcacgtggaaaatggacaacacacctatctctgaaaacaacatggaagaaacagggtctttggattctttttctattaacagcccactgaatattacaggatcaaattcatcttatgaatgtacaattgaaaattcactgctgaagcaaacatggacagggcgctggacgatgaaagatggccttcataaaatgcaaagtgaacacgtttcactctcatgtcaacctgtaaatgattatttttcaccaaaccaagacttcaaagttacttggtccagaatgaaaagtgggactttctctgtcctggcttactatctgagctcctcacaaaatacaattatcaatgaatcccgattctcatggaacaaagagctgataaaccagagtgacttctctatgaatttgatggatcttaatctttcagacagtggggaatatttatgcaatatttcttcggatgaatatactttacttaccatccacacagtgcatgtagaaccgagccaagaaacagcttcccataacaaaggcttatggattttggtgccctctgcgattttggcagcttttctgctgatttggagcgtaaaatgttgcagagcccagctagaagccaggaggagcagacaccctgctgatggagcccaacaagaaagatgttgtgtccctcctggtgagcgctgtcccagtgcacccgataatggcgaagaaaatgtgcctctttcaggaaaagtataggaaatgagagaagactgtgacaactcatgacctgcatccttaatatccagtgacttcatctcccctttcttcaccacaattccaggcaatggcctgtcggagcagacaattctaccactgcaaagagttgtaaccattttctggtatcacatttatttttcaagacatacttttcaagacatcattcactgacccactacctgcattgagtataaatgcctggatgttaaggattccaatttaactttgaaaagaactgtctcattcatttacatttctgttacagtcagcccaggaggttacagtgagctctccactaagaatctggaagaaatgcatcactaggggttgattcccaatctgatcaactgataatgggtgagagagcaggtaagagccaaagtcaccttagtggaaaggttaaaaaccagagcctggaaaccaagatgattgatttgacaaggtattttagtctagttttatatgaacggttgtatcagggtaaccaactcgatttgggatgaatcttagggcaccaaagactaagacagtatctttaagattgctagggaaaagggccctatgtgtcaggcctctgagcccaagccaagcatcgcatcccctgtgatttgcacgtatacatccagatggcctaaagtaactgaagatccacaaaagaagtaaaaatagccttaactgatgacattccaccattgtgatttgttcctgccccaccctaactgatcaatgtactttgtaatctcccccacccttaagaaggtactttgtaatcttccccacccttaagaaggttctttgtaattctccccacccttgagaatgtactttgtgagatccaccctgcccacaaaacattgctcttaacttcaccgcctaacccaaaacctataagaactaatgataatccatcacccttcgctgactctcttttcggactcagcccacctgcacccaggtgaaataaacagctttattgctcacacaaa

SEQ ID NO: 170190 - DNA, 2406 bp, Artificial Sequence
  derived and/or modified sequence
agtttactctacatcatagcagagaaaatggacaaaacacagctgttttgcatgtaggagaatactaaccctgcacagattgtgatggtgatgtggaatatactaaagcctagaacgcacctcctctgcatgactaatatgttctgcacaagacatgaaggcacagacagcactgtctttcttcctcattctcataacatctctgagtggatctcaaggcatattccctttggctttcttcatttatgttcctatgaatgaacaaatcgtcattggaagacttgatgaagatataattctcccttcttcatttgagaggggatccgaagtcgtaatacactggaagtatcaagatagctataaggttcacagttactacaaaggcagtgaccatttggaaagccaagatcccagatatgcaaacaggacatcccttttctataatgagattcaaaatgggaatgcgtcgctatttttcagaagagtaagccttctggacgaaggaatttacacctgctatgtaggaacagcaattcaagtgattacaaacaaagtggtgctaaaggtgggagtttttctcacacccgtgatgaagtatgaaaagaggaacacaaacagcttcttaatatgcagcgtgttaagtgtttatcctcgtccaattatcacgtggaaaatggacaacacacctatctctgaaaacaacatggaagaaacagggtctttggattctttttctattaacagcccactgaatattacaggatcaaattcatcttatgaatgtacaattgaaaattcactgctgaagcaaacatggacagggcgctggacgatgaaagatggccttcataaaatgcaaagtgaacacgtttcactctcatgtcaacctgtaaatgattatttttcaccaaaccaagacttcaaagttacttggtccagaatgaaaagtgggactttctctgtcctggcttactatctgagctcctcacaaaatacaattatcaatgaatcccgattctcatggaacaaagagctgataaaccagagtgacttctctatgaatttgatggatcttaatctttcagacagtggggaatatttatgcaatatttcttcggatgaatatactttacttaccatccacacagtgcatgtagaaccgagccaagaaacagcttcccataacaaaggcttatggattttggtgccctctgcgattttggcagcttttctgctgatttggagcgtaaaatgttgcagagcccagctagaagccaggaggagcagacaccctgctgatggagcccaacaagaaagatgttgtgtccctcctggtgagcgctgtcccagtgcacccgataatggcgaagaaaatgtgcctctttcaggaaaagtataggaaatgagagaagactgtgacaactcatgacctgcatccttaatatccagtgacttcatctcccctttcttcaccacaattccaggcaatggcctgtcggagcagacaattctaccactgcaaagagttgtaaccattttctggtatcacatttatttttcaagacatacttttcaagacatcattcactgacccactacctgcattgagtataaatgcctggatgttaaggattccaatttaactttgaaaagaactgtctcattcatttacatttctgttacagtcagcccaggaggttacagtgagctctccactaagaatctggaagaaatgcatcactaggggttgattcccaatctgatcaactgataatgggtgagagagcaggtaagagccaaagtcaccttagtggaaaggttaaaaaccagagcctggaaaccaagatgattgatttgacaaggtattttagtctagttttatatgaacggttgtatcagggtaaccaactcgatttgggatgaatcttagggcaccaaagactaagacagtatctttaagattgctagggaaaagggccctatgtgtcaggcctctgagcccaagccaagcatcgcatcccctgtgatttgcacgtatacatccagatggcctaaagtaactgaagatccacaaaagaagtaaaaatagccttaactgatgacattccaccattgtgatttgttcctgccccaccctaactgatcaatgtactttgtaatctcccccacccttaagaaggtactttgtaatcttccccacccttaagaaggttctttgtaattctccccacccttgagaatgtactttgtgagatccaccctgcccacaaaacattgctcttaacttcaccgcctaacccaaaacctataagaactaatgataatccatcacccttcgctgactctcttttcggactcagcccacctgcacccaggtgaaataaacagctttattgctcacacaaa

SEQ ID NO: 170191 - DNA, 1245 bp, Artificial Sequence
  derived and/or modified sequence
atgaaggcccagacagccctgtccttcttcctgatcctgatcaccagcctgagcggcagccagggcatcttccccctggccttcttcatctacgtgcccatgaatgagcagatcgtcatcggccgcctggatgaggacatcatcctgcccagcagctttgagcggggcagcgaggtggtgatccactggaagtaccaggacagctacaaggtgcacagctactacaagggcagtgaccacctggagagccaggaccccaggtatgccaacagaaccagcctcttctacaatgagatccagaatggaaatgccagcctcttcttcagaagagtgtccctgctggatgagggcatctacacctgctacgtgggcacagccatccaggtgatcaccaacaaggtggtgctgaaggtgggcgtcttcctgacccctgtgatgaagtatgagaagaggaacaccaacagcttcctgatctgcagcgtgctgtctgtgtacccccggcccatcatcacctggaagatggacaacacccccatcagcgagaacaacatggaggagaccggcagcctggacagcttcagcatcaacagccccctgaacatcaccggcagcaacagcagctatgaatgtaccatcgagaacagcctgctgaagcagacctggacaggccgctggaccatgaaggatggcctgcacaagatgcagagcgagcacgtgtccctgagctgccagcctgtgaatgactacttcagccccaaccaggacttcaaggtgacctggagcaggatgaagagcggcaccttctctgtgctggcctactacctgagcagcagccagaacaccatcatcaatgaaagccgcttctcctggaacaaggagctgatcaaccagagcgacttctccatgaacctgatggacctgaacctgagtgacagcggggagtacctgtgcaacatcagcagtgatgagtacaccctgctgaccatccacacagtgcacgtggagcccagccaggagacagccagccacaacaagggcctgtggatcctggtgcccagcgccatcctggccgccttcctgctgatctggagcgtgaagtgctgccgggcccagctggaggcccggcgcagccgccacccagcagatggagcccagcaggagcgctgctgcgtgcccccaggagagcgctgccccagcgccccagacaatggagaggagaatgtgcccctgagcggcaaggtgtag

SEQ ID NO: 170192 - DNA, 1245 bp, Artificial Sequence
  derived and/or modified sequence
atgaaggcccagaccgccctgagcttcttcctgatcctgatcacctccctaagtggctcccagggaatctttcctctggcattcttcatatatgtccctatgaatgagcaaatcgttatagggcgcctagacgaggatataatcctccccagctcatttgaaaggggatccgaagtggtcattcactggaagtatcaggattcttacaaggtgcattcatactacaagggttccgatcatctggagtcacaagatccacggtacgctaaccgcacatcactgttttacaacgagatccagaacggaaatgcaagcctgtttttccgcagggtttccctactcgacgaaggtatatatacttgctacgtaggcacagctatacaggtgattactaacaaagtggtgctgaaggtgggtgtgtttcttacccccgtaatgaaatacgaaaaaaggaataccaactctttcctgatttgttcggtgctgtcagtttaccctaggccgattatcacttggaagatggacaatacccctatctctgagaataatatggaagagaccggctccctagatagcttcagcattaatagtcccctgaatatcaccggttctaacagcagctacgagtgcacaatagaaaactctctgctgaagcagacttggactggaagatggaccatgaaggatggtctacacaagatgcagtccgagcacgtgagcctgtcatgtcaaccagtgaacgactatttctccccaaatcaggacttcaaagtgacttggtcccggatgaagagtggcactttctcagttctggcttattatctgagttcatctcagaatacaatcatcaacgagagcaggttttcctggaacaaagagttaattaaccaatcagatttctcaatgaatctgatggacctaaacctcagcgactctggggagtatctgtgcaacatttcatccgacgagtataccctgctgaccatacacaccgtgcacgtcgagccttcccaggagactgcatcgcacaacaaggggctttggattcttgtgccgagcgccatactcgccgccttcctcttaatctggtctgtgaaatgttgtcgagcccagttagaggcccgtcggtcccgacacccagcggacggtgcccaacaggagagatgctgcgttccaccaggcgaaaggtgtccatctgctcccgacaatggagaggagaatgtcccattaagtggaaaggtttag

SEQ ID NO: 170193 - DNA, 1245 bp, Artificial Sequence
  derived and/or modified sequence
atgaaggcccagaccgccctgagcttcttcctgatcctgatcacctccctaagcggatctcagggaatcttccctttagctttttttatctatgtacctatgaacgagcagattgtaattggccgcctcgatgaagacataatactccctagctcatttgaaaggggaagtgaggttgtgatccactggaaataccaggactcgtacaaggtgcactcctactataaagggtcagaccacttagagagccaggatcctcgctacgccaatcggacctcacttttctacaacgaaattcaaaatggcaacgccagtctatttttccggcgcgtatctctcctggatgagggtatctatacctgttatgttggcactgctatccaggtaattaccaacaaagtggtgcttaaagtgggcgtgtttctgaccccagttatgaagtatgagaaacggaataccaactcctttcttatctgctcagtgctcagtgtataccctcgcccaatcattacctggaaaatggataacactccaatctccgagaataatatggaagagactggcagcctagatagcttctctataaatagccccctcaacataacgggaagcaacagctcctacgagtgtactatcgagaactccctactcaagcagacctggacgggtcggtggactatgaaagacggactgcacaagatgcagtcggaacatgtgagcctttcttgccagccagtgaacgattacttttccccaaatcaggattttaaagtgacttggtcacgtatgaagagcggcaccttctcagtactggcctattatttgtccagcagtcagaacacaatcatcaacgaaagccgcttcagctggaacaaagagctgatcaatcagtctgacttcagcatgaatctgatggacttgaatctatcagatagcggggaatatctttgcaatatatcatctgacgaatatactctgctgacgattcacacagtccatgtcgagccatcccaagaaacggcatcacacaataaaggactctggattttggtcccctccgccattctggctgctttcctgttgatctggtcagtgaaatgttgccgcgcgcagctggaagcaaggcgcagccgccaccctgccgacggcgcgcagcaggaacggtgttgtgtgccacccggcgagaggtgtccatccgcccccgacaacggagaggaaaacgtgccgctcagtgggaaggtgtag

SEQ ID NO: 170194 - DNA, 1245 bp, Artificial Sequence
  derived and/or modified sequence
atgaaggcccagaccgccctgagcttcttcctgatcctgatcaccagcctcagcggaagtcagggaatcttcccactggccttcttcatctatgtgccaatgaatgagcagattgtcattgggcgtctggatgaggacatcatcctgccttctagcttcgagcgcggctctgaagtggttatccattggaaataccaggactcttacaaagtgcacagctattataaggggtctgaccatctggagagccaggatcccagatacgcaaatcgtacgtcactgttttataacgaaatccaaaacggaaacgcaagtttgttttttaggcgtgtgtctcttctagacgagggtatatacacctgttacgtgggtaccgctattcaggttatcaccaacaaagtggtgctgaaggtgggcgtattcctaacccccgtcatgaaatatgagaagaggaatacgaatagcttcttgatctgttctgttctgagcgtatacccacgcccaatcatcacatggaaaatggataatactcccatctcagagaataatatggaggaaacgggctctttggactctttctcgatcaactcccctctgaatatcaccggcagcaattcatcatatgagtgcaccatcgagaacagcctattaaaacagacttggacggggcgctggactatgaaggacggtctccacaaaatgcagtccgaacacgtgtctctctcatgccagcccgtgaatgattacttctccccaaaccaggactttaaggtcacttggtcacggatgaagtcaggaacatttagtgttctcgcatattacttaagcagctctcagaatacaatcatcaatgaatctcggttctcctggaacaaagagctgatcaatcagtccgatttttccatgaatttgatggatttgaacctctctgacagtggagaatacttgtgcaacattagcagtgacgagtatacactgcttacaattcacaccgtgcacgttgaaccctcccaagagaccgcctcgcacaacaagggattgtggatcctggttccctcagccatcctggcagccttcttgctgatctggtctgtgaaatgctgccgagcccagctggaggctcgccgttcccgccaccccgctgacggggcacagcaggagcgatgttgtgtgcctcctggcgaaaggtgtccttcggcaccagataatggggaagagaatgtccctcttagcggcaaggtctag

SEQ ID NO: 170195 - DNA, 1245 bp, Artificial Sequence
  derived and/or modified sequence
atgaaagctcagaccgcattaagttttttccttattctgatcaccagccttagcggctcccagggaatcttccctcttgctttcttcatctacgttccaatgaatgaacagatcgtaattgggaggctggatgaggacattatactcccatcctcctttgaacgcggaagcgaggtagtgatccactggaaataccaggactcctacaaggtccattcctattacaaaggtagcgaccaccttgagtcacaggaccccaggtatgccaaccgcaccagcctgttctacaacgaaatacagaatggtaacgccagtctgttctttaggcgggtctccctgctcgatgaaggaatatacacctgttacgttggcacagctatccaggttataacaaataaggtggtcttgaaagtcggagtgttcttgaccccggtaatgaagtatgaaaagcgcaatactaactctttcctcatatgttcagtgctctcagtataccctcgcccaatcatcacctggaagatggataacacccctatctccgagaataacatggaggaaacaggctccctggatagcttctccataaatagccctctgaacattactggctccaattcttcatacgagtgtacaattgagaactctttactgaagcagacatggacaggacggtggaccatgaaagacggtcttcacaagatgcaatccgagcacgtgtccttgtcttgccagccggtgaatgactacttttctcccaatcaggatttcaaggtgacctggtccaggatgaaaagcggcactttctcggtgctggcatattatctcagctccagccagaacacgattatcaatgagagccgatttagctggaataaggaacttattaatcagtccgattttagtatgaacctgatggacctcaatctgagcgactccggcgagtatctgtgcaacatttccagtgacgaatataccctgcttactatccataccgttcatgtggagccttctcaggagactgctagccataataaaggactctggattcttgttccgtctgccatactggccgctttcctcctgatctggtccgtgaagtgctgccgtgcacagttagaggcccgacgttcgcgccacccagccgacggcgctcaacaggagagatgttgcgtgcctccaggggagcgctgcccatcagccccagacaatggtgaggagaatgtccctctttcagggaaagtgtag

SEQ ID NO: 170196 - DNA, 1245 bp, Artificial Sequence
  derived and/or modified sequence
atgaaagctcagacggcccttagcttcttccttattctgataaccagcctgtcaggatcacagggcatcttccccttggccttcttcatatacgtgcctatgaacgaacaaattgttatcggccgactggacgaggacatcatcctgccaagctcatttgaacgcggatctgaagtggtcatccattggaaatatcaagatagctataaggttcactcctattataagggctctgatcacctcgaaagtcaggacccacgctatgctaacaggaccagcctgttctacaatgagattcaaaatgggaacgcttccttgttttttcgaagagtgagcctgcttgacgagggaatctatacgtgttatgtggggacggctattcaggtgatcaccaataaagtggtcctgaaggtcggggtcttcctgactccagttatgaagtacgaaaaaagaaacaccaacagctttcttatttgcagtgtgctgagcgtgtaccctcggccaataatcacatggaagatggataacacccccatttcggaaaataacatggaagaaactggatcactggattcattttctatcaactcccctttgaatattaccggctcaaattctagttacgagtgcaccatagagaactctctcctgaagcagacttggactggccgttggacaatgaaggatggtctgcataaaatgcagtcggagcacgtgagcctctcctgccagccagtgaatgattacttcagtcccaatcaagatttcaaggtaacatggagtcgtatgaagtctggcacgttttcagtgctggcttattacctgagctcctcacagaatactatcataaacgagtcccggttcagctggaacaaagaacttattaatcagagcgatttctcaatgaacctcatggatcttaatttgtccgactccggggagtacctctgcaacatttccagtgatgagtacactctcctcaccatccatactgtacatgtggaaccgtcccaggaaacagccagccacaataaagggttgtggatactcgtgccctcagctattttggccgcttttttgctcatttggtctgtcaagtgctgcagggcccaattagaggctcgtagaagccgacatcctgcggatggggctcagcaggagaggtgttgtgttccacccggagaacggtgcccatctgcccctgacaacggagaggaaaatgtgccactctcaggtaaggtctag

SEQ ID NO: 170197 - DNA, 1245 bp, Artificial Sequence
  derived and/or modified sequence
atgaaggcccagaccgcactctcgtttttcctaatcctcatcaccagtctgtctggctcacaggggatttttcctctggcgtttttcatttatgtccccatgaacgaacaaattgtgatcggcaggctggatgaggatatcatactccccagtagtttcgagcggggaagcgaggtagtcatacactggaaatatcaggattcttacaaagtgcactcttattataagggaagtgaccacctggaatctcaggaccccagatacgctaacagaacgtctcttttctacaacgaaatccagaatggcaacgctagccttttcttccgcagagtgagcctgctggacgaggggatctatacttgttatgtgggaaccgcgattcaggtgatcactaataaagttgtcctgaaggttggagtgtttctgacgcctgtgatgaagtacgagaagcgtaacaccaactcattcctgatctgctccgttctttccgtgtatcctagacccatcattacatggaaaatggataacactcccatctccgagaataacatggaggagactgggtccctggacagttttagtatcaacagcccccttaacattaccggatctaacagctcctacgagtgcacaattgaaaatagtctcctgaagcaaacctggaccggacggtggaccatgaaagacggactgcacaagatgcagagcgaacacgtgtccctgagctgtcagccagtgaatgactacttttctcctaaccaggactttaaggtgacttggagcaggatgaaatcagggactttttccgttttagcctattacttgtcatcttcccagaacaccatcattaacgaatctagatttagttggaacaaagagcttatcaaccagagtgatttctctatgaatctgatggatcttaacctctccgactccggagagtacctctgcaacatcagttcagacgaatataccctgctgacaattcacactgtccacgtcgaaccaagccaggagaccgcttctcataataaggggctctggattcttgttccttctgccatcctggcagcctttttgctcatctggagcgtaaagtgctgcagggcccagctcgaggcaagaaggagcaggcatcccgctgatggggctcagcaggaacggtgctgtgtgccgcctggagagcgctgtccttccgcccctgacaacggcgaggaaaatgttcccctgagcggcaaggtttag

SEQ ID NO: 170198 - protein, 361 aa, Artificial Sequence
  derived and/or modified sequence
MTQQPLRGVTSLRFNQDQSCFCCAMETGVRIYNVEPLMEKGHLDHEQVGSMGLVEMLHRSNLLALVGGGSSPKFSEISAVLIWDDAREGKDSKEKLVLEFTFTKPVLSVRMRHDKIVIVLKNRIYVYSFPDNPRKLFEFDTRDNPKGLCDLCPSLEKQLLVFPGHKCGSLQLVDLASTKPGTSSAPFTINAHQSDIACVSLNQPGTVVASASQKGTLIRLFDTQSKEKLVELRRGTDPATLYCINFSHDSSFLCASSDKGTVHIFALKDTRLNRRSALARVGKVGPMIGQYVDSQWSLASFTVPAESACICAFGRNTSKNVNSVIAICVDGTFHKYVFTPDGNCNREAFDVYLDICDDDDF

SEQ ID NO: 170199 - protein, 55 aa, Artificial Sequence
  derived and/or modified sequence
MTQQPLRGVTSLRFNQDQSCFCCAMETGVRIYNVEPLMEKGHLDHEQVGSMGLVE

SEQ ID NO: 170200 - protein, 292 aa, Artificial Sequence
  derived and/or modified sequence
MTQQPLRGVTSLRFNQDQSCFCCAMETGVRIYNVEPLMEKGHLGLCDLCPSLEKQLLVFPGHKCGSLQLVDLASTKPGTSSAPFTINAHQSDIACVSLNQPGTVVASASQKGTLIRLFDTQSKEKLVELRRGTDPATLYCINFSHDSSFLCASSDKGTVHIFALKDTRLNRRSAYVRPLHTLLSALVVAVALGVLVWAAETRAAVRRCRRSHPAACLAAVLAVGLLVLWVAGGACTFLFSIAGPVLLILVHASLRLRNLKNKIENKIESIGLKRTPMGLLLEALGQEQEAGS

SEQ ID NO: 170201 - DNA, 1086 bp, Artificial Sequence
  derived and/or modified sequence
atgacccagcagcccctgagaggcgtgaccagcctgagattcaaccaggaccagagctgcttctgctgcgccatggagaccggcgtgagaatctacaacgtggagcccctgatggagaagggccacctggaccacgagcaggtgggcagcatgggcctggtggagatgctgcacagaagcaacctgctggccctggtgggcggcggcagcagccccaagttcagcgagatcagcgccgtgctgatctgggacgacgccagagagggcaaggacagcaaggagaagctggtgctggagttcaccttcaccaagcccgtgctgagcgtgagaatgagacacgacaagatcgtgatcgtgctgaagaacagaatctacgtgtacagcttccccgacaaccccagaaagctgttcgagttcgacaccagagacaaccccaagggcctgtgcgacctgtgccccagcctggagaagcagctgctggtgttccccggccacaagtgcggcagcctgcagctggtggacctggccagcaccaagcccggcaccagcagcgcccccttcaccatcaacgcccaccagagcgacatcgcctgcgtgagcctgaaccagcccggcaccgtggtggccagcgccagccagaagggcaccctgatcagactgttcgacacccagagcaaggagaagctggtggagctgagaagaggcaccgaccccgccaccctgtactgcatcaacttcagccacgacagcagcttcctgtgcgccagcagcgacaagggcaccgtgcacatcttcgccctgaaggacaccagactgaacagaagaagcgccctggccagagtgggcaaggtgggccccatgatcggccagtacgtggacagccagtggagcctggccagcttcaccgtgcccgccgagagcgcctgcatctgcgccttcggcagaaacaccagcaagaacgtgaacagcgtgatcgccatctgcgtggacggcaccttccacaagtacgtgttcacccccgacggcaactgcaacagagaggccttcgacgtgtacctggacatctgcgacgacgacgacttctag

SEQ ID NO: 170202 - DNA, 1086 bp, Artificial Sequence
  derived and/or modified sequence
atgacccagcagcccctcaggggtgtgacctcacttagatttaaccaggaccaatcgtgtttttgttgtgcaatggaaaccggagtgcgcatctacaacgtcgagcctcttatggaaaagggacatctggaccatgaacaggtgggctccatgggattggtagagatgctccaccgctcaaatctcctggcgttggtaggtgggggctcgagcccgaaattctctgaaatcagtgcggtcttaatctgggatgacgctcgcgaagggaaggacagcaaggagaagttggtgctcgaatttacttttactaaacccgtactatcagtgcgcatgcggcacgataagatcgttatcgtcctgaagaaccgcatctatgtgtactcatttcctgacaatccaaggaaactcttcgaatttgatacccgcgacaaccctaagggcctttgcgacctgtgtccatcccttgagaagcaactgttggtcttcccagggcataaatgcgggagcctgcaactggtcgatttggcgtccactaagccagggacgagttcggcgccatttactattaacgcacatcagtcagatatcgcttgcgtgtcactgaatcaaccaggaacagtggtggccagcgccagccagaaagggacactaataagattgtttgatacacagtccaaggagaagttagtagaactgcgcagaggaaccgatcctgccaccttgtactgcattaacttttctcacgatagttctttcctgtgcgccagctctgataaggggactgtccacatatttgcactcaaagatacgcgtctgaatcgccgatcggctttggcccgggtgggaaaagtcggtccgatgattggccagtatgtcgattcccagtggagcttggcaagcttcacagtgcctgctgaaagtgcatgtatctgtgctttcggacggaatacatctaagaacgtgaactctgtgatagcaatttgcgtcgacggtacatttcacaagtacgtgtttacacctgacggcaactgtaatcgggaggcttttgatgtctatttggacatctgcgatgatgatgacttctag

SEQ ID NO: 170203 - DNA, 1086 bp, Artificial Sequence
  derived and/or modified sequence
atgactcagcagcccttgcgtggggtgacctcccttaggtttaaccaggaccaaagttgcttctgctgcgccatggaaaccggtgtcagaatctataatgtagagccactgatggagaaaggccacttggatcacgaacaggtaggcagtatgggtctcgtggaaatgctgcatagatctaacctgcttgctctagtaggagggggatcgtctccgaaattctcagaaatatctgcggtactgatctgggatgatgcccgtgagggaaaagactctaaagaaaaactggtgcttgagttcacatttactaaaccagtgctcagcgtccgcatgagacacgataagattgttatcgtgctcaaaaaccgcatttacgtatattccttccccgacaatccgcggaagttgtttgagtttgacacacgggataaccccaagggactgtgcgatctctgcccctctcttgaaaagcagctgttagtgtttccaggccacaagtgtggtagcttacagctcgttgaccttgccagtacaaaaccagggacatccagtgctccgtttacaatcaacgcacaccagagcgacatcgcctgcgtatcccttaaccagccaggaactgtggtcgccagtgcctctcagaaggggacactgatcagactgttcgatacgcagagcaaggagaaactggtcgaacttcgccgcgggacggaccccgcaactctttattgcataaacttctcacacgattcctccttcctttgtgcttcctctgacaagggaacagtccacatctttgccctcaaggataccaggctgaacaggcggtcggcgctagcccgtgtggggaaggtgggacccatgatcggtcaatacgtggacagtcagtggtcactggcgagctttaccgtacccgccgagagcgcatgcatctgtgctttcggcagaaatacctccaaaaacgtgaattccgttatcgccatctgtgtggatgggacatttcacaagtatgtgtttactccagatgggaactgcaaccgggaagcatttgacgtttacttggacatctgtgacgatgatgacttctag

SEQ ID NO: 170204 - DNA, 1086 bp, Artificial Sequence
  derived and/or modified sequence
atgacccagcagcccctgcggggcgtgaccagcctgcgcttcaaccaggaccagagctgcttctgctgtgccatggagactggagtgcgcatctacaacgtggagcccctgatggagaagggccacctggaccacgagcaggtgggctccatgggcctggtggagatgctgcacaggagcaacctgctggccctggtgggcggcggcagcagccccaagttcagcgagatctctgctgtgctgatctgggatgatgcccgggagggcaaggacagcaaggagaagctggtgctggagttcaccttcaccaagcctgtgctgtctgtgaggatgagacatgacaagatcgtcatcgtgctgaagaaccgcatctacgtgtacagcttcccagacaaccccaggaagctgtttgaatttgacacccgggacaaccccaagggcctgtgtgacctgtgccccagcctggagaagcagctgctggtgtttcctggccacaagtgtggcagcctgcagctggtggacctggccagcaccaagccaggcaccagcagcgcccccttcaccatcaatgcccaccagagcgacatcgcctgtgtgtccctgaaccagcccggcaccgtggtggccagcgccagccagaagggcaccctcatccggctgtttgacacccagagcaaggagaagctggtggagctgcggcggggcacagatcctgccaccctgtactgcatcaacttcagccatgacagcagcttcctgtgtgccagcagtgacaagggcaccgtgcacatctttgccctgaaggacacccggctgaacagaagaagtgccctggcccgggtgggcaaggtgggccccatgattggccagtatgtggacagccagtggagcctggccagcttcaccgtgcctgctgagagcgcctgcatctgtgcctttggaagaaacaccagcaagaatgtgaacagcgtgattgccatctgtgtggatggcaccttccacaagtatgtgttcaccccagatggcaactgcaaccgggaggcctttgatgtgtacctggacatctgtgatgatgatgacttctag

SEQ ID NO: 170205 - DNA, 1086 bp, Artificial Sequence
  derived and/or modified sequence
atgacccagcagcccctgcggggcgtgaccagcctgcggttcaaccaagatcagtcttgtttctgctgcgctatggagactggtgtccggatttacaacgtggagcctctgatggagaagggtcatctggaccatgagcaggtgggtagcatgggtctggtggagatgcttcatcgatccaacctcctggctctggttggcggcggttcctcgcccaagttcagtgaaatcagtgccgtgttgatctgggacgacgcgcgggaaggtaaagacagcaaagaaaagctcgtccttgaattcacgtttacaaagccggtgctgtcggtgaggatgcggcacgataagattgtcattgtacttaagaaccggatctatgtctactcatttcccgacaacccccggaaattatttgaatttgataccagagacaaccccaaaggactgtgcgacctttgccctagcttagaaaagcaactgctggtgtttccaggccacaagtgcgggtccctacagcttgtagaccttgcctctactaaacccggaacttcctcggctccgttcactattaacgcccaccagtcagatatcgcatgtgtgtcactgaatcagcctgggaccgtcgtcgctagtgcctctcaaaaaggtacactgatccggctgtttgatacccaaagcaaagagaagttggtggagttgaggcgaggtactgacccagcaacgttgtattgtataaacttttcacacgactcttccttcctgtgcgcctccagcgataaaggcacggtacacatcttcgccctgaaagatacaagactcaatcgcaggagcgccctcgcccgtgtcggcaaggtgggcccgatgattggccagtacgtcgattcccagtggtcgcttgcatctttcaccgtgccagccgaatcggcatgcatctgcgcctttggacgaaatactagtaaaaacgtcaattctgttattgctatctgtgtggacgggacctttcacaaatacgtcttcacacccgatggcaattgtaatcgagaggccttcgatgtctatctggatatctgcgatgatgacgatttttag

SEQ ID NO: 170206 - DNA, 1086 bp, Artificial Sequence
  derived and/or modified sequence
atgacccagcagcccctgcggggcgtgaccagcctgcggttcaaccaagatcaatcctgcttttgttgtgccatggagactggggtccgaatctacaacgttgaaccactcatggaaaaagggcacctagaccacgagcaggttggaagtatgggactggtcgaaatgttacaccgtagcaatctgcttgcgctggtgggcgggggctcgtcacctaagttttccgagatttctgcagttcttatatgggacgacgctagagaaggcaaagattctaaagagaaactagtcctggagtttacttttacaaagcccgtgttgagcgtcagaatgcgccacgacaaaatcgtcatcgtgctcaagaaccggatttatgtttacagtttcccagataatccgaggaagcttttcgagtttgatacacgcgacaatcctaagggcctgtgcgacctgtgtcccagcctggaaaaacagttactggtgtttcctggtcacaagtgcgggagtctgcaactggtcgacctcgccagtaccaaaccaggcacatcgagcgcgccttttaccatcaatgcccaccagtcagacattgcttgtgtgtcactgaaccaaccggggaccgtggtggcctctgcatcacagaagggcaccctaatcagactgttcgatacccagtcaaaagaaaagttggtcgagctgcgcaggggcactgaccctgctacgctgtattgtatcaacttctcccacgacagttccttcctgtgtgcttcttctgacaagggaacagttcacatttttgccctgaaggacactcgactcaatcgacgtagtgctttggctcgagtgggaaaggtcggaccaatgatcggacagtatgttgattctcagtggagtcttgccagctttactgtccctgccgaaagcgcctgcatttgcgcttttgggagaaatacgtcaaagaacgtgaatagtgtaatcgcgatctgcgtggacggtacctttcacaaatatgtgttcactccggatggcaactgcaatagagaggcattcgatgtgtaccttgatatctgtgacgacgacgacttctag

SEQ ID NO: 170207 - DNA, 1086 bp, Artificial Sequence
  derived and/or modified sequence
atgacacaacaacctctgagaggggttacttctctgcggttcaaccaggaccagtcttgcttctgctgcgccatggaaaccggagtgaggatctacaacgtcgaaccgctgatggagaaaggacacctggaccatgaacaggtgggctctatgggcctggtagagatgctccacaggtccaatttgctggcactggttggcggaggtagtagccccaaatttagcgagattagtgcagtgctgatctgggacgatgcacgtgagggcaaggattctaaagagaaactggtgctggaattcactttcacaaagcccgtactgtctgttagaatgaggcatgacaaaattgtgatcgtgctgaaaaaccgcatatacgtgtacagcttccccgataatccaaggaaactgttcgagttcgatacacgggacaaccccaaagggctctgtgatctatgtccttcgctggaaaagcaactgcttgtcttcccagggcataagtgtgggtctctccagcttgtcgacctcgccagtaccaaacctggtacaagcagcgctccttttactatcaatgctcaccagagcgatatagcttgtgtctcccttaaccagccgggaaccgttgtagcctctgcttcccagaaaggaacattaatcaggctatttgacacgcagtccaaggaaaagttagttgaactgagaagaggcaccgaccctgcaaccctgtactgtatcaatttttctcacgactcttcctttctgtgtgccagctccgataagggcactgtgcacatttttgccttgaaagacacccgcctcaaccggaggtccgcactggccagggtgggaaaagtgggccctatgattggtcagtacgttgattcccagtggagtctggcctcctttactgtgccggctgagtccgcctgtatttgcgcatttggcaggaatacctcaaaaaatgtgaactctgttatcgcgatctgcgtggacggaacattccacaaatacgttttcactcccgacgggaactgtaaccgagaagcgtttgacgtgtatttggatatctgcgacgatgacgatttttag

SEQ ID NO: 170208 - DNA, 1086 bp, Artificial Sequence
  derived and/or modified sequence
atgacacaacaacccctccggggagtgacgtccctccgcttcaatcaggatcagagctgcttttgctgcgccatggagactggtgttcggatctacaacgtggaacctctgatggagaaaggccatctggaccatgaacaggtgggatccatgggacttgtcgagatgttacatagatctaatttactggcactggtgggcggtggcagcagtccaaaattctcagagataagcgctgtcctcatttgggacgatgcccgtgagggaaaagacagcaaggagaaactcgtcctcgagttcaccttcactaaaccagtactaagtgtgaggatgcgccatgataaaattgtaatagtgttgaagaaccgcatttacgtatattcattcccagataatcccaggaagctgtttgaatttgacacaagggacaatcctaagggattgtgcgacctctgcccctctctggagaaacagctgttggttttcccaggtcacaaatgcggatcccttcaactggtcgaccttgcaagtactaagcccggtacgagttcagccccatttaccataaacgcacaccaaagcgacattgcctgtgtgtccctgaatcagccgggtacagtggttgcttcagcaagccaaaagggtacattaatccggcttttcgatacacaatcgaaagaaaaactggtggaactacgcagaggcacagacccagctacgttatattgtatcaatttttcccacgattcttcgtttctctgcgcgtctagcgacaagggcaccgttcatatcttcgccctgaaggatacaagattaaaccggcgaagcgcactggccagggtaggcaaagtcggtcccatgattgggcagtatgtggattcccagtggtcgttggccagtttcaccgtgccagctgagtctgcttgtatctgtgctttcgggaggaatactagcaagaatgtcaatagcgtcatcgcaatttgcgtggacgggacctttcacaaatatgttttcacacccgacggtaattgcaaccgggaagcatttgatgtctacttggacatttgtgacgacgacgatttctag

SEQ ID NO: 170209 - DNA, 1688 bp, Artificial Sequence
  derived and/or modified sequence
ggctcccacaccactgcctcgtgtggggttgttcgcccgtgaaggggcaggacagggtgcgcgctggtggaggttgaaattgttacattttggccgggcgcggtggctcacgcctgtaatcccagcactttgggaggccgaggcaggtggatcacgaggtcaggagatcgagaccatcctggctaacacagtgaaaccccgtctctactaaaaaaatacaaaaaatcagccgggcgtggtgacgggcgcctgtagtcccagctactcaggaggctgaggcaggaggatggcgtgaacccgggaggcggagcttgcagtgagccgagatcgcgccagtgcactccagcctgggcgacagagcgaaactacgtctcaaaaaaaaaaaaaaagaaagaaaagaaattgttacattttatatatataggaacaatcctgcaccatgactcaacagccacttcgaggagtgaccagcctgcgtttcaaccaagaccaaagctgcttttgctgcgccatggagacaggtgtgcgcatctacaacgtggagcccttgatggagaaggggcatctggaccacgagcaggtgggcagcatgggcttggtggagatgctgcaccgctccaaccttctggccttggtgggcggtggtagtagtcccaagttctcagagatctcagcagtgctgatctgggacgatgcccgggagggcaaggactccaaggagaagctggtgctggagttcaccttcaccaagccagtgctttctgtgcgcatgcgccatgacaagatcgtgatcgtgctgaagaaccgcatctatgtgtactccttccccgacaatccccgaaagctgtttgagtttgatacccgggacaaccccaaggggctctgtgacctctgccccagcctggagaagcaactgctagtgttcccgggacacaagtgtgggagtctgcaacttgtggacctggcgagcacaaagcctggcacctcgtctgctccattcacgatcaatgcacatcagagtgacatagcctgtgtgtctctaaaccagccaggcactgtagtggcctcagcctcccagaagggtacccttattcgcctctttgacacacaatccaaggagaaactggtggagctgcgccgaggcactgaccctgccaccctctactgcattaacttcagccacgactcctccttcctctgcgcttccagtgataagggtactgtccatatctttgctctcaaggatacccgcctcaaccgccgctccgcgctggctcgcgtgggcaaggtggggcctatgattgggcagtacgtggactctcagtggagcctggcgagcttcactgtgcctgctgagtcagcttgcatctgcgccttcggtcgcaatacttccaagaacgtcaactctgtcattgccatctgcgtagatgggaccttccacaaatatgtcttcactcctgatggaaactgcaacagagaggctttcgacgtgtaccttgacatctgtgatgatgatgacttttaaggaccctgggggctgtgctagggacctgcagtggcagaactgcagagctgagccttggcagtggggcgtgcttggaagccaccagccagcaagcattaatggggctggtgcccactttccactcagcagagctatgtctaaataaagagctcacttcccccca

SEQ ID NO: 170210 - DNA, 1341 bp, Artificial Sequence
  derived and/or modified sequence
gtaaacacccgagccgggctccaaggcccgggaggtcagaaaaccgggccgcgggcggcaccgacagctggggcccgggtcagggacacgcggaggtcaggccggtgaaggcggcaggaagctggagcacgatcccaggaggaacaatcctgcaccatgactcaacagccacttcgaggagtgaccagcctgcgtttcaaccaagaccaaagctgcttttgctgcgccatggagacaggtgtgcgcatctacaacgtggagcccttgatggagaaggggcatctggaccacgagcaggtgggcagcatgggcttggtggagatgctgcaccgctccaaccttctggccttggtgggcggtggtagtagtcccaagttctcagagatctcagcagtgctgatctgggacgatgcccgggagggcaaggactccaaggagaagctggtgctggagttcaccttcaccaagccagtgctttctgtgcgcatgcgccatgacaagatcgtgatcgtgctgaagaaccgcatctatgtgtactccttccccgacaatccccgaaagctgtttgagtttgatacccgggacaaccccaaggggctctgtgacctctgccccagcctggagaagcaactgctagtgttcccgggacacaagtgtgggagtctgcaacttgtggacctggcgagcacaaagcctggcacctcgtctgctccattcacgatcaatgcacatcagagtgacatagcctgtgtgtctctaaaccagccaggcactgtagtggcctcagcctcccagaagggtacccttattcgcctctttgacacacaatccaaggagaaactggtggagctgcgccgaggcactgaccctgccaccctctactgcattaacttcagccacgactcctccttcctctgcgcttccagtgataagggtactgtccatatctttgctctcaaggatacccgcctcaaccgccgctccgcgctggctcgcgtgggcaaggtggggcctatgattgggcagtacgtggactctcagtggagcctggcgagcttcactgtgcctgctgagtcagcttgcatctgcgccttcggtcgcaatacttccaagaacgtcaactctgtcattgccatctgcgtagatgggaccttccacaaatatgtcttcactcctgatggaaactgcaacagagaggctttcgacgtgtaccttgacatctgtgatgatgatgacttttaaggaccctgggggctgtgctagggacctgcagtggcagaactgcagagctgagccttggcagtggggcgtgcttggaagccaccagccagcaagcattaa

SEQ ID NO: 170211 - DNA, 1086 bp, Artificial Sequence
  derived and/or modified sequence
atgacccagcagccccttaggggagtcacgtcgcttcggtttaaccaggatcagtcgtgtttctgttgcgcaatggagactggggtcaggatttataacgtcgagccgctgatggagaaaggacacctagatcacgagcaggtcggatccatgggcctagtcgagatgctgcataggagcaacctactggcattagtaggcggtggttccagtcctaaattttctgagatctccgcagtgctgatttgggatgatgcgagagagggaaaagatagcaaagaaaagcttgtcttagaattcacctttaccaagcctgtgctgtccgtgcgaatgcggcacgacaagatagtcatcgtgttgaagaatcgcatatacgtctacagtttcccagataatcctcgtaaactgtttgaattcgacactagagataatccaaaaggcctgtgtgacttatgcccctctctcgagaagcagctgctggtctttcccgggcacaaatgcgggagcctgcagcttgtcgatcttgccagcactaagccaggtacctcttcagcccctttcaccatcaatgcgcatcagagcgacatcgcctgcgtcagtctgaatcagcccggaaccgtagttgccagcgcctctcaaaagggcaccctgattcgtctttttgatactcagtcaaaggagaaattagtggagttgcgtcgaggaacagacccagccactttgtattgcatcaatttttcgcacgatagtagcttcttgtgcgccagctcagataaaggcacagtgcatatcttcgcgctcaaggatactcgacttaacagaaggtccgccttggcacgggttgggaaggtggggcctatgatcgggcagtacgtggactcacagtggtctctggccagctttactgtccctgctgagagcgcttgtatttgtgcattcgggcggaacacatctaagaacgtcaactccgttatcgccatttgcgttgatggcaccttccataagtacgtgtttacccccgacgggaattgcaatcgagaggctttcgatgtttatctcgatatctgcgatgacgacgatttctag

SEQ ID NO: 170212 - DNA, 1086 bp, Artificial Sequence
  derived and/or modified sequence
atgacccagcagcccctgcggggcgtgaccagcctgcggttcaaccaagaccagagctgcttttgctgtgccatggagaccggcgtgcgaatatataacgtcgaacccttgatggagaaaggacatttggatcatgaacaggtggggtcgatgggattagtcgagatgctgcaccgttccaatctattggccttggttggcgggggatcttcgcccaaatttagtgagatctccgccgttctgatctgggatgatgcacgggaaggaaaggactctaaagagaaattggtcctggagttcacatttactaaacctgtcctctccgtgcggatgcgccacgataagatcgtgattgtgctaaagaaccgcatctatgtttatagcttccctgacaaccctaggaagctcttcgaattcgacacccgcgataatccaaaaggactctgcgatctttgccctagcctggaaaaacagctgttggtctttccagggcacaaatgtggaagtcttcaacttgtggatcttgccagtacgaaacccggtacctcgagcgcaccgttcacaattaacgcccatcagagcgacatagcgtgtgtaagcctaaaccagccaggcactgtggtggctagcgcctctcagaaagggaccttaatcaggttattcgacacacagtccaaagagaaacttgttgaactccgacgcggcacggatccagcaaccttatattgcatcaatttttcccacgacagctcttttctttgtgcctcttcagacaagggcacggtccatatttttgctttaaaagacacccgtttgaaccgtcggagcgctctcgcgagggttggcaaggtaggccctatgattggccagtatgtggattcacaatggagtctcgcctcattcactgttccagccgagtctgcctgtatatgtgctttcggaagaaacacgtctaagaatgtcaatagtgtgatagcaatttgtgtcgacgggaccttccacaagtacgtcttcacgcctgatggaaattgcaacagagaggcctttgacgtgtacctcgacatttgtgacgatgacgatttttag

SEQ ID NO: 170213 - DNA, 1086 bp, Artificial Sequence
  derived and/or modified sequence
atgacccagcagcctctcaggggcgtaaccagcctgaggttcaaccaggatcaatcttgtttctgctgcgccatggagacgggcgtacgcatatacaatgtcgagcctctgatggagaaaggacaccttgaccatgaacaggtgggatctatgggcttggtggagatgctgcaccgtagtaaccttttggccttggttggtggcggatcgtctccaaagttctcggagatctcagccgtgctaatctgggacgacgcccgtgagggaaaggatagtaaggaaaagctggtactggagttcacttttaccaaacccgtattatccgtccgaatgcggcacgataagattgtgatagtgttgaagaatcgcatttacgtttacagttttcccgacaatccacgcaagctattcgagtttgacacacgcgataacccgaagggactgtgcgatctgtgcccatcattggagaaacagctgttggtgtttccgggtcacaaatgtggtagcctgcagttggtggatttagccagcacaaaaccgggtaccagtagcgccccattcaccataaatgctcaccagtctgatattgcctgtgtcagcctgaatcagccaggaaccgtagttgcctctgccagtcagaaaggcacactgattcgccttttcgacacacagagcaaagagaaactggtcgaattgcggagagggaccgaccctgccaccctttactgtataaacttttctcatgatagttcattcctgtgcgcatcttctgacaagggcaccgtacatattttcgccctcaaagacaccagactgaaccgaagatcagctctcgccagagtgggaaaagtggggcctatgataggtcagtacgtggattcgcaatggtcactggcgagcttcacagtccctgcagagtccgcctgcatatgtgcctttggcagaaacacctccaagaatgtaaacagcgtcatcgcaatctgcgtcgacggcaccttccataagtacgtgtttacacctgatggaaactgtaatagggaggccttcgatgtatatctcgatatctgcgatgatgatgacttttag

SEQ ID NO: 170214 - protein, 159 aa, Artificial Sequence
  derived and/or modified sequence
MIKFFLMVNKQGQTRLSKYYEHVDINKRTLLETEVIKSCLSRSNEQCSFIEYKDFKLIYRQYAALFIVVGVNDTENEMAIYEFIHNFVEVLDEYFSRVSELDVSFFNTVFHSTWQMHSGPYQEPIDELPKICSALEPQQTCFSPDSSSFKGAASTTPIY

SEQ ID NO: 170215 - protein, 98 aa, Artificial Sequence
  derived and/or modified sequence
MIKFFLMVNKQGQTRLSKYYEHVDINKRTLLETEVIKSCLSRSNEQCSFIEYKDFKLIYRQYAALFIVVGVNDTENEMAIYEFIHNFVEVLDEYFSRV

SEQ ID NO: 170216 - DNA, 2256 bp, Artificial Sequence
  derived and/or modified sequence
taaaagccaaaatggctgccccgaggaggcccgcaccgcgtagccagtgaaggttggggagcaagcttatgcgggaaagagggagggggactccaggaaaagccgttgagaggaccatcacaacctgagcagcacaggttccagttacagccatcccttgtcataacttttgaactgtatttggaaaaatactggccaggaaagaaaaatgataaaatttttcctcatggtgaataaacaagggcagactcgactttctaagtactatgaacatgtggatattaataagcgtacacttctggaaacagaagtcataaagagctgtctctctcgatccaatgaacaatgctctttcattgaatataaggattttaagctgatatatcggcagtatgcagctctcttcattgtggttggagttaatgacactgagaacgagatggctatttatgaattcattcataactttgtggaagttttagatgagtatttcagccgagtgagtgaattagatgtatcctttttcaatactgttttccacagtacttggcaaatgcactctggtccttatcaggaaccaattgatgaacttcccaaaatatgctcagccctggagccccagcagacttgcttttctccagacagttcatcattcaaaggagctgcctccaccacccccatctactgaatagccaggggagggcaccaatgaacagcacagtatgggagacacaccaactactcttcaaatcagtgcgtacctgctctacgcgtgaaggtacagaaaacctccacggccttttcagtatttggtgcctttaaagaggcctaaggacttagtttatttgggctagactggaatgcagcagtactgccttcaggcctggacagccaggggctcctcgggccctgtgctctagaaggcccattctatgtctgcttcgccagcaccctttccccatcatggggcagatgcccaccagccctcactatctactgcttgaccatcctctgacttcctgggcccctagaatttataaggtccctagatatcccagaacctgccaccatggcctctgcaagcctctcctccaccttcaccccaagactaggggcaggaatgataagaaggctgggtggtagctgggatgtcccacctacgtgcctggggagagaagcaagagcaggctggagtctctactttgtattcttgtgaggcacaaatataggctagaatccaggccccacaaatataggctagaatccggaatgttttcttgatttaaagacatctttagaccgggcacagtggctcacgccagtaatcccagcactttggagggctgaagcaggaggattgcttgaggccaggagtttgagaccagcctgggcaacatagggagacccagtctctacaaaaaaatttaaaaagccaggcattggtggtgtgtgcctatagtcccaactactagggaggctgaggtgggaggatcacttgagcctgggggactgaggctgcagtgagccatgattgtgctactgcactccaatctggcaacagagcgagaccttgtctttaaaaataaaaataaaaacatctttacaacattcctgtttgtattttataaactcaaaatctcaaagactgagcagttgattctagagccctaaagctctggtgggttgtgtgaaaaaaccctgattcatgtcccttctattgcagttgagggtgggacataggaagggcatcaatgctgtgtgcactctctgtgactccgccagcatctgccatggtgcttcctggagaatgatggtgtgcaggcaacagtgatcagcaccaccatggtttgcagacaggcctcgatcaggcccactgtgggcatctacctctagttccatcagcttcctaaaatctgaaatacttttagagatccggaaaccagaatagggtttctccaagtgggagataatgtcagcctgatttaatgagaaattgcaaaaatacttgttcaaactgaggctataggaataccagccagaagaacaaacaaattcttcagggaagcatccagcactgaagtggcagcttctaaatgaactgaaattttctgcatgttctctcagaaagttacagtgttaattaattaataaaatcattacaaaagaatttcttccgaggtatgatggagcatgtgatgacttcaggaatggcttgatttgtttgtttgtttgtttgtttgttttttgagacagtct

SEQ ID NO: 170217 - DNA, 480 bp, Artificial Sequence
  derived and/or modified sequence
atgattaaatttttcttaatggtgaataaacagggccagactcgtctcagcaagtactatgagcatgtggatattaataaaaggactctgctggaaactgaagtgatcaaaagctgcctcagtcgctccaatgaacagtgtagtttcatcgagtataaggattttaagctcatttatcgtcagtacgccgctctgtttattgtagtcggcgtgaatgatacagaaaatgaaatggccatctacgaattcatccacaactttgtagaggtgctggacgaatacttcagcagggtgagtgaactggacgtctctttcttcaataccgtgttccactccacctggcagatgcattcaggaccgtatcaggagcctatagacgaactcccaaaaatctgctctgctctcgagccacagcaaacatgtttctcacctgacagttcctcttttaaaggtgcagcatctacaacccccatctattag

SEQ ID NO: 170218 - DNA, 480 bp, Artificial Sequence
  derived and/or modified sequence
atgatcaagttcttcctgatggtgaacaagcagggccagacccggctgagcaagtactatgagcacgtggacatcaacaagaggaccctgctggagacagaggtgatcaagagctgcctgagccgcagcaatgagcagtgcagcttcatcgagtacaaggacttcaagctgatctaccggcagtatgctgccctcttcatcgtggtgggcgtgaatgacacagaaaatgagatggccatctatgagttcatccacaactttgtggaggtgctggatgagtacttcagccgggtgtctgagctggatgtgtccttcttcaacacagtgttccacagcacctggcagatgcacagcggcccctaccaggagcccattgatgagctgcccaagatctgcagcgccctggagccccagcagacctgcttctccccagacagcagcagcttcaagggggccgccagcaccacccccatctactag

SEQ ID NO: 170219 - DNA, 480 bp, Artificial Sequence
  derived and/or modified sequence
atgatcaagttcttcctgatggtgaacaagcagggccagacccggctttctaagtactacgaacacgtagacatcaacaagagaaccctgctggagaccgaggtgattaaatcctgcttatctcgatccaacgaacagtgctcctttatcgagtataaggatttcaaactgatctaccggcagtatgctgccctcttcattgttgtgggtgtaaacgacactgagaatgaaatggccatttacgagttcattcataactttgtggaagtgctggatgagtatttttccagagtgtccgagctggacgtgtccttttttaacactgtattccattctacctggcagatgcattctggaccctaccaggagcccattgatgaactccccaaaatctgttcggccttggagccacagcagacctgtttctcccctgactccagcagcttcaagggggctgccagcaccacaccaatttattag

SEQ ID NO: 170220 - DNA, 480 bp, Artificial Sequence
  derived and/or modified sequence
atgattaagttctttttgatggtgaacaaacagggccagactcgtctgtccaagtattatgaacacgtggatattaacaagcgtacattgctcgagaccgaggtcattaagagctgcctcagccgtagcaatgaacaatgctccttcatcgaatataaggacttcaaacttatttataggcagtatgccgctcttttcattgtcgttggggtgaacgataccgaaaacgagatggcgatttacgagtttattcataatttcgtggaggtcctggatgaatattttagtagagtgagcgaattggatgtgtccttctttaacactgtgtttcacagcacttggcagatgcactccggcccttatcaggaacccatagacgaattgccgaagatctgcagtgcactggaacctcagcagacttgcttttcgcccgatagcagctccttcaagggcgcagcctcaacgaccccaatatattag

SEQ ID NO: 170221 - DNA, 480 bp, Artificial Sequence
  derived and/or modified sequence
atgatcaagttcttcctgatggtgaacaagcagggccagaccagactgagcaagtactacgagcacgtggacatcaacaagagaaccctgctggagaccgaggtgatcaagagctgcctgagcagaagcaacgagcagtgcagcttcatcgagtacaaggacttcaagctgatctacagacagtacgccgccctgttcatcgtggtgggcgtgaacgacaccgagaacgagatggccatctacgagttcatccacaacttcgtggaggtgctggacgagtacttcagcagagtgagcgagctggacgtgagcttcttcaacaccgtgttccacagcacctggcagatgcacagcggcccctaccaggagcccatcgacgagctgcccaagatctgcagcgccctggagccccagcagacctgcttcagccccgacagcagcagcttcaagggcgccgccagcaccacccccatctactag

SEQ ID NO: 170222 - protein, 727 aa, Artificial Sequence
  derived and/or modified sequence
MSYSVTLTGPGPWGFRLQGGKDFNMPLTISRITPGSKAAQSQLSQGDLVVAIDGVNTDTMTHLEAQNKIKSASYNLSLTLQKSKRPIPISTTAPPVQTPLPVIPHQKDPALDTNGSLVAPSPSPEARASPGTPGTPELRPTFSPAFSRPSAFSSLAEASDPGPPRASLRAKTSPEGARDLLGPKALPGSSQPRQYNNPIGLYSAETLREMAQMYQMSLRGKASGVGLPGGSLPIKDLAVDSASPVYQAVIKSQNKPEDEADEWARRSSNLQSRSFRILAQMTGTEFMQDPDEEALRRSSTPIEHAPVCTSQATTPLLPASAQPPAAASPSAASPPLATAAAHTAIASASTTAPASSPADSPRPQASSYSPAVAASSAPATHTSYSEGPAAPAPKPRVVTTASIRPSVYQPVPASTYSPSPGANYSPTPYTPSPAPAYTPSPAPAYTPSPVPTYTPSPAPAYTPSPAPNYNPAPSVAYSGGPAEPASRPPWVTDDSFSQKFAPGKSTTSISKQTLPRGGPAYTPAGPQVPPLARGTVQRAERFPASSRTPLCGHCNNVIRGPFLVAMGRSWHPEEFTCAYCKTSLADVCFVEEQNNVYCERCYEQFFAPLCAKCNTKIMGEVMHALRQTWHTTCFVCAACKKPFGNSLFHMEDGEPYCEKDYINLFSTKCHGCDFPVEAGDKFIEALGHTWHDTCFICAVCHVNLEGQPFYSKKDRPLCKKHAHTINL

SEQ ID NO: 170223 - protein, 80 aa, Artificial Sequence
  derived and/or modified sequence
MSLRKQTPSDFLKQIIGRPVVVKLNSGVDYRGVLACLDGYMNIALEQTEEYVNGQLKNKYGDAFIRGNNVLYISTQKRRM

SEQ ID NO: 170224 - DNA, 243 bp, Artificial Sequence
  derived and/or modified sequence
atgagcctcaggaaacagacgccctctgattttcttaagcagatcatcggccggccagtcgttgtaaagctgaatagcggggtagactacaggggggtgctggcatgcctcgacggatatatgaacattgccctggaacagaccgaggagtacgttaacggtcagctgaagaataaatatggcgacgcctttattagaggtaataacgtcttgtacatctcaactcagaagcgccgcatgtag

SEQ ID NO: 170225 - DNA, 243 bp, Artificial Sequence
  derived and/or modified sequence
atgagcctgcggaaacagactccgtccgactttcttaagcagataataggaagacctgtagtggttaaactgaactcaggagttgactataggggtgtgctcgcatgcctggatgggtacatgaacatagctctggagcaaacggaggagtacgtgaatggtcagctgaagaacaaatacggggatgccttcatcagggggaacaatgtcctctacattagcacgcagaagagacggatgtag

SEQ ID NO: 170226 - DNA, 243 bp, Artificial Sequence
  derived and/or modified sequence
atgtcgctgcgcaaacagactccttccgatttcctaaagcagatcattggccgacctgtggttgtcaaactcaactccggggtcgactatcgcggggttctcgcatgcctggacggatacatgaatattgcccttgaacagacagaggagtacgtcaacggtcagctcaagaataaatacggcgacgccttcatccgcggaaataacgttttgtacatcagcactcagaagaggcgtatgtag

SEQ ID NO: 170227 - DNA, 243 bp, Artificial Sequence
  derived and/or modified sequence
atgtctttgcgaaagcagacaccaagcgacttcctgaaacagatcattggtagaccggtggtggtgaaactgaactcaggagtcgattaccggggagtcctggcttgtctagatgggtatatgaacatagcactcgagcagactgaagagtacgtgaacggccagctgaagaacaagtatggggacgccttcatcaggggcaataatgtactctatattagtacacaaaagcggaggatgtag

SEQ ID NO: 170228 - DNA, 243 bp, Artificial Sequence
  derived and/or modified sequence
atgagcctgaggaagcagacccccagcgacttcctgaagcagatcatcggccggcctgtggtggtgaagctgaacagcggcgtggactaccggggcgtgctggcctgcctggatggctacatgaacatcgccctggagcagacagaggagtatgtgaatggccagctgaagaacaagtatggagatgccttcatccggggcaacaacgtgctgtacatcagcacccagaagaggaggatgtag

SEQ ID NO: 170229 - DNA, 768 bp, Artificial Sequence
  derived and/or modified sequence
gaagagcactgattggctgaggcagaaaagtgcccctgcctcggcgctttcggttttggctgggatcatccgcggcggccgggctcgtggggcgcctggagtgagggttctggttcccgccggcgaggattgttaaaatgagtcttcggaagcaaacccctagtgacttcttaaagcaaatcatcggacgaccagttgtggtaaaattaaattctggagtggattatcgaggggtcctggcttgcctggatggctacatgaatatagccctggagcagacagaagaatatgtaaatggacaactgaagaataagtatggggatgcatttatccgaggaaacaatgtgttgtacatcagtacacagaagagacggatgtgaagacaccaagagagcaacgcttttcatagttggatatatttttttatgaattttttctaatttttgcttcttttgtgatacaatttgtcctctttttataatagttggtgatttttcactgacatgtgagtaagataaatgtatacaattgtggatttaattgtgaaatgttctttcacttgtaagtttcagtcattttcttttacctcgttgtcagtgtacagaatgctaaaataattaaaaaaagacaaaatatacctcttcctacaagattatttaacttaagtttcgagaagtgtcatttcatttgacttgcttttcttatccagctaaaatgatgcatatattttatatattgtatggacatataattaaaacattttggagg

SEQ ID NO: 170230 - DNA, 1352 bp, Artificial Sequence
  derived and/or modified sequence
cgctttcggttttggctgggatcatccgcggcggccgggctcgtggggcgcctggagtgagggttctggttcccgccggcgaggtgagccgcaccgctgcgcgggccgacgacggggccgggcgcagccccaggttcggtgccccagtgttcagtcgcgctgtggagcggcggctgcagcggccctaggccgggcgaggcagccccggaaagggcctgcggtgaacaggctggggctccgggaagggaccgctgggtggcgggtccccgcgaaatgccgcgtccaagctctccgcgcatggaatggctgggagaggtctgatggtgggcgccgggaccgccctcagcgaggcgcctagactgcgcggagaggagcggcaccgtcccggctcctaccgagttggcgtccgagatcaattcaggttgttgaagttccccagggagccccgacgctaatcccaagattcggcgggaaagcggatcccgaacccaggcctaggcttcgcctgtcttccaggagggcttcagggaattgcgaaccctctcctacatcggggtggctgcgcctgaccacaggaattaaaggctggactcgcctgtcttaccaagttgtcaggtcgaggaacccgattgtatggtcttaagtcctatcgcccaaggttttctgtgcgtatgcgtgtccgcacacctgcatagcaggcatttttaaggattgttaaaatgagtcttcggaagcaaacccctagtgacttcttaaagcaaatcatcggacgaccagttgtggtaaaattaaattctggagtggattatcgaggggtcctggcttgcctggatggctacatgaatatagccctggagcagacagaagaatatgtaaatggacaactgaagaataagtatggggatgcatttatccgaggaaacaatgtgttgtacatcagtacacagaagagacggatgtgaagacaccaagagagcaacgcttttcatagttggatatatttttttatgaattttttctaatttttgcttcttttgtgatacaatttgtcctctttttataatagttggtgatttttcactgacatgtgagtaagataaatgtatacaattgtggatttaattgtgaaatgttctttcacttgtaagtttcagtcattttcttttacctcgttgtcagtgtacagaatgctaaaataattaaaaaaagacaaaatatacctcttcctacaagattatttaacttaagtttcgagaagtgtcatttcatttgacttgcttttcttatccagctaaaatgatgcatatattttatatattgtatggacatataattaaaacattttggaggaa

SEQ ID NO: 170231 - DNA, 549 bp, Artificial Sequence
  derived and/or modified sequence
gatcatccgcggcggccgggctcgtggggcgcctggagtgagggttctggttcccgccggcgaggattgttaaaatgagtcttcggaagcaaacccctagtgacttcttaaagcaaatcatcggacgaccagttgtggtaaaattaaattctggagtggattatcgaggggtcctggcttgcctggatggctacatgaatatagccctggagcagacagaagaatatgtaaatggacaactgaagaataagtatggggatgcatttatccgaggaaacaatgtgttgtacatcagtacacagaagagacggatgtgaagacaccaagagagcaacgcttttcatagttggatatatttttttatgaattttttctaatttttgcttcttttgtgatacaatttgtcctctttttataatagttggtgatttttcactgacataatccttgcgtgaatatgttctacaaaggcatccagtttcagtctgaagctacaaaaaggggccacaggatcagaagttcagccactgattgagtcacctaaataaa

SEQ ID NO: 170232 - DNA, 545 bp, Artificial Sequence
  derived and/or modified sequence
gaggcagaaaagtgcccctgcctcggcgctttcggttttggctgggatcatccgcggcggccgggctcgtggggcgcctggagtgagggttctggttcccgccggcgaggattgttaaaatgagtcttcggaagcaaacccctagtgacttcttaaagcaaatcatcggacgaccagttgtggtaaaattaaattctggagtggattatcgaggggtcctggcttgcctggatggctacatgaatatagccctggagcagacagaagaatatgtaaatggacaactgaagaataagtatggggatgcatttatccgaggaaacaatgtgttgtacatcagtacacagaagagacggatgtgaagacaccaagagagcaacgcttttcatagttggatatatttttttatgaattttttctaatttttgcttcttttgtgatacaatttgtcctctttttataatagttggtgatttttcactgacatagtctcactcccatcgcccagacttgagtgtagtgatgtgatcactgctcactgcagt

SEQ ID NO: 170233 - DNA, 243 bp, Artificial Sequence
  derived and/or modified sequence
atgagcctgcggaagcagacccccagcgacttcctgaagcagatcatcggtcggcccgtggtggttaagctaaattcaggggtagattatcgcggtgtgctcgcatgcctggatggctacatgaatatcgccctggagcagactgaagaatacgtgaatggccaattaaagaataaatatggagacgcgtttatcagaggcaataacgtgttgtacatctccacccagaaaaggagaatgtag

SEQ ID NO: 170234 - DNA, 243 bp, Artificial Sequence
  derived and/or modified sequence
atgagcctgcggaagcagacccccagcgacttcctgaagcagatcattggtagacctgttgtggttaaattaaacagcggagtagattatcgcggagtgttggcatgccttgacggttatatgaatattgcgctcgagcaaacagaggagtatgtgaatggacagcttaagaataagtatggcgatgcattcatccggggcaacaacgtactgtacatctccacacagaaaagacggatgtag

SEQ ID NO: 170235 - DNA, 243 bp, Artificial Sequence
  derived and/or modified sequence
atgagcctgcggaagcagacccccagcgacttcctgaagcagatcattggtcgccccgttgtggtgaagctcaactccggagtggactaccgaggagtgctagcctgcctggatggctacatgaacatagcactggaacagacggaggagtacgtgaatgggcaattaaagaataagtatggtgatgccttcatccgaggcaacaatgtgctctatatctcaacacagaaaagacgaatgtag

SEQ ID NO: 170236 - DNA, 243 bp, Artificial Sequence
  derived and/or modified sequence
atgagcctgcggaagcagacccccagcgacttcctgaagcagatcattggccgccccgtggtggtgaagctgaactccggagtggactaccgcggagtacttgcatgtttggacggctacatgaacatcgcactcgagcaaactgaagagtacgtgaatggccagctgaaaaataagtatggagacgcattcataagaggcaataatgtgctctatatttcaactcagaaacggcggatgtag

SEQ ID NO: 170237 - DNA, 243 bp, Artificial Sequence
  derived and/or modified sequence
atgtcgcttcgaaagcagacccctagtgatttcctcaaacagatcatagggcgtccagttgtcgttaaactgaactcaggcgtggattataggggtgtgctagcatgcctcgacggatacatgaatattgctctggagcagactgaggaatatgtgaacggccagctaaaaaacaaatatggggatgccttcatccgcggaaataacgtgctttatataagcacacaaaaaaggaggatgtag

SEQ ID NO: 170238 - DNA, 243 bp, Artificial Sequence
  derived and/or modified sequence
atgagtctgcggaaacagacgccgtcagacttcttaaaacagattatagggcgacccgtcgtcgtcaaactcaattcaggcgtggattatcgtggcgtcctagcatgtctggacgggtacatgaacattgcactcgagcaaacggaagagtatgttaacggccagctgaagaataaatacggggacgcattcattcggggaaataacgtcctttacatttcaactcaaaaacggagaatgtag

SEQ ID NO: 170239 - DNA, 243 bp, Artificial Sequence
  derived and/or modified sequence
atgtctcttcgaaagcagaccccttctgattttctgaaacagatcataggcaggcctgtcgtggtgaaactgaattccggagtggattatcgcggagtactcgcatgcctggacggatacatgaacattgccctcgagcaaactgaggaatacgtaaatgggcaactgaaaaataaatacggggatgccttcatcagaggcaataacgtcctgtatatctcaacccagaagcgaagaatgtag

SEQ ID NO: 170240 - DNA, 243 bp, Artificial Sequence
  derived and/or modified sequence
atgagcctccggaagcagaccccaagtgattttctcaaacagataatcggacgccctgtggtggtcaaactcaatagcggagtggattacaggggggtgctggcctgtctcgatggctacatgaatatcgcactggagcaaaccgaggagtacgtcaacgggcagctgaagaacaaatacggcgatgcgtttatccggggaaataacgtgctgtatatctctactcaaaaaaggaggatgtag

SEQ ID NO: 170241 - DNA, 243 bp, Artificial Sequence
  derived and/or modified sequence
atgagcctgagaaagcagacccccagcgacttcctgaagcagatcatcggcagacccgtggtggtgaagctgaacagcggcgtggactacagaggcgtgctggcctgcctggacggctacatgaacatcgccctggagcagaccgaggagtacgtgaacggccagctgaagaacaagtacggcgacgccttcatcagaggcaacaacgtgctgtacatcagcacccagaagagaagaatgtag

SEQ ID NO: 170242 - protein, 316 aa, Artificial Sequence
  derived and/or modified sequence
MRQPLSWGRWRAMLARTYGPGPSAGYRWASGAQGYVRNPPVGACDLQGELDRFGGISVRLARLDALDRLDAAAFQKGLQAAVQQWRSEGRTAVWLHIPILQSRFIAPAASLGFCFHHAESDSSTLTLWLREGPSRLPGYASHQVGVAGAVFDESTRKILVVQDRNKLKNMWKFPGGLSEPEEDIGDTAVREVFEETGIKSEFRSVLSIRQQHTNPGAFGKSDMYIICRLKPYSFTINFCQEECLRCEWMDLNDLAKTENTTPITSRVARLLLYGYREGFDKIDLTVEELPAVYTGLFYKLYHKELPENYKTMKGID

SEQ ID NO: 170243 - protein, 147 aa, Artificial Sequence
  derived and/or modified sequence
MWKFPGGLSEPEEDIGDTAVREVFEETGIKSEFRSVLSIRQQHTNPGAFGKSDMYIICRLKPYSFTINFCQEECLRCEWMDLNDLAKTENTTPITSRVARLLLYGYREGFDKIDLTVEELPAVYTGLFYKLYHKELPENYKTMKGID

SEQ ID NO: 170244 - DNA, 1065 bp, Artificial Sequence
  derived and/or modified sequence
agcagtctttgaaacagctgtaacggcatctgtgaaagaagataggttccaggaacggaactgccacttagattgtaaattcctgaaaaacaggacgtttttgcatctcctcccggcttccccatccctaaaccaacgtctgttgaattaaactaccaaacaaaataactgcagtacagcaatggcgatcagaaggtagaacagctgtatggctgcacattcccatcctccaaagccgatttattgcccctgctgcttccctgggcttctgctttcaccacgcagaatcggattcatcaacgttgactctgtggctgagagaagggcccagcagattaccaggatatgcttcacatcaagtaggagttgcaggagctgtatttgatgaaagtactagaaaaatactggttgtacaagatcgaaataaattgaaaaatatgtggaagtttccaggaggcctgtcagagcctgaagaagatattggagacacagcggttcgagaagtttttgaagagactggtataaaatcagaattcaggtccgtcctgagtattcggcaacagcacacaaatcctggagcttttgggaagtcagatatgtatatcatctgccgcctaaagccatattcattcaccataaatttttgccaggaagaatgcttaagatgtgagtggatggatctcaatgacctggcgaagactgaaaatacaactcccatcaccagcagagttgctaggctgctgctgtatgggtacagagaagggtttgacaaaattgacctgactgtggaagaacttccagcagtttacacaggactgttttataaactctatcataaggaactgccagagaattataaaactatgaaaggaattgattaaattcacatttatatgtttagaaacatgtagactaacgaatgacataagaaatagtggacattttggattgattaaacatctgactgtgattttctaatgtatatgatttccatgaagaaattttgtttctaaacatgcacattttaaaagcctcttttcgaataaagcaaatgcgtgaaaaaga

SEQ ID NO: 170245 - DNA, 951 bp, Artificial Sequence
  derived and/or modified sequence
atgagacagccattgagctggggaaggtggagagcaatgctcgcacgtacgtacgggcccggtccatcggctggttaccggtgggcaagcggagctcagggctacgtgagaaatccgccagtcggcgcatgcgatctccagggggagctggaccgtttcgggggtatcagcgtgcgactagcccggctcgatgccttggacagactggatgcggctgcatttcagaaaggcttgcaggcagctgtgcagcaatggcggtccgagggacgaaccgctgtgtggttacacattccgatccttcagagcaggttcattgcacccgccgctagtttaggcttctgctttcatcacgcggaaagtgatagttccacactcaccctgtggttgcgtgagggccctagcagactgcccggctacgcatcacatcaagtgggagtggctggagccgtgttcgatgagtcgaccaggaaaattttagtcgtccaagaccgaaacaagctgaagaacatgtggaagttccccggtggactgtccgagccagaggaagacataggcgatacagcagtcagagaagtgttcgaggagactggaatcaagtcagagtttcgctccgtgctgagtattcgccaacagcatacaaaccctggcgccttcggaaaaagcgacatgtatattatttgtagattgaagccttatagcttcacaattaatttttgtcaagaggaatgcctgcgctgcgagtggatggacctcaatgacttggcgaagaccgaaaataccacccccattactagccgggtggcaaggctgctgctttatggctacagagagggattcgacaagattgacttgaccgttgaagagctgcctgctgtgtatacggggctgttttataagttatatcacaaggaattacctgagaactataagaccatgaagggcatcgactag

SEQ ID NO: 170246 - DNA, 951 bp, Artificial Sequence
  derived and/or modified sequence
atgaggcagcccctgtcctggggccgctggagggccatgctggcccggacctacggccctggccccagcgctggctaccgctgggccagcggggcccagggctacgtgagaaatcctcctgtgggcgcctgtgacctgcagggcgagctggacagatttggaggcatctctgtgcggctggcccggctggatgccctggaccggctggatgctgctgccttccagaagggcctgcaggccgctgtgcagcagtggaggtctgagggccgcacagctgtgtggctgcacatccccatcctgcagagccgcttcatcgccccagctgccagcctgggcttctgcttccaccacgccgagagtgacagcagcaccctgaccctgtggctgcgggagggccccagccggctgcccggctacgccagccaccaggtgggcgtggccggggctgtgtttgatgagagcaccaggaagatcctggtggtgcaggacaggaacaagctgaagaacatgtggaagtttcctgggggcctgtctgagcctgaggaggacatcggggacacagctgtgcgggaggtgtttgaggagaccggcatcaagtctgagttccgctctgtgctgagcatccggcagcagcacaccaaccctggggccttcggcaagagtgacatgtacatcatctgccgcctgaagccctacagcttcaccatcaacttctgccaggaggagtgcctgcgctgtgagtggatggacctgaatgacctggccaagacagagaacaccacccccatcaccagccgggtggcccggctgctgctgtatggctaccgggagggctttgacaagattgacctgactgtggaggagctgcctgctgtgtacacaggcctcttctacaagctgtaccacaaggagctgcctgagaactacaagaccatgaagggcattgattag

SEQ ID NO: 170247 - DNA, 951 bp, Artificial Sequence
  derived and/or modified sequence
atgcggcagcccctgagctggggccggtggcgggccatgctggcccggacttacggtccgggtccgagcgccggatacagatgggcatccggtgcgcagggttatgtgagaaatcctccggtaggtgcctgcgatctgcagggcgaattggatcgattcggcgggatcagcgttcgccttgctagactggatgctctcgaccgtttggacgcagcagcctttcagaagggtctgcaagcagccgtgcagcagtggaggtccgagggccggactgctgtgtggctccatatacccatcttacaatcacgctttatcgcccccgcggcgtccctggggttttgcttccaccatgcagaatcagacagcagtacactgactctctggctgagggagggccctagtaggctgcctggttacgcgagccaccaggttggagtcgctggggcggtgttcgacgaatccacacgcaagatattagtcgtgcaggatagaaataaactgaaaaatatgtggaaattccctggcggtcttagcgaaccagaggaagatatcggggacacagctgtgagagaggtgtttgaggaaactggcatcaagtcagaattccggagcgtgctcagcatacgacagcagcatactaatcccggagccttcggcaaatctgacatgtacatcatctgcagactcaagccgtacagtttcaccatcaatttttgtcaggaagaatgcctccgctgtgagtggatggatctgaatgacctggcaaagacagagaatactaccccaatcaccagcagggtcgcccgcctgctcttgtacggctatagagaaggtttcgacaagattgatctcactgtagaagaactgcctgccgtctacactgggttgttttataagctgtaccacaaggaattgcccgagaattacaaaacgatgaagggaatcgactag

SEQ ID NO: 170248 - DNA, 951 bp, Artificial Sequence
  derived and/or modified sequence
atgcgtcagccactgagctggggtcgttggagggccatgttggccaggacctacggaccagggccaagcgcagggtatagatgggcatctggggcacagggatatgttcggaaccctcccgttggagcttgtgatctccagggggagctcgatagatttggaggtatctccgtgcgactagcacgactcgatgcactcgaccggctagacgcggctgcgttccaaaagggcctccaagccgctgtacagcagtggcggtcagagggtagaaccgcagtctggctccatattccaatcctgcagtcccggtttattgcacccgctgcatcgcttggcttctgtttccaccacgcagagtccgatagtagcaccctgaccctttggctgcgcgaaggcccatctaggctcccgggttacgcttcgcaccaggtaggcgtggcgggagcagtgttcgacgagtcaaccagaaagatcctggttgttcaggaccgcaataaattgaaaaacatgtggaagtttccaggtggattgtccgagcctgaggaggatatcggtgacacggcagtacgggaggtcttcgaggaaacggggataaagagcgaattccgaagtgtgttgtctatccgacagcagcatacgaatcccggtgcctttggtaagtccgacatgtacatcatttgcaggctaaaaccctatagctttactattaatttttgtcaagaggaatgcctgagatgcgaatggatggatttaaatgatcttgccaagactgagaacacaacgcccattaccagtcgtgttgcgaggctcttgttatatggctacagggaggggtttgacaagatcgatctgactgtagaggaactgcccgctgtatacacggggctgttctacaagctgtatcataaagagctgccggaaaactataagacaatgaaaggcattgactag

SEQ ID NO: 170249 - DNA, 678 bp, Artificial Sequence
  derived and/or modified sequence
ggcatcgtctgtaaagaatgagcccttattagacactgaatctgccagcaccttgatcttggacttcctagcttctagaactgagctgtatttgatgaaagtactagaaaaatactggttgtacaagatcgaaataaattgaaaaatatgtggaagtttccaggaggcctgtcagagcctgaagaagatattggagacacagcggttcgagaagtttttgaagagactggtataaaatcagaattcaggtccgtcctgagtattcggcaacagcacacaaatcctggagcttttgggaagtcagatatgtatatcatctgccgcctaaagccatattcattcaccataaatttttgccaggaagaatgcttaagatgtgagtggatggatctcaatgacctggcgaagactgaaaatacaactcccatcaccagcagagttgctaggctgctgctgtatgggtacagagaagggtttgacaaaattgacctgactgtggaagaacttccagcagtttacacaggactgttttataaactctatcataaggaactgccagagaattataaaactatgaaaggaattgattaaattcacatttatatgtttagaaacatgtagactaacgaatgacataagaaatagtggacattttggattgattaaacatctgactgt

SEQ ID NO: 170250 - DNA, 1169 bp, Artificial Sequence
  derived and/or modified sequence
catttgggcaacggacgaattaagcggcgtggagatgcggcagccactgagctggggccgctggcgcgcgatgcttgcccgaacctacggccccgggccttcggcgggttaccgctgggcctcgggcgcacagggttacgtgcggaatccgccagttggagcgtgcgatctgcagggcgagctggacagattcgggggcatctcggtgcgcctggcgcggctcgatgcgctggaccgcctggacgctgccgccttccagaagggcttgcaggctgcagtacagcaatggcgatcagaaggtagaacagctgtatggctgcacattcccatcctccaaagccgatttattgcccctgctgcttccctgggcttctgctttcaccacgcagaatcggattcatcaacgttgactctgtggctgagagaagggcccagcagattaccaggatatgcttcacatcaagtaggagttgcaggagctgtatttgatgaaagtactagaaaaatactggttgtacaagatcgaaataaattgaaaaatatgtggaagtttccaggaggcctgtcagagcctgaagaagatattggagacacagcggttcgagaagtttttgaagagactggtataaaatcagaattcaggtccgtcctgagtattcggcaacagcacacaaatcctggagcttttgggaagtcagatatgtatatcatctgccgcctaaagccatattcattcaccataaatttttgccaggaagaatgcttaagatgtgagtggatggatctcaatgacctggcgaagactgaaaatacaactcccatcaccagcagagttgctaggctgctgctgtatgggtacagagaagggtttgacaaaattgacctgactgtggaagaacttccagcagtttacacaggactgttttataaactctatcataaggaactgccagagaattataaaactatgaaaggaattgattaaattcacatttatatgtttagaaacatgtagactaacgaatgacataagaaatagtggacattttggattgattaaacatctgactgtgattttctaatgtatatgatttccatgaagaaattttgtttctaaacatgcacattttaaaagcctcttttcgaataaagcaaatgcgtgaaaaaga

SEQ ID NO: 170251 - DNA, 951 bp, Artificial Sequence
  derived and/or modified sequence
atgagacagcccctgagctggggcagatggagagccatgctggccagaacctacggccccggccccagcgccggctacagatgggccagcggcgcccagggctacgtgagaaacccccccgtgggcgcctgcgacctgcagggcgagctggacagattcggcggcatcagcgtgagactggccagactggacgccctggacagactggacgccgccgccttccagaagggcctgcaggccgccgtgcagcagtggagaagcgagggcagaaccgccgtgtggctgcacatccccatcctgcagagcagattcatcgcccccgccgccagcctgggcttctgcttccaccacgccgagagcgacagcagcaccctgaccctgtggctgagagagggccccagcagactgcccggctacgccagccaccaggtgggcgtggccggcgccgtgttcgacgagagcaccagaaagatcctggtggtgcaggacagaaacaagctgaagaacatgtggaagttccccggcggcctgagcgagcccgaggaggacatcggcgacaccgccgtgagagaggtgttcgaggagaccggcatcaagagcgagttcagaagcgtgctgagcatcagacagcagcacaccaaccccggcgccttcggcaagagcgacatgtacatcatctgcagactgaagccctacagcttcaccatcaacttctgccaggaggagtgcctgagatgcgagtggatggacctgaacgacctggccaagaccgagaacaccacccccatcaccagcagagtggccagactgctgctgtacggctacagagagggcttcgacaagatcgacctgaccgtggaggagctgcccgccgtgtacaccggcctgttctacaagctgtaccacaaggagctgcccgagaactacaagaccatgaagggcatcgactag

SEQ ID NO: 170252 - protein, 276 aa, Artificial Sequence
  derived and/or modified sequence
MSKPVDHVKRPMNAFMVWSRAQRRKMAQENPKMHNSEISKRLGAEWKLLTESEKRPFIDEAKRLRAMHMKEHPDYKYRPRRKPKTLLKKDKFAFPVPYGLGGVADAEHPALKAGAGLHAGAGGGLVPESLLANPEKAAAAAAAAAARVFFPQSAAAAAAAAAAAAAGSPYSLLDLGSKMAEISSSSSGLPYASSLGYPTAGAGAFHGAAAAAAAAAAAAGGHTHSHPSPGNPGYMIPCNCSAWPSPGLQPPLAYILLPGMGKPQLDPYPAAYAAAL

SEQ ID NO: 170253 - DNA, 2537 bp, Artificial Sequence
  derived and/or modified sequence
ctccgcgggcagccaacattgatttcctccgggccgagggcgagggcccgggcggcggcgggctgcagccgcggcagggcgagagcatgtccaagccggtggaccacgtcaagcggcccatgaacgccttcatggtgtggtcgcgggctcagcggcgcaagatggcccaggagaaccccaagatgcacaactcggagatcagcaagcgcttgggcgccgagtggaaactgctcacagagtcggagaagcggccgttcatcgacgaggccaagcgtctacgcgccatgcacatgaaggagcaccccgactacaagtaccggccgcggcgcaagcccaagacgctgctcaagaaggacaagttcgccttcccggtgccctacggcctgggcggcgtggcggacgccgagcaccctgcgctcaaggcgggcgccgggctgcacgcgggggcgggcggcggcctggtgcctgagtcgctgctcgccaatcccgagaaggcggccgcggccgccgccgctgccgccgcacgcgtcttcttcccgcagtcggccgctgccgccgccgctgccgccgccgccgccgccgcgggcagcccctactcgctgctcgacctgggctccaaaatggcagagatctcgtcgtcctcgtccggcctcccgtacgcgtcgtcgctgggctacccgaccgcgggcgcgggcgccttccacggcgcggcggcggcggctgcagcggcggccgccgccgccggggggcacacgcactcgcaccccagcccgggcaacccgggctacatgatcccgtgcaactgcagcgcgtggcccagccccgggctgcagccgccgctcgcctacatcctgctgccgggcatgggcaagccccagctggacccctaccccgcggcctacgctgccgcgctatgaccccgcggggccgcctcgcgaggaccggtgtgcacacgtgtacatatgtataggtacgagcgctgcggcctccccgtgcgccctcccgcgaccgggggcccggtttgtatgtacatagaatgtataggtgccaggtagaggcagagaggccaggcggggcaggagtggccaagcgcgcaagggcgcgggcgagcaggcctgtgaattcgcaggatcatttcagacccgcacttcggcagccaactcgaaagcaggcggttgtgtgcggcagcagttggcgtttgctttgcacttcggaacctgttgcgttttgacccacggaggtggaggagtaactttttgacatgttggcctttccagttttgttggaagtttcatggtcggttttgtttttgtttctcattcttcttcctcgcccctcagccccccaacccccaaccccctcccggtccgtgttgcatgcacgctgttcaaatgtgaggtctgaaatggctggcacacgggaaaagctgcttgtgtcattcgtttctgggagtgggatggctctgagcagcctcgcctccctgtttgtactatttgaactttgcagatctctgttctctcaagcagaactcccaaccagatccattcttgaccagtgaccggctcgaatctggccttttgtgtgagatgatcacggtttcttttgtttatcacgccatttgcaaatcagagcaagagctctttctcaagggcaagaaacgcaaacaagaaatatttgtgagatgaaagttgtcaattggattttcttcctaaacaaacaacaacaacaaactactagaagtctccctgagtccactcgcttggatttctgacacagtttacaaaaaaggaaaaaggcactgctcctattttcccttatggctgagttcaccttaagattgtaaatgtgtatatgtcagtgaaaacattgaggcttggaaaatgtgttattttcgttgccctaagtttgagtcgactttagactcaaaaacattttgagcgaatatcaaagttaacttttaaaaattgcgaaactatttcagaatcgcaattttatcgaagattaaatcagacttttttgtctggtaattatatatttattatttagcaaaactgaagaaaaaaagcacagaattgtttcaacagatgtctctcattttcagctagcatttctctcccaagttgagctggtttaatgtgttttggatttccctcctcaattggcttattttttagatcacctgcaattcatttgcaaattgcaataaaacacattttagaaaaaaggaaccttcaattattagctttgtttctttttaaatgtatatattttgactaatgtttgtgaatgaagttggctaacatgtatttagtttcattttggctttatgtaatataaagtttttaaaattttaaatatggttttaacctttatgtgtaaatgattttctagtgtgaccttctaatttaatattagacgtctaaggtatatctgtaaattagaatccgactatcactctgttcattttttttgaacaaagagtttaaataaagcctgaaccagggaaaagaaaaaaaaaaaaaaaaaaaaaaaaaaaa

SEQ ID NO: 170254 - DNA, 831 bp, Artificial Sequence
  derived and/or modified sequence
atgagcaagcccgtggaccacgtgaagagacccatgaacgccttcatggtgtggagcagagcccagagaagaaagatggcccaggagaaccccaagatgcacaacagcgagatcagcaagagactgggcgccgagtggaagctgctgaccgagagcgagaagagacccttcatcgacgaggccaagagactgagagccatgcacatgaaggagcaccccgactacaagtacagacccagaagaaagcccaagaccctgctgaagaaggacaagttcgccttccccgtgccctacggcctgggcggcgtggccgacgccgagcaccccgccctgaaggccggcgccggcctgcacgccggcgccggcggcggcctggtgcccgagagcctgctggccaaccccgagaaggccgccgccgccgccgccgccgccgccgccagagtgttcttcccccagagcgccgccgccgccgccgccgccgccgccgccgccgccgccggcagcccctacagcctgctggacctgggcagcaagatggccgagatcagcagcagcagcagcggcctgccctacgccagcagcctgggctaccccaccgccggcgccggcgccttccacggcgccgccgccgccgccgccgccgccgccgccgccgccggcggccacacccacagccaccccagccccggcaaccccggctacatgatcccctgcaactgcagcgcctggcccagccccggcctgcagccccccctggcctacatcctgctgcccggcatgggcaagccccagctggacccctaccccgccgcctacgccgccgccctgtag

SEQ ID NO: 170255 - DNA, 831 bp, Artificial Sequence
  derived and/or modified sequence
atgtctaaacccgtagaccacgtaaaacgcccaatgaatgcatttatggtgtggagcagggcccagcgacgaaaaatggctcaggaaaatcccaagatgcacaattccgagatttcgaaaagactcggcgcagaatggaagttgcttaccgagtcagagaagcggcccttcatcgacgaagcaaaacggctgcgtgctatgcatatgaaggaacatcctgattacaaatatagacccaggaggaagcctaaaacactgttgaagaaggacaaatttgcattccccgtaccgtatgggctcggtggtgtcgcagacgccgagcacccagcgctgaaggcgggagccggtctccacgctggcgctggcgggggattggtccccgagtccctgttggccaatcccgagaaagcagctgccgctgctgctgcagccgccgcaagagtatttttcccccaatcagctgccgccgccgcagctgcagccgcggctgccgccgcaggaagcccttatagcctcttagacttgggttcaaagatggccgagatttcctctagttcctcgggactgccatatgcctcatcactggggtaccctaccgctggtgcgggagcttttcacggtgctgctgctgcagccgctgccgctgcagctgcagcaggcggacatactcattcacacccctcccctggcaatccgggttacatgatcccatgcaactgctctgcctggcccagcccaggactgcaaccacccctggcatatatattgctgccaggcatgggcaaaccacagctggatccataccccgctgcttacgctgctgctctgtag

SEQ ID NO: 170256 - DNA, 831 bp, Artificial Sequence
  derived and/or modified sequence
atgagcaagcctgtggaccacgtgaagaggcccatgaatgccttcatggtgtggagccgggcccagaggaggaagatggcccaggagaaccccaagatgcacaacagcgagatcagcaagaggctgggcgctgagtggaagctgctgacagagagcgagaagaggcccttcattgatgaggccaagaggctgcgggccatgcacatgaaggagcacccagactacaagtaccggcccaggaggaagcccaagaccctgctgaagaaggacaagtttgccttccctgtgccctacggcctgggcggcgtggctgatgctgagcacccagccctgaaggccggggccggcctgcatgctggagctgggggcggcctggtgcctgagagcctgctggccaaccctgagaaggctgctgctgctgctgctgctgctgctgcccgggtcttcttcccccagagcgctgctgctgctgctgctgctgctgctgctgctgctgctggcagcccctacagcctgctggacctgggcagcaagatggccgagatcagcagcagcagcagcggcctgccctatgccagcagcctgggctaccccacagctggggccggggccttccacggggctgctgctgctgctgctgctgctgctgctgctgctgggggccacacccacagccaccccagccctggcaaccctggctacatgatcccctgcaactgcagcgcctggcccagccctggcctgcagccccccctggcctacatcctgctgcccggcatgggcaagccccagctggacccctacccagctgcctatgctgctgccctgtag

SEQ ID NO: 170257 - DNA, 831 bp, Artificial Sequence
  derived and/or modified sequence
atgagcaagcccgtggaccacgtgaagcggcccatgaacgccttcatggtctggtcaagggcgcaacggcggaagatggctcaggaaaatccaaagatgcacaactccgagatcagtaagcggctcggggctgaatggaagctgcttaccgagagcgagaagcgcccttttatcgacgaagctaagaggctccgtgcgatgcacatgaaggagcacccagactacaagtacagacctaggagaaagccgaaaaccctgctaaagaaagacaaattcgcatttccggtgccctacggtttgggaggagtggcagatgctgagcatcccgccctcaaggcaggagccggtctgcacgccggggccggaggcgggctggtccccgaatcattgcttgctaatccagagaaggccgccgccgcggctgcggctgctgctgccagagtgtttttcccgcagtcagcggccgccgccgcggctgcagccgctgcagcggcagcgggcagcccatactcactcctcgacctcggatcaaaaatggccgaaatttcatccagcagcagcgggctcccttacgcttcctctctggggtacccgacagccggggccggagccttccacggggcagccgcagcagctgcagcagccgctgccgccgccgggggccacacccacagccatccttcacctggtaacccaggatacatgataccttgcaactgcagcgcatggccctctccgggtttgcagccccccctcgcttacatcctgttgccaggtatggggaagccacagctggacccctaccctgccgcatatgcagcagcgctctag

SEQ ID NO: 170258 - DNA, 831 bp, Artificial Sequence
  derived and/or modified sequence
atgtctaaaccagtcgatcacgtcaaacggccaatgaacgcattcatggtctggtcgagagcacagagaaggaagatggcacaggaaaatcccaagatgcacaacagcgagatatcaaaaaggctcggcgctgagtggaagttgctcacagagtctgaaaagagacctttcatcgacgaagcaaagcgcctccgggcaatgcacatgaaagaacaccctgactataagtatcgccctcgtcgcaaaccaaagaccctcctaaaaaaagacaaatttgccttcccggtgccctatggcctaggcggagtagcagatgcggagcatccagccctcaaggccggagctggcctgcacgcgggagcaggcggaggcctggtgccagagtccttgctcgctaatcccgaaaaagccgctgccgctgcagccgctgcagccgctcgggtctttttcccacagagtgccgcagctgccgctgcagcggctgcagctgccgcagctggctccccttatagtcttctggatctcggctctaagatggccgaaatctcttccagtagctcaggtcttccttacgcctcttcgctcggataccccaccgcgggtgcgggtgcttttcatggcgcagcagccgctgccgctgccgcagccgctgccgcagggggacacacacactcacacccatcgcccggaaatccgggatacatgattccctgcaactgtagtgcctggccttctcccggacttcaacccccacttgcctatatcctgctgccaggtatggggaaaccacagctggatccttatccagctgcctacgctgcagcactttag

SEQ ID NO: 170259 - DNA, 2504 bp, Artificial Sequence
  derived and/or modified sequence
ctccgcgggcagccaacattgatttcctccgggccgagggcgagggcccgggaggcggcgggctgcagccgcggcagggcgagagcatgtccaagccggtggaccacgtcaagcggcccatgaacgccttcatggtgtggtcgcgggctcagcggcgcaagatggcccaggagaaccccaagatgcacaactcggagatcagcaagcgcttgggcgccgagtggaaactgctcacagagtcggagaagcggccgttcatcgacgaggccaagcgtctacgcgccatgcacatgaaggagcaccccgactacaagtaccggccgcggcgcaagcccaagacgctgctcaagaaggacaagttcgccttcccggtgccctacggcctgggcggcgtggcggacgccgagcaccctgcgctcaaggcgggcgccgggctgcacgcgggggcgggcggcggcctggtgcctgagtcgctgctcgccaatcccgagaaggcggccgcggccgccgccgctgccgccgcacgcgtcttcttcccgcagtcggccgctgccgccgccgctgccgccgccgccgccgccgcgggcagcccctactcgctgctcgacctgggctccaaaatggcagagatctcgtcgtcctcgtccggcctcccgtacgcgtcgtcgctgggctacccgaccgcgggcgcgggcgccttccacggcgcggcggcggcggctgcagcggcggccgccgccgccggggggcacacgcactcgcaccccagcccgggcaacccgggctacatgatcccgtgcaactgcagcgcgtggcccagccccgggctgcagccgccgctcgcctacatcctgctgccgggcatgggcaagccccagctggacccctaccccgcggcctacgctgccgcgctatgaccccgcggggccgcctcgcgaggaccggtgtgcacacgtgtacatatgtataggtacgagcgctgcggcctccccgtgcgccctcccgcgaccgggggcccggtttgtatgtacatagaatgtataggtgccaggtagaggcagagaggccaggcggggcaggagtggccaagcgcgcaagggcgcgggcgagcaggcctgtgaattcgcaggatcatttcagacccgcacttcggcagccaactcgaaagcaggcggttgtgtgcggcagcagttggcgtttgctttgcacttcggaacctgttgcgttttgacccacggaggtggaggagtaactttttgacatgttggcctttccagttttgttggaagtttcatggtcggttttgtttttgtttctcattcttcttcctcgcccctcagccccccaacccccaaccccctcccggtccgtgttgcatgcacgctgttcaaatgtgaggtctgaaatggctggcacacgggaaaagctgcttgtgtcattcgtttctgggagtgggatggctctgagcagcctcgcctccctgtttgtactatttgaactttgcagatctctgttctctcaagcagaactcccaaccagatccattcttgaccagtgaccggctcgaatctggccttttgtgtgagatgatcacggtttcttttgtttatcacgccatttgcaaatcagagcaagagctctttctcaagggcaagaaacgcaaacaagaaatatttgtgagatgaaagttgtcaattggattttcttcctaaacaaacaacaacaacaaactactagaagtctccctgagtccactcgcttggatttctgacacagtttacaaaaaaggaaaaaggcactgctcctattttcccttatggctgagttcaccttaagattgtaaatgtgtatatgtcagtgaaaacattgaggcttggaaaatgtgttattttcgttgccctaagtttgagtcgactttagactcaaaaacattttgagcgaatatcaaagttaacttttaaaaattgcgaaactatttcagaatcgcaattttatcgaagattaaatcagacttttttgtctggtaattatatatttattatttagcaaaactgaagaaaaaaagcacagaattgtttcaacagatgtctctcattttcagctagcatttctctcccaagttgagctggtttaatgtgttttggatttccctcctcaattggcttattttttagatcacctgcaattcatttgcaaattgcaataaaacacattttagaaaaaaggaaccttcaattattagctttgtttctttttaaatgtatatattttgactaatgtttgtgaatgaagttggctaacatgtatttagtttcattttggctttatgtaatataaagtttttaaaattttaaatatggttttaacctttatgtgtaaatgattttctagtgtgaccttctaatttaatattagacgtctaaggtatatctgtaaattagaatccgactatcactctgttcattttttttgaacaaagagtttaaataaagcctgaaccaggg

SEQ ID NO: 170260 - protein, 308 aa, Artificial Sequence
  derived and/or modified sequence
MWKRWLALALALVAVAWVRAEEELRSKSKICANVFCGAGRECAVTEKGEPTCLCIEQCKPHKRPVCGSNGKTYLNHCELHRDACLTGSKIQVDYDGHCKEKKSVSPSASPVVCYQSNRDELRRRIIQWLEAEIIPDGWFSKGSNYSEILDKYFKNFDNGDSRLDSSEFLKFVEQNETAINITTYPDQENNKLLRGLCVDALIELSDENADWKLSFQEFLKCLNPSFNPPEKKCALEDETYADGAETEVDCNRCVCACGNWVCTAMTCDGKNQKGAQTQTEEEMTRYVQELQKHQETAEKTKRVSTKEI

SEQ ID NO: 170261 - protein, 140 aa, Artificial Sequence
  derived and/or modified sequence
MWKRWLALALALVAVAWVRAEEELRSKSKICANVFCGAGRECAVTEKGEPTCLCIEQCKPHKRPVCGSNGKTYLNHCELHRDACLTGSKIQVDYDGHCKEKKSVSPSASPVVCYQSNRDELRRRIIQWLEAEIIPDGWFS

SEQ ID NO: 170262 - protein, 251 aa, Artificial Sequence
  derived and/or modified sequence
MCFVEPAGNVQSQRKGNPPVSALSNANLTGSKIQVDYDGHCKEKKSVSPSASPVVCYQSNRDELRRRIIQWLEAEIIPDGWFSKGSNYSEILDKYFKNFDNGDSRLDSSEFLKFVEQNETAINITTYPDQENNKLLRGLCVDALIELSDENADWKLSFQEFLKCLNPSFNPPEKKCALEDETYADGAETEVDCNRCVCACGNWVCTAMTCDGKNQKGAQTQTEEEMTRYVQELQKHQETAEKTKRVSTKEI

SEQ ID NO: 170263 - DNA, 5943 bp, Artificial Sequence
  derived and/or modified sequence
ggcagggacccacgggacaccccctctgcctccgctccacgtccagggggccgaaggggcgccggacgagggaccgtgcggagagaggggttcggcggcgccaggactcccgcgggctccccggagcaggggtcggaaggagggggagcgggagccgcgggggccgctgcagcagaagggggaggagaatggggaggagctgggggggcaggcaggcggggaaggagaggtcttaaggggcggcgaggggaggtcgcatttcctccgaggctggcgatcggcggagctcccacctccgcttacagctcgctgccgccgtcctgccccgcgcccccaggagacctggaccagaccacgatgtggaaacgctggctcgcgctcgcgctcgcgctggtggcggtcgcctgggtccgcgccgaggaagagctaaggagcaaatccaagatctgtgccaatgtgttttgtggagccggccgggaatgtgcagtcacagagaaaggggaacccacctgtctctgcattgagcaatgcaaacctcacaagaggcctgtgtgtggcagtaatggcaagacctacctcaaccactgtgaactgcatcgagatgcctgcctcactggatccaaaatccaggttgattacgatggacactgcaaagagaagaaatccgtaagtccatctgccagcccagttgtttgctatcagtccaaccgtgatgagctccgacgtcgcatcatccagtggctggaagctgagatcattccagatggctggttctctaaaggcagcaactacagtgaaatcctagacaagtattttaagaactttgataatggtgattctcgcctggactccagtgaattcctgaagtttgtggaacagaatgaaactgccatcaatattacaacgtatccagaccaggagaacaacaagttgcttaggggactctgtgttgatgctctcattgaactgtctgatgaaaatgctgattggaaactcagcttccaagagtttctcaagtgcctcaacccatctttcaaccctcctgagaagaagtgtgccctggaggatgaaacgtatgcagatggagctgagaccgaggtggactgtaaccgctgtgtctgtgcctgtggaaattgggtctgtacagccatgacctgtgacggaaagaatcagaagggggcccagacccagacagaggaggagatgaccagatatgtccaggagctccaaaagcatcaggaaacagctgaaaagaccaagagagtgagcaccaaagagatctaatgaggaggcacagaccagtgtctggatcccagcatcttctccacttcagcgctgagttcagtatacacaagtgtctgctacagtcgccaaatcaccagtatttgcttatatagcaatgagttttattttgtttatttgttttgcaataaaggatatgaaggtggctggctaggaagggaagggccacagccttcatttctaggagtgctttaagagaaactgtaaatggtgctctggggctggaggctagtaaggaaactgcatcacgattgaaagaggaacagacccaaatctgaacctcttttgagtttactgcatctgtcagcaggctgcagggagtgcacacgatgccagagagaacttagcagggtgtccccggaggagaggtttgggaagctccacggagaggaacgctctctgcttccagcctctttccattgccgtcagcatgacagacctccagcatccacgcatctcttggtcccaataactgcctctagatacatagccatactgctagttaacccagtgtccctcagacttggatggagtttctgggagggtacacccaaatgatgcagatacttgtatactttgagccccttagcgacctaaccaaattttaaaaatactttttaccaaaggtgctatttctctgtaaaacacttttttttggcaagttgactttattcttcaattattatcattatattattgttttttaatattttattttcttgactaggtattaagcttttgtaattatttttcagtagtcccaccacttcataggtggaaggagtttggggttcttcctggtgcaggggctgaaataacccagatgcccccaccctgccacatactagatgcagcccatagttggcccccctagcttccagcagtccactatctgccagaggagcaagggtgccttagaccgaagccaggggaagaagcatcttcataaaaaactttcaagatccaaacattaatttgtttttatttattctgagaagttgaggcaaatcagtattcccaaggatggcgacaagggcagccaagcagggcttaggatatcccagcctaccaatatgctcattcgactaactaggagggtgagttggccctgtctcttcttttttctggacctcagtttcctcagtgagctggtaagaatgcactaaccttttgatttgataagttataaattctgtggttctgatcattggtccagaggggagataggttcctgtgatttttccttcttctctatagaataaatgaaatcttgttactagaacaagaaatgtcagatggccaaaaacaagatgaccagatttgatctcagcctgatgaccctacaggtcgtgctatgatatggagtcctcatgggtaaagcaggaagagagtgggaaagagaaccaccccactctgtcttcatatttgcatttcatgtttaacctccggctggaaatagaaagcattcccttagagatgaggataaaagaaagtttcagattcaacagggggaagaaaatggagatttaatcctaaaactgtgacttggggaggtcagtcatttacagttagtcctgtgtctttcgacttctgtgattattaaccccactcactaccctgtttcagatgcatttggaataccaaagattaaatccttgacataagatctcatttgcagaaagcagattaaagaccatcagaaggaaattatttaggttgtaatgcacaggcaactgtgagaaactgttgtgccaaaaatagaattccttctagtttttcttgttctcatttgaaaggagaaaattccactttgtttagcatttcaagcttttatgtatccatcccatctaaaaactcttcaaactccacttgttcagtctgaaatgcagctccctgtccaagtgccttggagaactcacagcagcacgccttaatcaaaggttttaccagcccttggacactatgggaggagggcaagagtacaccaatttgttaaaagcaagaaaccacagtgtctcttcactagtcatttagaacatggttatcatccaagactactctaccctgcaacattgaactcccaagagcaaatccacattcctcttgagttctgcagcttctgtgtaaatagggcagctgtcgtctatgccgtagaatcacatgatctgaggaccattcatggaagctgctaaatagcctagtctggggagtcttccataaagttttgcatggagcaaacaaacaggattaaactaggtttggttccttcagccctctaaaagcatagggcttagcctgcaggcttccttgggctttctctgtgtgtgtagttttgtaaacactatagcatctgttaagatccagtgtccatggaaacattcccacatgccgtgactctggactatatcagtttttggaaagcagggttcctctgcctgctaacaagcccacgtggaccagtctgaatgtctttcctttacacctatgtttttaagtagtcaaacttcaagaaacaatctaaacaagtttctgttgcatatgtgtttgtgaacttgtatttgtatttagtaggcttctatattgcatttaacttgtttttgtaactcctgattcttccttttcggatactattgatgaataaagaaattaaagtgatggttttattggtttcctttcccccaattaaggccaaataaagtcgtgagaacattacccatttacttcctaagagtggatttgagtttcaggagccttaaaaaggactgaagagtttctcctgggactacagcttggatggaaagtttactcggggactggtagaacaagtttctttgaaaggatcatggatagtgggtctggagtagaaggtgatgacaagtcagaaagtgtcttagtcccttcaagttgctataacaaaatgcctcagactgggtaattataggcaacagaaatgtattgctcacagttctgaaggctgggaagcctaagatcaaggtaccagcagattcagtgtctgatgacggcttgttgaagcttgcctgcttcaaagaatgcacctttttgatgcatccccacatggtgaaaagggtgaacaaactcccttaggcctcttttataagggcacttacccattcatgagggttaaactttgatgacctaatcatctcccaagagcctcacctctcaataccattgctttggggattcaattttaacatatgaattttgggggacataaacattcaaaccatagcaggtgcattcctgtattgggaagacattaaattaaatgactcgtaaatcccccatatgatttaggagactaaatggcatccagtgaggctgactgcagtagcctgtgagaaggcaaataaacatgggaaggtagtacagggaacatggaatcattgccagggacaggctaaataaccttaatggcacttccttgatacacacattccatgggggtaaacagttccaagtgggctgaacgttagctggttaaaacctcttttgcttggggacacatgactaacgctttccaacctgccattttcatatgtatcatgcactctccacccacaataattctgcctcccaaaagagcatattatagtcaatgaggtttaaggtttcttcggttcagtcatgtggaagttttgctttcctaaaattatagctggatcactttgattggatttgggatattacccaaatgctaatcaaatattaaaaggcaatcttttttgttatgtgattgctacagattactgctcttacagtttgattcttcaaattttcattctcagaagggaatcttaaacccagtttgaagggtaccttgtccacaaccacttttaaattttggctaacttcccaaccttccaccatgttctgggaaaactttttctgctgttatagtatgtatgtattcaggaagtgcaacattattaaactaagcataattcagaagctaagtttcctttcatcaaaatttaatattacgaattgtgcaaagaagtatgttactttgatcagctttattttagagcttctttatcaagttatcatcagtcctcttgaattatttctgaaataaggggaaggaaggaagggaaaaaatatgaatgcatagatagatctaagcagatgccttcagagccctggaataatcctagctgggatatgggacatgaaaacaactctggcctactgctgctgggggctgttgcatggtgtgacataggaagtaaaatgttgctgtatgaataggaaggagggtcttcctgtcaatgagaattaatgttttcctaatgatttaacttttttactgaaaaaataatatgtgtacatggtaaaaatccaaattgtatcacagaaaatacagtgaataaaaccatcctcttaagagggtgtgtacatttataaatttgcctatgattgcctataaagtcaaagaagttgcaccagtatgcatgactgccaaaagtacataaactgagcatatccatttccctacattcttgcaaacattgtgccttcgaactttttggcctctgatagaggaaaaatggtaactccttgttttattttttatattcattattccttttgtaagattaaatatcatctcatgaataa

SEQ ID NO: 170264 - DNA, 565 bp, Artificial Sequence
  derived and/or modified sequence
ctccgaggctggcgatcggcggagctcccacctccgcttacagctcgctgccgccgtcctgccccgcgcccccaggagacctggaccagaccacggtcagcgcggggcccggcgccttcagactcgctctcttctctcttccgcagatgtggaaacgctggctcgcgctcgcgctcgcgctggtggcggtcgcctgggtccgcgccgaggaagagctaaggagcaaatccaagatctgtgccaatgtgttttgtggagccggccgggaatgtgcagtcacagagaaaggggaacccacctgtctctgcattgagcaatgcaaacctcacaagaggcctgtgtgtggcagtaatggcaagacctacctcaaccactgtgaactgcatcgagatgcctgcctcactggatccaaaatccaggttgattacgatggacactgcaaagagaagaaatccgtaagtccatctgccagcccagttgtttgctatcagtccaaccgtgatgagctccgacgtcgcatcatccagtggctggaagctgagatcattccagatggctggttctc

SEQ ID NO: 170265 - DNA, 1506 bp, Artificial Sequence
  derived and/or modified sequence
atttcctccgaggctggcgatcggcggagctcccacctccgcttacagctcgctgccgccgtcctgccccgcgcccccaggagacctggaccagaccacgatgtggaaacgctggctcgcgctcgcgctcgcgctggtggcggtcgcctgggtccgcgccgaggaagagctaaggagcaaatccaagatctgtgccaatgtgttttgtggagccggccgggaatgtgcagtcacagagaaaggggaacccacctgtctctgcattgagcaatgcaaacctcactggatccaaaatccaggttgattacgatggacactgcaaagagaagaaatccgtaagtccatctgccagcccagttgtttgctatcagtccaaccgtgatgagctccgacgtcgcatcatccagtggctggaagctgagatcattccagatggctggttctctaaaggcagcaactacagtgaaatcctagacaagtattttaagaactttgataatggtgattctcgcctggactccagtgaattcctgaagtttgtggaacagaatgaaactgccatcaatattacaacgtatccagaccaggagaacaacaagttgcttaggggactctgtgttgatgctctcattgaactgtctgatgaaaatgctgattggaaactcagcttccaagagtttctcaagtgcctcaacccatctttcaaccctcctgagaagaagtgtgccctggaggatgaaacgtatgcagatggagctgagaccgaggtggactgtaaccgctgtgtctgtgcctgtggaaattgggtctgtacagccatgacctgtgacggaaagaatcagaagggggcccagacccagacagaggaggagatgaccagatatgtccaggagctccaaaagcatcaggaaacagctgaaaagaccaagagagtgagcaccaaagagatctaatgaggaggcacagaccagtgtctggatcccagcatcttctccacttcagcgctgagttcagtatacacaagtgtctgctacagtcgccaaatcaccagtatttgcttatatagcaatgagttttattttgtttatttgttttgcaataaaggatatgaaggtggctggctaggaagggaagggccacagccttcatttctaggagtgctttaagagaaactgtaaatggtgctctggggctggaggctagtaaggaaactgcatcacgattgaaagaggaacagacccaaatctgaacctcttttgagtttactgcatctgtcagcaggctgcagggagtgcacacgatgccagagagaacttagcagggtgtccccggaggagaggtttgggaagctccacggagaggaacgctctctgcttccagcctctttccattgccgtcagcatgacagacctccagcatccacgcatctcttggtcccaataactgcctctagatacatagccatactgctagttaacccagtgtccctcagacttggatggagtt

SEQ ID NO: 170266 - DNA, 927 bp, Artificial Sequence
  derived and/or modified sequence
atgtggaagcgttggcttgcactagctctggccttggtggcagtcgcttgggtccgtgccgaagaggaactgcgcagcaaaagcaaaatctgcgccaatgtgttctgcggagcaggccgggagtgcgccgtcacagaaaaaggagaaccaacatgcctgtgcatcgagcagtgcaaaccgcataaaaggccagtgtgtggctcaaacgggaaaacttaccttaaccattgcgaattacaccgtgatgcctgcttgacaggaagtaagatccaggttgattacgatggccattgcaaggagaaaaagtcagtatcgccctcagcatcccctgtcgtgtgttatcagtctaaccgtgacgagctgcgaaggcgtattatccagtggcttgaggcagagataatcccagacgggtggttttccaaggggtcaaactactcagaaatccttgacaagtatttcaagaattttgacaacggagactcgcgcctggacagctccgagtttctgaagttcgttgaacagaatgagacggctataaacatcacgacttatccagatcaggaaaacaacaaacttctcaggggattgtgtgttgacgccttgatcgagctttcagatgagaatgctgattggaagttgtcctttcaggagtttctcaagtgcttgaatcctagtttcaatccgcctgagaagaagtgtgctctcgaagacgaaacgtatgccgatggcgcagagacagaagttgactgcaatagatgcgtttgtgcctgcggcaattgggtatgtactgccatgacctgtgatgggaaaaaccagaaaggagcacagacgcagacggaagaagagatgactcgctatgtgcaggagctccagaaacaccaggagaccgccgagaaaacgaagagagtgtccactaaagagatttag

SEQ ID NO: 170267 - DNA, 423 bp, Artificial Sequence
  derived and/or modified sequence
atgtggaaacggtggctcgcactcgccttggcgctggtcgcagtggcctgggtgcgtgcggaagaagaactcagaagcaaaagtaaaatttgtgcaaatgtcttctgcggcgcgggtcgggagtgcgcagtgaccgaaaaaggagagccaacctgtctctgtatcgaacagtgtaaaccccacaaacgcccggtctgtggctccaatggtaagacttatttgaaccactgcgagctccaccgggatgcctgcttaactggctcaaagattcaagtggactatgatggccattgtaaggaaaaaaaatccgtgtcaccttcagctagcccggtagtctgttatcaaagcaatagagacgagctgcgaagacgaataatccagtggttggaggcggagatcatacctgatggatggtttagttag

SEQ ID NO: 170268 - DNA, 756 bp, Artificial Sequence
  derived and/or modified sequence
atgtgctttgtcgaaccagctggaaacgttcagtctcaacgaaagggcaacccccctgttagtgcgctgagcaatgcaaatctgactggaagcaagatacaggtcgactatgacgggcattgcaaggagaagaaatccgtttcaccttcagcatccccggtcgtgtgttatcagagtaatcgggatgagcttcgcagacgcataatacagtggctggaggcagagatcatcccggacgggtggtttagtaagggttctaattattccgagatactggacaaatatttcaagaacttcgataacggcgatagccgtcttgattcttcggagtttctcaaattcgtcgagcaaaatgagaccgccatcaacattacaacttatccagaccaagaaaataacaagctgttgcgcgggctctgcgtggatgccctcattgagctgtctgatgagaatgccgactggaagctttcattccaggagttcttgaagtgtttaaaccccagctttaatcctccagaaaagaaatgtgcactggaggacgaaacctacgcagatggggccgagacagaggtagactgcaatcggtgtgtgtgcgcgtgcggaaactgggtctgcacagctatgacatgcgacggcaaaaaccaaaagggtgctcagacccagactgaggaggagatgaccaggtacgtgcaggagctccagaagcaccaggagacagccgagaagacaaaacgcgtgtctacaaaggaaatttag

SEQ ID NO: 170269 - DNA, 927 bp, Artificial Sequence
  derived and/or modified sequence
atgtggaagcgctggctggccctggccctggccctggtggccgtggcctgggtgcgggcagaggaggagctgcggagcaagagcaagatctgtgccaacgtgttctgtggggccggcagagaatgtgctgtgacagagaagggggagcccacctgcctgtgcatcgagcagtgcaagccccacaagaggcctgtgtgtggcagcaatggcaagacctacctgaaccactgtgagctgcacagagatgcctgcctgaccggcagcaagatccaggtggactatgatggccactgcaaggagaagaagtctgtgagccccagcgccagccctgtggtgtgctaccagagcaacagagatgagctgcggcggcgcatcatccagtggctggaggccgagatcatcccagatggctggttcagcaagggcagcaactacagcgagatcctggacaagtacttcaagaactttgacaacggggacagccggctggacagcagcgagttcctgaagtttgtggagcagaatgaaacagccatcaacatcaccacctacccagaccaggagaacaacaagctgctgcggggcctgtgtgtggatgccctgattgagctgagtgatgaaaatgctgactggaagctgtccttccaggagttcctgaagtgcctgaaccccagcttcaaccccccagagaagaagtgtgccctggaggatgagacctatgcagatggagctgagacagaggtggactgcaacagatgtgtgtgtgcctgtggcaactgggtgtgcacagccatgacctgtgatggcaagaaccagaagggggcccagacccagacagaggaggagatgacccgctacgtgcaggagctgcagaagcaccaggagacagctgagaagaccaagagggtgtccaccaaggagatctag

SEQ ID NO: 170270 - DNA, 423 bp, Artificial Sequence
  derived and/or modified sequence
atgtggaagcgctggctggccctggccctggccctggtggccgtggcctgggtgcgggcagaggaggagctgcggagcaagagcaagatctgtgccaacgtgttctgtggggccggcagagaatgtgctgtgacagagaagggggagcccacctgcctgtgcatcgagcagtgcaagccccacaagaggcctgtgtgtggcagcaatggcaagacctacctgaaccactgtgagctgcacagagatgcctgcctgaccggcagcaagatccaggtggactatgatggccactgcaaggagaagaagtctgtgagccccagcgccagccctgtggtgtgctaccagagcaacagagatgagctgcggcggcgcatcatccagtggctggaggccgagatcatcccagatggctggttctcctag

SEQ ID NO: 170271 - DNA, 756 bp, Artificial Sequence
  derived and/or modified sequence
atgtgctttgtggagcctgctggaaatgtgcagagccagaggaaaggaaacccccctgtgtctgccctgagcaatgccaacctgaccggcagcaagatccaggtggactatgatggccactgcaaggagaagaagtctgtgagccccagcgccagccctgtggtgtgctaccagagcaacagagatgagctgcggcggcgcatcatccagtggctggaggccgagatcatcccagatggctggttcagcaagggcagcaactacagcgagatcctggacaagtacttcaagaactttgacaatggagacagccggctggacagcagcgagttcctgaagtttgtggagcagaatgaaacagccatcaacatcaccacctacccagaccaggagaacaacaagctgctgcggggcctgtgtgtggatgccctgattgagctgagtgatgaaaatgctgactggaagctgtccttccaggagttcctgaagtgcctgaaccccagcttcaaccccccagagaagaagtgtgccctggaggatgagacctatgcagatggagctgagacagaggtggactgcaacagatgtgtgtgtgcctgtggcaactgggtgtgcacagccatgacctgtgatggcaagaaccagaagggggcccagacccagacagaggaggagatgaccaggtatgtgcaggagctgcagaagcaccaggagacagctgagaagaccaagagggtgtccaccaaggagatctag

SEQ ID NO: 170272 - DNA, 927 bp, Artificial Sequence
  derived and/or modified sequence
atgtggaagcggtggctggccctggccctggccctggtggccgtggcctgggtgcgagccgaggaagaactcaggtcgaaatcaaaaatctgtgccaatgtgttttgtggggcggggcgagagtgtgccgtcacggagaagggcgagcctacgtgtctgtgcattgaacagtgtaagccccacaaaagacccgtatgcggcagtaatggcaagacatacctaaatcactgcgagctgcatagagacgcatgcttgactggctcaaaaattcaggtagactatgacggacattgcaaagagaagaaaagcgtctcaccaagcgccagcccagtggtgtgctaccagagcaaccgggatgagctgaggcgcaggattatccaatggctggaagccgagattatccctgatgggtggttttccaaagggtccaactactcagagattctcgacaagtatttcaagaatttcgacaacggggatagtcgcctggactcctctgaattcctcaagtttgtggagcaaaacgagacagccatcaatatcactacctaccccgaccaggaaaataacaagcttttgcgtggcctctgcgtcgacgcgctgatcgaactctctgacgaaaacgcggactggaagttgtcattccaggaattcctcaagtgtctcaatccctcttttaaccccccagaaaaaaagtgtgcactggaagatgaaacctacgctgatggcgccgaaaccgaggtggactgcaatagatgcgtgtgcgcttgcgggaactgggtatgcacagcgatgacatgtgacggtaaaaaccaaaagggggctcagactcagaccgaggaggaaatgactagatacgtgcaggagctacagaagcaccaggaaactgccgaaaaaactaagagggtgagtactaaggaaatctag

SEQ ID NO: 170273 - DNA, 423 bp, Artificial Sequence
  derived and/or modified sequence
atgtggaagcggtggctggccctggccctggccctggtggccgtggcatgggtgagggccgaagaggaactccgttccaagtccaaaatttgtgcaaatgtgttctgcggggctggccgggagtgtgccgtgactgagaaaggcgagccgacttgcttatgtatcgagcagtgtaaacctcataagcgccctgtgtgtggatccaatggtaagacatatcttaaccactgtgagctacatcgtgacgcctgtctgaccgggtccaagattcaggtggattatgatggacattgtaaggagaagaagtcagtcagccctagcgccagtcctgtcgtgtgctatcagtccaaccgggacgagctgcggaggcgtataatccagtggctcgaagccgagatcatccccgacgggtggttctcatag

SEQ ID NO: 170274 - DNA, 756 bp, Artificial Sequence
  derived and/or modified sequence
atgtgcttcgtggagcccgccggcaacgtgcagagccagcggaagggaaacccaccagtgtccgcgttgtctaacgccaatctgacggggtcaaagatccaagtagactatgacggccattgtaaagaaaagaagtccgttagcccgagcgcctctccagtggtgtgttaccagtccaatcgagacgaactgagacgaagaataattcagtggctcgaggcggagataattcccgatgggtggttctccaagggcagtaactattcggaaattttagataaatactttaagaacttcgataacggggactccaggttggattctagcgagttcctgaaattcgtggagcaaaatgagacagctatcaatatcactacctatcctgatcaggagaacaataaattgctcaggggactgtgcgtcgacgcccttatagagttgtcagacgagaacgctgactggaaattaagctttcaggagttcctgaagtgcctgaacccatcatttaatccaccagagaagaagtgcgcgctggaggacgagacatatgccgatggcgccgaaaccgaggtggattgcaaccgctgtgtttgcgcctgtggaaactgggtgtgcaccgccatgacgtgcgacggaaaaaatcagaaaggtgctcagacacagactgaggaagagatgaccaggtatgttcaggaacttcagaagcaccaggagaccgcagagaagactaagcgcgtttccacgaaggagatctag

SEQ ID NO: 170275 - DNA, 927 bp, Artificial Sequence
  derived and/or modified sequence
atgtggaagcgttggttggccctggcactggcccttgtggctgtggcctgggtgagagccgaggaggaactccgctccaaatccaagatctgcgctaacgtcttctgcggagcaggaagagagtgtgccgtgaccgagaagggagagcctacttgtctttgtattgaacagtgcaagccccacaagcggccagtgtgcggctctaatggcaaaacttatttgaatcactgcgagctgcatagagacgcatgcctgactggctcgaaaatacaggtggactatgatggacactgtaaggaaaaaaaaagtgtcagcccgagtgcctctccagtcgtctgctaccaaagcaacagagatgagctcagacgacggattattcaatggctcgaggccgaaatcatccctgatggatggttctccaaaggcagcaactatagtgagattctggacaagtacttcaagaattttgacaatggcgatagccgactcgactcctccgaattcttgaaatttgtggagcagaacgagaccgccattaatataaccacttatcccgaccaagagaataacaaacttctccggggactgtgcgtggacgcgctcattgagctgtctgacgaaaatgccgattggaaattgagcttccaggagtttctgaaatgcctgaatcccagttttaaccctcctgagaagaagtgcgctctagaggatgaaacctacgccgatggtgccgagaccgaggtggactgtaaccgttgcgtctgtgcctgtggcaactgggtttgtaccgcgatgacttgtgacggcaaaaatcagaagggggctcagactcagacagaagaggagatgactagatacgtgcaggaactccaaaagcaccaggaaaccgccgaaaagacaaagcgggtcagtactaaggagatttag

SEQ ID NO: 170276 - DNA, 423 bp, Artificial Sequence
  derived and/or modified sequence
atgtggaagaggtggctggcccttgccctcgcgctggtagcagtcgcctgggtacgggcagaggaagagctaagaagtaaaagtaaaatttgtgccaacgttttctgcggtgcaggtagagaatgcgctgtgacagaaaaaggagagcctacttgcctctgtatcgagcagtgtaaaccccacaaacgaccagtgtgcggcagcaacggaaaaacatacttgaaccattgtgagctacacagagacgcctgtctcactggatcgaagatccaggttgactatgatgggcattgtaaagagaagaagtccgtgagcccctctgcaagccctgtggtgtgttatcagtctaaccgagacgaactgagaaggcgtattattcagtggttagaagcagaaattatcccggacggttggttctcatag

SEQ ID NO: 170277 - DNA, 756 bp, Artificial Sequence
  derived and/or modified sequence
atgtgttttgtggagcccgcagggaatgtgcaaagccagaggaagggaaacccaccagtgagtgctctttccaatgcaaacctcacaggaagtaaaatccaggtagactatgacggccattgtaaggagaaaaaaagcgtgtccccgagcgccagtccagtggtgtgttatcagtccaatcgtgacgagttacgaagacgaatcatccagtggctggaggccgagattatccctgacggctggttttccaaggggtctaattattccgaaatactggacaagtactttaaaaacttcgacaacggagacagccgcctcgacagttctgagttcttgaagttcgtagaacagaacgagacagccatcaacatcactacatatcctgatcaagagaacaacaagcttctgcggggactctgtgtcgatgcacttatagaactgtccgacgaaaacgccgattggaaactaagtttccaggagtttctgaaatgcctgaatcctagcttcaacccccctgaaaaaaaatgcgctcttgaagacgaaacctacgctgacggcgcagagactgaggtggattgtaacaggtgcgtctgtgcctgcggaaattgggtgtgtaccgcaatgacttgtgacggcaagaatcagaagggcgctcaaacccaaacagaagaggagatgacccggtacgtgcaggagctgcagaagcaccaagaaacggctgagaagacgaaacgtgtctctacgaaggagatctag

SEQ ID NO: 170278 - DNA, 927 bp, Artificial Sequence
  derived and/or modified sequence
atgtggaagagatggctggccctggccctggccctggtggccgtggcctgggtgagagccgaggaggagctgagaagcaagagcaagatctgcgccaacgtgttctgcggcgccggcagagagtgcgccgtgaccgagaagggcgagcccacctgcctgtgcatcgagcagtgcaagccccacaagagacccgtgtgcggcagcaacggcaagacctacctgaaccactgcgagctgcacagagacgcctgcctgaccggcagcaagatccaggtggactacgacggccactgcaaggagaagaagagcgtgagccccagcgccagccccgtggtgtgctaccagagcaacagagacgagctgagaagaagaatcatccagtggctggaggccgagatcatccccgacggctggttcagcaagggcagcaactacagcgagatcctggacaagtacttcaagaacttcgacaacggcgacagcagactggacagcagcgagttcctgaagttcgtggagcagaacgagaccgccatcaacatcaccacctaccccgaccaggagaacaacaagctgctgagaggcctgtgcgtggacgccctgatcgagctgagcgacgagaacgccgactggaagctgagcttccaggagttcctgaagtgcctgaaccccagcttcaacccccccgagaagaagtgcgccctggaggacgagacctacgccgacggcgccgagaccgaggtggactgcaacagatgcgtgtgcgcctgcggcaactgggtgtgcaccgccatgacctgcgacggcaagaaccagaagggcgcccagacccagaccgaggaggagatgaccagatacgtgcaggagctgcagaagcaccaggagaccgccgagaagaccaagagagtgagcaccaaggagatctag

SEQ ID NO: 170279 - DNA, 423 bp, Artificial Sequence
  derived and/or modified sequence
atgtggaagagatggctggccctggccctggccctggtggccgtggcctgggtgagagccgaggaggagctgagaagcaagagcaagatctgcgccaacgtgttctgcggcgccggcagagagtgcgccgtgaccgagaagggcgagcccacctgcctgtgcatcgagcagtgcaagccccacaagagacccgtgtgcggcagcaacggcaagacctacctgaaccactgcgagctgcacagagacgcctgcctgaccggcagcaagatccaggtggactacgacggccactgcaaggagaagaagagcgtgagccccagcgccagccccgtggtgtgctaccagagcaacagagacgagctgagaagaagaatcatccagtggctggaggccgagatcatccccgacggctggttcagctag

SEQ ID NO: 170280 - DNA, 756 bp, Artificial Sequence
  derived and/or modified sequence
atgtgcttcgtggagcccgccggcaacgtgcagagccagagaaagggcaacccccccgtgagcgccctgagcaacgccaacctgaccggcagcaagatccaggtggactacgacggccactgcaaggagaagaagagcgtgagccccagcgccagccccgtggtgtgctaccagagcaacagagacgagctgagaagaagaatcatccagtggctggaggccgagatcatccccgacggctggttcagcaagggcagcaactacagcgagatcctggacaagtacttcaagaacttcgacaacggcgacagcagactggacagcagcgagttcctgaagttcgtggagcagaacgagaccgccatcaacatcaccacctaccccgaccaggagaacaacaagctgctgagaggcctgtgcgtggacgccctgatcgagctgagcgacgagaacgccgactggaagctgagcttccaggagttcctgaagtgcctgaaccccagcttcaacccccccgagaagaagtgcgccctggaggacgagacctacgccgacggcgccgagaccgaggtggactgcaacagatgcgtgtgcgcctgcggcaactgggtgtgcaccgccatgacctgcgacggcaagaaccagaagggcgcccagacccagaccgaggaggagatgaccagatacgtgcaggagctgcagaagcaccaggagaccgccgagaagaccaagagagtgagcaccaaggagatctag

SEQ ID NO: 170281 - protein, 1129 aa, Artificial Sequence
  derived and/or modified sequence
MPATRKPMRYGHTEGHTEVCFDDSGSFIVTCGSDGDVRIWEDLDDDDPKFINVGEKAYSCALKSGKLVTAVSNNTIQVHTFPEGVPDGILTRFTTNANHVVFNGDGTKIAAGSSDFLVKIVDVMDSSQQKTFRGHDAPVLSLSFDPKDIFLASASCDGSVRVWQISDQTCAISWPLLQKCNDVINAKSICRLAWQPKSGKLLAIPVEKSVKLYRRESWSHQFDLSDNFISQTLNIVTWSPCGQYLAAGSINGLIIVWNVETKDCMERVKHEKGYAICGLAWHPTCGRISYTDAEGNLGLLENVCDPSGKTSSSKVSSRVEKDYNDLFDGDDMSNAGDFLNDNAVEIPSFSKGIINDDEDDEDLMMASGRPRQRSHILEDDENSVDISMLKTGSSLLKEEEEDGQEGSIHNLPLVTSQRPFYDGPMPTPRQKPFQSGSTPLHLTHRFMVWNSIGIIRCYNDEQDNAIDVEFHDTSIHHATHLSNTLNYTIADLSHEAILLACESTDELASKLHCLHFSSWDSSKEWIIDLPQNEDIEAICLGQGWAAAATSALLLRLFTIGGVQKEVFSLAGPVVSMAGHGEQLFIVYHRGTGFDGDQCLGVQLLELGKKKKQILHGDPLPLTRKSYLAWIGFSAEGTPCYVDSEGIVRMLNRGLGNTWTPICNTREHCKGKSDHYWVVGIHENPQQLRCIPCKGSRFPPTLPRPAVAILSFKLPYCQIATEKGQMEEQFWRSVIFHNHLDYLAKNGYEYEESTKNQATKEQQELLMKMLALSCKLEREFRCVELADLMTQNAVNLAIKYASRSRKLILAQKLSELAVEKAAELTATQVEEEEEEEDFRKKLNAGYSNTATEWSQPRFRNQVEEDAEDSGEADDEEKPEIHKPGQNSFSKSTNSSDVSAKSGAVTFSSQGRVNPFKVSASSKEPAMSMNSARSTNILDNMGKSSKKSTALSRTTNNEKSPIIKPLIPKPKPKQASAASYFQKRNSQTNKTEEVKEENLKNVLSETPAICPPQNTENQRPKTGFQMWLEENRSNILSDNPDFSDEADIIKEGMIRFRVLSTEERKVWANKAKGETASEGTEAKKRKRVVDESDETENQEEKAKENLNLSKKQKPLDFSTNQKLSAFAFKQE

SEQ ID NO: 170282 - DNA, 3390 bp, Artificial Sequence
  derived and/or modified sequence
atgcccgccaccagaaagcccatgagatacggccacaccgagggccacaccgaggtgtgcttcgacgacagcggcagcttcatcgtgacctgcggcagcgacggcgacgtgagaatctgggaggacctggacgacgacgaccccaagttcatcaacgtgggcgagaaggcctacagctgcgccctgaagagcggcaagctggtgaccgccgtgagcaacaacaccatccaggtgcacaccttccccgagggcgtgcccgacggcatcctgaccagattcaccaccaacgccaaccacgtggtgttcaacggcgacggcaccaagatcgccgccggcagcagcgacttcctggtgaagatcgtggacgtgatggacagcagccagcagaagaccttcagaggccacgacgcccccgtgctgagcctgagcttcgaccccaaggacatcttcctggccagcgccagctgcgacggcagcgtgagagtgtggcagatcagcgaccagacctgcgccatcagctggcccctgctgcagaagtgcaacgacgtgatcaacgccaagagcatctgcagactggcctggcagcccaagagcggcaagctgctggccatccccgtggagaagagcgtgaagctgtacagaagagagagctggagccaccagttcgacctgagcgacaacttcatcagccagaccctgaacatcgtgacctggagcccctgcggccagtacctggccgccggcagcatcaacggcctgatcatcgtgtggaacgtggagaccaaggactgcatggagagagtgaagcacgagaagggctacgccatctgcggcctggcctggcaccccacctgcggcagaatcagctacaccgacgccgagggcaacctgggcctgctggagaacgtgtgcgaccccagcggcaagaccagcagcagcaaggtgagcagcagagtggagaaggactacaacgacctgttcgacggcgacgacatgagcaacgccggcgacttcctgaacgacaacgccgtggagatccccagcttcagcaagggcatcatcaacgacgacgaggacgacgaggacctgatgatggccagcggcagacccagacagagaagccacatcctggaggacgacgagaacagcgtggacatcagcatgctgaagaccggcagcagcctgctgaaggaggaggaggaggacggccaggagggcagcatccacaacctgcccctggtgaccagccagagacccttctacgacggccccatgcccacccccagacagaagcccttccagagcggcagcacccccctgcacctgacccacagattcatggtgtggaacagcatcggcatcatcagatgctacaacgacgagcaggacaacgccatcgacgtggagttccacgacaccagcatccaccacgccacccacctgagcaacaccctgaactacaccatcgccgacctgagccacgaggccatcctgctggcctgcgagagcaccgacgagctggccagcaagctgcactgcctgcacttcagcagctgggacagcagcaaggagtggatcatcgacctgccccagaacgaggacatcgaggccatctgcctgggccagggctgggccgccgccgccaccagcgccctgctgctgagactgttcaccatcggcggcgtgcagaaggaggtgttcagcctggccggccccgtggtgagcatggccggccacggcgagcagctgttcatcgtgtaccacagaggcaccggcttcgacggcgaccagtgcctgggcgtgcagctgctggagctgggcaagaagaagaagcagatcctgcacggcgaccccctgcccctgaccagaaagagctacctggcctggatcggcttcagcgccgagggcaccccctgctacgtggacagcgagggcatcgtgagaatgctgaacagaggcctgggcaacacctggacccccatctgcaacaccagagagcactgcaagggcaagagcgaccactactgggtggtgggcatccacgagaacccccagcagctgagatgcatcccctgcaagggcagcagattcccccccaccctgcccagacccgccgtggccatcctgagcttcaagctgccctactgccagatcgccaccgagaagggccagatggaggagcagttctggagaagcgtgatcttccacaaccacctggactacctggccaagaacggctacgagtacgaggagagcaccaagaaccaggccaccaaggagcagcaggagctgctgatgaagatgctggccctgagctgcaagctggagagagagttcagatgcgtggagctggccgacctgatgacccagaacgccgtgaacctggccatcaagtacgccagcagaagcagaaagctgatcctggcccagaagctgagcgagctggccgtggagaaggccgccgagctgaccgccacccaggtggaggaggaggaggaggaggaggacttcagaaagaagctgaacgccggctacagcaacaccgccaccgagtggagccagcccagattcagaaaccaggtggaggaggacgccgaggacagcggcgaggccgacgacgaggagaagcccgagatccacaagcccggccagaacagcttcagcaagagcaccaacagcagcgacgtgagcgccaagagcggcgccgtgaccttcagcagccagggcagagtgaaccccttcaaggtgagcgccagcagcaaggagcccgccatgagcatgaacagcgccagaagcaccaacatcctggacaacatgggcaagagcagcaagaagagcaccgccctgagcagaaccaccaacaacgagaagagccccatcatcaagcccctgatccccaagcccaagcccaagcaggccagcgccgccagctacttccagaagagaaacagccagaccaacaagaccgaggaggtgaaggaggagaacctgaagaacgtgctgagcgagacccccgccatctgccccccccagaacaccgagaaccagagacccaagaccggcttccagatgtggctggaggagaacagaagcaacatcctgagcgacaaccccgacttcagcgacgaggccgacatcatcaaggagggcatgatcagattcagagtgctgagcaccgaggagagaaaggtgtgggccaacaaggccaagggcgagaccgccagcgagggcaccgaggccaagaagagaaagagagtggtggacgagagcgacgagaccgagaaccaggaggagaaggccaaggagaacctgaacctgagcaagaagcagaagcccctggacttcagcaccaaccagaagctgagcgccttcgccttcaagcaggagtag

SEQ ID NO: 170283 - DNA, 5996 bp, Artificial Sequence
  derived and/or modified sequence
gcgggaagcagctcttgtggatcctcagtggcggaggctcggtcacccggataggtaaaggaaaacatgcctgccacacggaagccaatgagatatgggcatacagagggacacacggaggtctgttttgatgattctgggagttttattgtgacttgtggaagtgatggtgatgtgaggatttgggaagacttggatgatgatgatcctaagttcattaatgttggagaaaaggcatattcatgtgctttgaagagtggaaaactggtcactgcagtttctaataatactattcaagtccacacatttcctgaaggagttccagatggtatattgactcgcttcactacaaatgcaaaccatgtggtctttaatggggatggtactaaaattgctgctggatctagtgattttctagtcaaaattgtggatgtgatggatagcagccaacagaaaacatttcgaggacatgatgcccctgttttaagtctttcctttgatcctaaggacatctttctggcatcagctagttgtgatggatctgtcagagtgtggcaaatttcagatcagacatgtgctattagttggccactgctacaaaaatgcaacgatgtgataaatgcaaaatcaatctgcagacttgcttggcagccaaaaagtgggaagttactggcaattcctgtggaaaaatctgttaagctatatagaagagaatcttggagtcatcaatttgatctttcagataatttcatctctcagaccctcaatatagtaacctggtctccctgtgggcaatatttagctgcaggtagtattaatggtctaatcatagtttggaatgtggaaaccaaagactgcatggaaagggtgaaacatgagaaaggttatgcaatttgtggtctggcatggcatcctacttgtggtcgaatatcgtatactgatgcggaaggaaatctagggcttctagagaatgtttgtgaccccagtggaaagacatcaagcagtaaggtatctagcagagtggaaaaggattataatgatctttttgatggagatgatatgagtaatgctggtgattttctaaatgacaatgcagttgagatcccttctttttcaaaagggattataaatgatgatgaggatgatgaagacctcatgatggcttcaggtcgtcctagacagcgaagtcacatcctagaagatgatgaaaactcagttgatatttcaatgctaaaaactggttctagtcttctcaaagaggaggaggaagatggtcaagaaggcagcattcacaatctaccacttgtaacatcccaaaggccattttatgatggacccatgccaactccccggcaaaagccatttcagtcaggttctacaccgttgcatctcactcacagattcatggtgtggaactctattggaattattcgctgctataatgatgagcaagacaatgccatagatgtggagttccatgatacctccatacaccatgcaacacacttatcaaacactttgaattatacaatagcagatctttcccacgaagctattttgttggcatgtgaaagcactgatgaactagcaagcaagcttcactgcctgcactttagttcttgggattcaagcaaagagtggataatagacttgcctcagaatgaggatattgaagccatatgtctcggtcaaggatgggctgctgccgctactagtgccctgcttcttcgattgtttactattggaggggttcaaaaagaggtattcagccttgctggacctgtggtgtcaatggcaggacatggagaacagcttttcattgtttatcacagaggtacaggatttgatggggatcagtgccttggagttcaactgctagagctggggaaaaagaaaaaacaaattttgcatggtgaccctcttcctcttacaaggaaatcctaccttgcatggattgggttttcagctgaaggtaccccttgttacgtggattcagaaggaattgttcgaatgcttaacagaggacttggtaatacgtggactcctatatgtaatacaagagagcactgcaaaggaaaatctgatcactactgggtggttggtatccatgaaaatccccagcaactaaggtgcattccttgtaaaggttctcggtttcccccaacccttccacgccctgctgttgctatattatcctttaagcttccttactgtcagattgcaacagagaaaggacaaatggaggagcaattttggcgttcagttatatttcacaaccaccttgattatttagctaaaaatggttatgaatatgaagagagcactaaaaatcaagcaacaaaagagcaacaggaacttttaatgaaaatgcttgcgctttcttgtaaactggagcgagaattccgttgtgtggaacttgctgatctaatgactcaaaatgctgtgaatttagccattaaatatgcttctcgctctcggaaattaatactggctcaaaaactaagtgaactggctgtagagaaggcagccgaattgacagcaacccaggtggaagaggaagaagaagaagaagatttcagaaaaaagctgaatgctggttacagcaatactgctacagagtggagccaaccaaggttcagaaatcaagttgaagaagatgctgaggacagtggagaagctgatgatgaagaaaaaccagaaatacataagcctggacagaactcgttttccaaaagtacaaattcctctgatgtttcagctaagtcaggtgcagttacctttagcagccaaggacgagtaaatccctttaaggtatcagccagttccaaagaaccagccatgtcaatgaattcagcacgttcaactaatattttagacaatatgggcaaatcatccaagaaatccactgcacttagtcgaactacaaataatgaaaagtctcccattataaagcctctgattccaaagccgaagcctaagcaggcatctgcagcatcctatttccagaaaagaaattctcaaactaataaaactgaggaagtgaaagaagaaaatcttaaaaatgtattatctgaaaccccagctatatgtcctcctcaaaacactgaaaaccaaaggccaaagaccgggttccagatgtggttagaagaaaatagaagtaatattttgtctgacaatcctgacttttcagatgaagcagacataataaaagaaggaatgattcgatttagagtattgtcaactgaagaaagaaaggtgtgggctaacaaagccaaaggagaaacggcaagtgaaggaactgaagcaaagaagcgaaaacgtgtggttgatgaaagtgatgaaacagaaaaccaggaagaaaaagcaaaagagaacctgaatttgtctaaaaagcagaaacctttagatttttctacaaatcagaaactatcagcttttgcatttaagcaggagtaaaggaagaaagtgaccctagggaagtaatggatttttttttactcatctttgaatatagactcgagtctttgggaaactcattatatatatattttttaaagagtttgaagcaactgtttgtctttataagataatgtagtaattatattggtgtaggtaacaggacatatgtaaaaactatcatctttgcagattactctgcctccaaatgcagggcctttcagagatgcattgtgattgtaattactgagttgaagctccaaccaatttgaatttgtttcttaaccttgaaaaatcattaaagccaaggtattaaaacctttgtgcattaataccttctaggggtttggttcatttggtttttgtcatgtgcaaggaaggacaatagtcctctttccaagtgtgttagcatagacttctctatatgtttctactagacctaggggatgacgtcttttaataatactggccctaaacatgtaaataatcttgtaggtgagactttttcttttgtgtttcggaaatttcctatgtggctttcagttgtctgtttgtatagcctggatttttttgaggtaaatgaaactttctcatttgtatatttggcttgatatggtcttaatattatctttccacgaaatggatatatttctagaaaatatatatttactaccataatttctaccaccacccccattttgctctgcattatacacagtagagaagaactgaagacactgctgtgacagtattgcagtccaaggcatcatgtgctcttggtgggatactctgattatcagcatcaacagtactttactgagcaagactttgaaggcctgagaagagagcaaagttatggaaagtatttaactcttattttatattgaacaaacaaggtttaatcatgtcatacatttttggttttctaagcagagactaatacaaatgcagccacataaaggcagtgtactgggggtgggagggaaggaaacaatcacataaaatcagctgactcaaaattgaggatagttaataggttgaaagggaaaaagtatgttgaaaatttagacataaatgaaccaagaatattccttatctggtgatgattaaagttaggaaaacatacattttttattttttaattagtagctgctatcagagacattatagcacagtggttatgagcacagattccaaagccagattacctaggttcggagacccgcttctctacctactactaatagttgggtcatgttgggccggtgacccaaattctagccttcattcactcatctgtaaaatggatataatgatagtacctactttataggttgttatgagaattgaatgaaatgaaagcccttagtttctgacacatagtaatcttttatataaatgttagttactattctgataatgatgatgctgttggttatttcatcttgctttgtcattaggtttgattctgaatactatacaaactaattttgatttcaagatcttaagtaaaggtttatttatagtacattggaaagcatgtttgtagacatgtattttgtgtttggttcctcaacttgctttgtatatattttataatactaggttgatataaaagtaaatgcagtttcgccatttcagtggcaaaaaccgcgatttcttttgtgccaacctaatgcttaaggatataatctgtgtatattgtatttcagattcatagcaacctaataacaaggatttacaaaagggtttttacttccctacttttttttggctgaaggaaggtttttgtattgacttggtttaacttacaaatcagaactttgaaaccaagaaacattatccttatttctctgctatataatagtaaacctgtttttttccagtgttcttttttttttttccagagaattgggactgaatagtatgaaagtgaaaatggaaataaattaattattaatcatcatcatatcaataatattgcctacttgagcttattgtatactatagaaaattgacatatacttaattttattctccaaaagcaaaaactcctcacaggaggttactttacagatttattttggagaacaagtgaataggcactggggttatgtgcagctctggggactgtgctatgatctaaagcctctcatatctgtgcagcaacctggggtgagtcactgtcactaacatggaacagatgccaggtagtccctttggacaaaaggatgaggcccatccatgtagaaagcatcttaatcagtgactgtcttatgggccctctttgtttcccatctgttttattatcagaatatataattttcccccaagttttcatcttgaatctctcaaacctacagaaaatttgaaatttgacagtaagcacctgtatatccttcctctagtttgtcttattgttgacattttatcatgtatgctttatagacaggatttttcctgaaccatttggaatatgcatatacttcatccctcagttcccagcatgtaccctaagaataaagattttcttctgcata

SEQ ID NO: 170284 - DNA, 3390 bp, Artificial Sequence
  derived and/or modified sequence
atgccagctaccaggaagccaatgcggtacggccataccgaaggccatactgaggtgtgtttcgatgactccggttctttcatagtaacctgcggctcagatggcgatgtgcggatttgggaagatctcgatgatgatgaccctaagttcattaacgtgggagagaaggcttatagctgcgcgctgaaatcaggcaagctcgtcacagcagtgtctaataatacaattcaagtacacacttttcccgaaggcgtgccagatgggatcctaactagatttacgactaacgctaaccacgtggtgtttaatggtgatggaaccaaaatcgctgccgggtcatctgatttcctcgtgaaaattgtcgacgtgatggactccagccagcagaagaccttcaggggtcatgacgcccccgtcctgtcactttcctttgatcctaaagatatctttcttgcgagcgctagctgtgatggcagcgtgcgtgtctggcaaatcagcgatcaaacatgcgccatcagctggccattattacaaaagtgcaatgatgttatcaatgctaagtctatctgcagactagcctggcagcccaagtccggcaagctgttggcgatcccagtcgagaagagcgtaaaactatatcggagggagtcgtggagccatcagtttgacctaagcgataatttcatttcccagaccttgaatatcgttacttggagtccctgcgggcagtacctagcagctggtagtattaatggcctgattattgtgtggaatgtcgagacaaaagattgtatggagcgggtgaaacacgaaaaagggtacgcaatatgcggcctggcctggcacccaacctgcggaagaatcagctatacagacgctgaggggaacctaggtctcttagagaacgtttgtgaccccagtggcaaaactagctctagcaaggtgagtagccgcgtagaaaaggactataacgatctgttcgacggagatgacatgtctaacgcaggggatttccttaatgataacgctgtggaaattcccagctttagtaagggcattattaacgacgatgaagatgacgaggatctgatgatggccagcgggagacctcgtcagaggtctcatattctcgaagatgacgaaaattctgttgacatttccatgctgaagacagggtctagcttgctcaaggaagaggaagaggatggccaagagggctctatccataaccttccactcgtgactagccaacgacctttttacgatggacctatgccgactcctcgccagaagccatttcagtccggatccacacccttacacctcacccatcgctttatggtttggaattctatcggcattattaggtgttataatgacgagcaagataacgcgattgacgtggagttccacgacacctccattcaccacgccacacacctgagtaacaccctgaactatacgatcgctgacttaagccacgaagcaatcctcctggcttgcgagagtacagacgaattagctagcaagcttcactgtcttcacttctcttcctgggacagcagcaaagaatggatcatcgacctgccacagaacgaggacattgaggctatctgcctaggccagggctgggctgccgctgccaccagtgcacttctgctgcgtttgttcaccataggcggcgtgcagaaagaggttttttcattggctgggccagtggtgtcaatggccggacatggggagcaactttttatcgtctatcatcggggcaccggattcgatggtgaccagtgcctcggggtccagttgctggaattgggaaagaagaaaaaacagatcctgcacggagatccactccctctcacccgtaagtcttacctggcctggatcggattcagcgccgaaggcacaccatgttacgtcgattctgagggaatagtgcggatgttgaatcgaggattgggcaacacttggacaccaatctgcaacactcgtgaacactgcaaggggaaaagtgaccactattgggtggtgggcatacatgagaacccccagcaacttcgatgtattccatgcaaagggtcccggttcccacctaccttaccccggcctgccgttgctattcttagcttcaaactcccctactgccagatagcaacagagaagggtcagatggaggagcaattttggcgcagcgtgatctttcataatcacctggactatctcgccaagaatgggtacgagtatgaggagtccaccaagaaccaggccaccaaagaacagcaggagctgttgatgaagatgttagccctcagttgcaagctggagcgcgaattcagatgtgtggagttggcagacctaatgactcagaatgccgtgaaccttgctataaagtacgcatccaggtctcggaaacttatcctggcacagaagctgtcggaactggccgtcgaaaaggcagccgagcttacagccactcaagtggaagaagaggaagaggaagaagatttcagaaagaagcttaacgctggttatagcaatactgctaccgaatggagccagcctcggttccgcaaccaggtggaagaggatgcagaggactcaggcgaggccgatgatgaggaaaagcccgaaattcataaacccggccagaattccttttccaagtcaaccaattcttccgacgttagcgcaaagtccggtgctgtgactttttctagtcaaggtagggtcaacccttttaaagtgagtgcatcctctaaagaacccgcaatgtctatgaattccgcccgctctacaaacatattggacaatatggggaaaagctcaaagaagtcaacagctctgtcaaggactaccaacaatgagaaaagtcccattattaagcccttgattccaaagccaaagccaaaacaagctagtgccgcgtcctactttcaaaagcgcaattcccagaccaacaagaccgaagaagtgaaggaggagaaccttaaaaacgttttatctgaaacccccgcgatctgcccccctcagaatacagagaatcagcgtccaaagacgggtttccagatgtggctggaggagaacagatccaacattctgtctgacaaccctgacttttctgatgaggcggatattattaaggaaggtatgatccgcttccgcgttctgagcactgaagagagaaaagtgtgggctaacaaggcaaagggtgagaccgcctcagagggcacggaggcgaaaaaaaggaagcgagtcgtggatgaatctgacgaaacagagaaccaagaagaaaaagctaaggaaaatcttaacttgtccaaaaagcaaaagccactcgatttctccaccaatcagaagctctctgcctttgccttcaaacaggagtag

SEQ ID NO: 170285 - DNA, 3390 bp, Artificial Sequence
  derived and/or modified sequence
atgcctgccaccaggaagcccatgagatatggccacacagagggccacacagaggtgtgctttgatgacagcggcagcttcatcgtgacctgtggcagtgatggagatgtgcgcatctgggaggacctggatgatgatgaccccaagttcatcaacgtgggggagaaggcctacagctgtgccctgaagagcggcaagctggtgacagctgtgagcaacaacaccatccaggtgcacaccttccctgagggcgtgcctgatggcatcctgacccgcttcaccaccaatgccaaccacgtggtgttcaatggagatggcaccaagattgctgctggcagcagtgacttcctggtgaagatcgtggatgtgatggacagcagccagcagaagaccttccggggccatgatgcccctgtgctgagcctgagctttgaccccaaggacatcttcctggccagcgccagctgtgatggctctgtgcgggtgtggcagatcagtgaccagacctgtgccatctcctggcccctgctgcagaagtgcaatgatgtgatcaatgccaagagcatctgccgcctggcctggcagcccaagagcggcaagctgctggccatccctgtggagaagtctgtgaagctgtaccgccgggagagctggagccaccagtttgacctgagtgacaacttcatcagccagaccctgaacatcgtgacctggagcccctgtggccagtacctggccgccggcagcatcaatggcctcatcatcgtgtggaatgtggagaccaaggactgcatggagcgggtgaagcatgagaagggctacgccatctgtggcctggcctggcaccccacctgtggccgcatctcctacacagatgctgagggcaacctgggcctgctggagaatgtgtgtgaccccagcggcaagaccagcagcagcaaggtgagcagccgggtggagaaggactacaatgacctgtttgatggagatgacatgagcaatgctggggacttcctgaatgacaatgctgtggagatccccagcttcagcaagggcatcatcaatgatgatgaagatgatgaggacctgatgatggccagcggccggccccggcagaggagccacatcctggaggatgatgaaaattctgtggacatctccatgctgaagacaggcagcagcctgctgaaggaggaggaggaggatggccaggagggcagcatccacaacctgcccctggtgaccagccagaggcccttctatgatggccccatgcccaccccccggcagaagcccttccagagcggcagcacccccctgcacctgacccaccgcttcatggtgtggaacagcatcggcatcatccgctgctacaatgatgagcaggacaatgccattgatgtggagttccatgacaccagcatccaccacgccacccacctgagcaacaccctgaactacaccatcgctgacctgagccatgaggccatcctgctggcctgtgagagcacagatgagctggccagcaagctgcactgcctgcacttcagctcctgggacagcagcaaggagtggatcatcgacctgccccagaatgaagatattgaggccatctgcctgggccagggctgggccgctgctgccaccagcgccctgctgctgcggctcttcaccatcggcggcgtgcagaaggaggtgttcagcctggccggccctgtggtgtccatggccggccatggagagcagctgttcatcgtgtaccaccggggcactggatttgatggagaccagtgcctgggcgtgcagctgctggagctgggcaagaagaagaagcagatcctgcatggagaccccctgcccctgaccaggaagagctacctggcctggattggcttctctgctgagggcaccccctgctacgtggacagcgagggcatcgtgaggatgctgaacagaggcctgggcaacacctggacccccatctgcaacacccgggagcactgcaagggcaagagtgaccactactgggtggtgggcatccacgagaacccccagcagctgcgctgcatcccctgcaagggcagccgcttcccccccaccctgcccaggcctgctgtggccatcctgtccttcaagctgccctactgccagatcgccacagagaagggccagatggaggagcagttctggaggagcgtcatcttccacaaccacctggactacctggccaagaatggctatgaatatgaggagagcaccaagaaccaggccaccaaggagcagcaggagctgctgatgaagatgctggccctgagctgcaagctggagcgggagttccgctgtgtggagctggccgacctgatgacccagaatgctgtgaacctggccatcaagtatgccagccgcagcaggaagctgatcctggcccagaagctgtctgagctggccgtggagaaggctgctgagctgacagccacccaggtggaggaggaggaggaggaggaggacttcaggaagaagctgaatgccggctacagcaacacagccacagagtggagccagccccgcttcaggaaccaggtggaggaggatgctgaggacagcggggaggctgatgatgaggagaagccagagatccacaagccaggccagaacagcttcagcaagagcaccaacagcagtgatgtgtctgccaagagcggggctgtgaccttcagcagccagggccgggtgaaccccttcaaggtgtctgccagcagcaaggagcccgccatgtccatgaacagcgcccggagcaccaacatcctggacaacatgggcaagagcagcaagaagagcacagccctgagcaggaccaccaacaatgagaagagccccatcatcaagcccctcatccccaagcccaagcccaagcaggccagcgctgccagctacttccagaagaggaacagccagaccaacaagacagaggaggtgaaggaggagaacctgaagaatgtgctgtctgagaccccagccatctgccccccccagaacacagagaaccagaggcccaagacaggcttccagatgtggctggaggagaacagaagcaacatcctgagtgacaacccagacttcagtgatgaggccgacatcatcaaggagggcatgatccgcttccgggtgctgagcacagaggagaggaaggtgtgggccaacaaggccaagggggagacagccagcgagggcacagaggccaagaagaggaagagggtggtggatgaaagtgatgaaacagagaaccaggaggagaaggccaaggagaacctgaacctgagcaagaagcagaagcccctggacttcagcaccaaccagaagctgagcgcctttgccttcaagcaggagtag

SEQ ID NO: 170286 - DNA, 3390 bp, Artificial Sequence
  derived and/or modified sequence
atgcccgccacccggaagcccatgcggtacggccacaccgagggccacactgaagtctgctttgatgatagcgggagttttatcgtaacttgtggtagcgacggagatgtgcgtatctgggaagacctggacgatgacgacccaaaattcatcaatgtgggcgagaaagcttatagctgtgctcttaagtcaggtaaactcgtcacagctgtatcgaataatacaattcaggtgcacacatttcctgagggagtcccagacgggattcttacgaggttcaccacgaatgcgaatcacgtagtgttcaacggagacggtaccaagattgcggccggctcctccgattttctggtgaagatcgtcgacgttatggattcgagccagcagaaaaccttccgagggcatgatgcacccgtgttgtcactgtccttcgacccaaaggatatatttctcgcgagcgcctcttgtgatgggagcgtgagggtttggcagatttcagatcaaacctgcgctattagctggcctctattgcagaaatgtaacgacgtgattaacgctaaatcaatttgccgcctggcttggcagccaaagtctggaaagctgctggcaattcctgtggagaagtcagtaaaactgtacaggcgcgagagctggtcccaccagtttgatctatccgataactttattagtcagacgctaaatatcgtaacatggagtccatgcggccagtatctcgctgctggctccattaatggtctcattatcgtgtggaatgtggagaccaaagattgcatggaacgcgtgaaacacgaaaaaggttatgccatatgcgggctggcttggcaccctacatgcggccgtatttcctacacagacgctgagggaaacctggggctgctggaaaacgtgtgcgacccatctggcaaaaccagctcatctaaagtgagttccagggtagaaaaagattataacgacctgttcgacggagatgatatgtcaaacgcaggcgacttcctcaacgacaacgctgtggagatccccagctttagcaaaggtataattaacgatgatgaggacgatgaagacctcatgatggctagcggaaggcctcggcagagaagtcatattctggaggatgacgagaactccgtcgacattagtatgctcaaaacaggtagctcattactgaaagaggaggaggaggatggccaggaggggtctatacacaacctgcctcttgtgacctcgcagcgcccattttacgacggcccaatgcccaccccgcgacaaaaaccattccagtcaggttcaacacccctccatctaactcacaggttcatggtgtggaactctatcggaatcattagatgttataacgacgaacaagacaacgctatagatgtcgaatttcatgatactagcattcaccacgctactcacctttctaacaccctaaattatactatcgctgatctctcacacgaagcaattctgctggcttgtgagtccacggatgaattagcatctaaactgcattgccttcacttctcaagctgggactcatctaaggagtggattattgacctcccccagaatgaagacatagaggccatatgcttaggccaggggtgggccgccgctgctacgtccgcactactgctgcgtttgttcactatcggcggcgtccagaaggaggtcttcagtctggccggcccggtcgtgtctatggcagggcacggagaacaactcttcatagtatatcaccgtggaacagggttcgatggcgatcagtgcttgggggtccaactgctcgaactgggaaaaaaaaaaaaacaaatcctgcacggagatccactaccactgacccggaaaagttacctcgcttggatcgggttcagcgccgaaggtaccccctgctacgtggactctgagggcattgtgcggatgcttaatcggggattagggaatacttggacaccaatttgtaacaccagagaacactgtaaaggcaagtccgaccactattgggtggtgggcattcacgaaaatcctcagcaattgcggtgtattccatgtaaggggagcaggttcccacctactctcccaaggccggctgtggccatcctgagcttcaaacttccttattgccagatcgctactgaaaaaggccagatggaggagcaattctggcggtccgtgatctttcacaatcacctcgattatcttgctaagaatggttacgaatacgaggaatcaactaaaaaccaggcaacgaaagagcagcaggagctcctgatgaaaatgctagctctgagttgcaaactcgaacgggagtttaggtgcgttgaactggccgatctgatgacccagaatgctgttaatttagcgataaagtacgcttcccgttcccgaaagttgatcctggctcagaagctcagcgagctcgcagtggagaaggcagccgaattgacagctacccaggtggaggaggaggaggaagaagaggactttcgtaaaaaactaaatgcaggatattccaataccgctacggagtggtcccagcccaggttccgaaatcaagttgaagaggatgccgaagacagtggagaggcagacgatgaggagaagcccgagattcacaaacctggtcagaactccttcagtaagtctacaaatagctctgacgtttccgctaagtccggagccgttactttcagctctcaggggagagttaatccctttaaagttagcgcatcatccaaagaacctgccatgtctatgaactccgcaagatctacaaatattttggacaacatggggaaatcctctaaaaaatctactgccctctctagaactaccaacaacgaaaagtcccccataattaaacccttgataccgaagccgaaaccaaaacaggccagtgctgccagttacttccagaagaggaattcacagacaaataagacagaagaggttaaggaagagaacctgaagaatgtgctcagtgagactccagcgatctgccctcctcagaacacagagaaccagcgccctaagacaggtttccaaatgtggctcgaagagaatcggtccaatatcttgagcgataatccagatttctcagatgaggccgatatcataaaagaggggatgattcgcttccgcgtactgagtaccgaggaaaggaaggtgtgggcaaacaaggccaagggagaaactgcttcagaggggacagaagccaaaaagagaaagagggtggtagacgagtcggatgaaacagagaatcaggaagagaaagcgaaagagaacctgaatctgagtaaaaaacagaaacccttagactttagcacaaaccaaaaactgtccgcttttgctttcaaacaggagtag

SEQ ID NO: 170287 - DNA, 3390 bp, Artificial Sequence
  derived and/or modified sequence
atgccggcaacccgcaagccaatgaggtacgggcacaccgaaggccacactgaagtctgcttcgacgacagcgggagcttcatcgtaacgtgcgggagtgatggggacgtgcggatatgggaagacttggatgacgacgaccccaaattcattaatgtgggagaaaaggcgtattcatgcgctctcaaatccggcaaacttgtgaccgcagtcagtaacaacactattcaggttcatacttttcccgaaggcgtgcccgacgggattcttaccagatttactacaaatgccaatcatgtggtgttcaacggcgatgggacaaagatcgccgcaggtagcagcgattttcttgttaaaattgttgacgttatggatagttcccagcaaaagacctttagggggcacgacgcccctgtactgtccttgtcatttgaccccaaggacatttttctggcatccgcaagctgtgacgggagtgtgagggtttggcagatttcagaccagacatgcgccattagctggccactgctgcagaagtgcaacgacgtcataaacgcaaagtctatctgccggctcgcgtggcagcccaagagcggcaagctgctggcaatcccagtcgaaaaaagcgtcaagctgtaccgcagggaaagctggtcgcaccaatttgatttgagcgataactttatatctcagactctgaatatcgtaacttggtccccctgtggccagtatttggctgctgggtcaatcaacggattgattatcgtgtggaacgtcgagacaaaggactgtatggagcgggtcaagcacgaaaagggctatgctatctgcggccttgcctggcatcccacatgtggcagaatttcatacacagacgctgagggtaatctgggcctgctggagaacgtgtgcgacccatccggcaagacatcatcctctaaggtgagctcccgagttgaaaaagattataatgatctgtttgacggcgacgatatgtctaatgctggggatttcttgaacgataacgccgtggaaattccttcctttagcaaggggattatcaatgatgacgaggacgatgaggatctcatgatggcctcaggtaggccacgccagcgtagtcacatcttggaggacgatgaaaattctgtagacatttccatgctcaagactggatcatctcttcttaaagaagaggaggaagacggccaagagggatccatccataacctaccgctcgtcacatctcagcgcccattctatgatggccctatgcccaccccacgccaaaagccatttcagtccggcagcaccccgctgcacctcacgcaccgctttatggtctggaattccattggaatcattaggtgctataatgatgaacaggacaatgccatcgacgttgaattccacgacacgagtatccaccacgccactcacctttcaaatacattgaattataccatagccgacctctcacacgaggccatcctattggcttgcgaatcgactgatgagctggcttcaaaattgcactgtctgcactttagttcatgggactcatccaaggagtggattattgatctcccccagaacgaggatatcgaagccatatgtttggggcaaggttgggctgccgctgctacatccgccttactccttaggttatttaccattggaggggtccagaaggaggttttctcattggcaggccctgttgttagcatggctggccacggagaacagctctttattgtttaccacaggggaactggattcgacggagaccagtgccttggtgtgcaattattggagctcgggaagaaaaaaaaacagattctccacggcgaccccctgcccttgactaggaaaagctatctagcatggatcggattctctgctgaaggaaccccctgctacgtggatagcgagggtatcgttcggatgttgaacagaggcctgggtaacacgtggacaccgatctgtaacacaagggaacactgcaagggcaaatctgaccactactgggtggtcggaatacacgagaatccacaacaactccgatgcatcccttgtaagggatctcgctttccacctaccttacctagacccgcagtggccattcttagtttcaaattgccctactgtcagatagccacagagaaaggtcagatggaggagcaattctggcggtcagttatattccacaatcatctggactatctggccaaaaacggctacgagtacgaggaaagtacaaaaaatcaggcgactaaggaacagcaggaattactgatgaagatgctcgccctgagctgcaagctggagcgcgagtttagatgtgtggaattggctgacttaatgacgcaaaatgccgtcaacttggcaattaaatacgcctcccgcagccgcaagctgatccttgcacaaaagctgtccgagttagccgttgaaaaggctgcggagctgactgctacccaggtggaggaagaggaagaagaggaggactttcgtaaaaagcttaacgccggatattctaacaccgctaccgagtggagtcagccaagatttcgtaatcaggtggaagaagatgctgaagattccggggaagctgacgatgaggaaaaacccgaaatccacaagcctggccagaactctttttccaagagcaccaattcttctgacgtgtctgctaagtcaggagccgtgacattcagctcacagggccgagtcaatccgttcaaagtgtccgctagctccaaggagccagctatgagcatgaactccgcgaggagcacaaatatcttagacaacatgggcaaaagcagtaaaaaaagcaccgccctgagtcgcactactaacaacgagaaaagtccgatcatcaagccactgatccctaaacccaaaccaaaacaagccagtgcagccagttattttcagaagagaaactcacagacaaacaaaactgaagaggttaaagaagaaaatcttaaaaacgtgctcagcgaaactcctgctatttgcccaccccagaacactgagaatcagaggcccaaaaccggctttcagatgtggctggaggagaataggtctaatattctgagcgataatcccgatttttccgacgaggccgatatcatcaaagaaggaatgattcgcttccgggtgctgagcactgaagagcggaaagtgtgggccaataaggccaaaggcgagacagcttctgagggcaccgaggccaagaagcgaaaaagggttgtcgacgaaagcgacgagacggaaaatcaggaggaaaaagccaaggaaaacctgaacctgtctaagaagcagaaacccctcgatttttcaaccaatcagaagctcagcgctttcgccttcaagcaggaatag

SEQ ID NO: 170288 - DNA, 3468 bp, Artificial Sequence
  derived and/or modified sequence
gcgagccgaagcgcgggaagcagctcttgtggatcctcagtggcggaggctcggtcacccggataggtaaaggaaaacatgcctgccacacggaagccaatgagatatgggcatacagagggacacacggaggtctgttttgatgattctgggagttttattgtgacttgtggaagtgatggtgatgtgaggatttgggaagacttggatgatgatgatcctaagttcattaatgttggagaaaaggcatattcatgtgctttgaagagtggaaaactggtcactgcagtttctaataatactattcaagtccacacatttcctgaaggagttccagatggtatattgactcgcttcactacaaatgcaaaccatgtggtctttaatggggatggtactaaaattgctgctggatctagtgattttctagtcaaaattgtggatgtgatggatagcagccaacagaaaacatttcgaggacatgatgcccctgttttaagtctttcctttgatcctaaggacatctttctggcatcagctagttgtgatggatctgtcagagtgtggcaaatttcagatcagacatgtgctattagttggccactgctacaaaaatgcaacgatgtgataaatgcaaaatcaatctgcagacttgcttggcagccaaaaagtgggaagttactggcaattcctgtggaaaaatctgttaagctatatagaagagaatcttggagtcatcaatttgatctttcagataatttcatctctcagaccctcaatatagtaacctggtctccctgtgggcaatatttagctgcaggtagtattaatggtctaatcatagtttggaatgtggaaaccaaagactgcatggaaagggtgaaacatgagaaaggttatgcaatttgtggtctggcatggcatcctacttgtggtcgaatatcgtatactgatgcggaaggaaatctagggcttctagagaatgtttgtgaccccagtggaaagacatcaagcagtaaggtatctagcagagtggaaaaggattataatgatctttttgatggagatgatatgagtaatgctggtgattttctaaatgacaatgcagttgagatcccttctttttcaaaagggattataaatgatgatgaggatgatgaagacctcatgatggcttcaggtcgtcctagacagcgaagtcacatcctagaagatgatgaaaactcagttgatatttcaatgctaaaaactggttctagtcttctcaaagaggaggaggaagatggtcaagaaggcagcattcacaatctaccacttgtaacatcccaaaggccattttatgatggacccatgccaactccccggcaaaagccatttcagtcaggttctacaccgttgcatctcactcacagattcatggtgtggaactctattggaattattcgctgctataatgatgagcaagacaatgccatagatgtggagttccatgatacctccatacaccatgcaacacacttatcaaacactttgaattatacaatagcagatctttcccacgaagctattttgttggcatgtgaaagcactgatgaactagcaagcaagcttcactgcctgcactttagttcttgggattcaagcaaagagtggataatagacttgcctcagaatgaggatattgaagccatatgtctcggtcaaggatgggctgctgccgctactagtgccctgcttcttcgattgtttactattggaggggttcaaaaagaggtattcagccttgctggacctgtggtgtcaatggcaggacatggagaacagcttttcattgtttatcacagaggtacaggatttgatggggatcagtgccttggagttcaactgctagagctggggaaaaagaaaaaacaaattttgcatggtgaccctcttcctcttacaaggaaatcctaccttgcatggattgggttttcagctgaaggtaccccttgttacgtggattcagaaggaattgttcgaatgcttaacagaggacttggtaatacgtggactcctatatgtaatacaagagagcactgcaaaggaaaatctgatcactactgggtggttggtatccatgaaaatccccagcaactaaggtgcattccttgtaaaggttctcggtttcccccaacccttccacgccctgctgttgctatattatcctttaagcttccttactgtcagattgcaacagagaaaggacaaatggaggagcaattttggcgttcagttatatttcacaaccaccttgattatttagctaaaaatggttatgaatatgaagagagcactaaaaatcaagcaacaaaagagcaacaggaacttttaatgaaaatgcttgcgctttcttgtaaactggagcgagaattccgttgtgtggaacttgctgatctaatgactcaaaatgctgtgaatttagccattaaatatgcttctcgctctcggaaattaatactggctcaaaaactaagtgaactggctgtagagaaggcagccgaattgacagcaacccaggtggaagaggaagaagaagaagaagatttcagaaaaaagctgaatgctggttacagcaatactgctacagagtggagccaaccaaggttcagaaatcaagttgaagaagatgctgaggacagtggagaagctgatgatgaagaaaaaccagaaatacataagcctggacagaactcgttttccaaaagtacaaattcctctgatgtttcagctaagtcaggtgcagttacctttagcagccaaggacgagtaaatccctttaaggtatcagccagttccaaagaaccagccatgtcaatgaattcagcacgttcaactaatattttagacaatatgggcaaatcatccaagaaatccactgcacttagtcgaactacaaataatgaaaagtctcccattataaagcctctgattccaaagccgaagcctaagcaggcatctgcagcatcctatttccagaaaagaaattctcaaactaataaaactgaggaagtgaaagaagaaaatcttaaaaatgtattatctgaaaccccagctatatgtcctcctcaaaacactgaaaaccaaaggccaaagaccgggttccagatgtggttagaagaaaatagaagtaatattttgtctgacaatcctgacttttcagatgaagcagacataataaaagaaggaatgattcgatttagagtattgtcaactgaagaaagaaaggtgtgggctaacaaagccaaaggagaaacggcaagtgaaggaactgaagcaaagaagcgaaaacgtgtggttgatgaaagtgatgaaacagaaaaccaggaagaaaaagcaaaagagaacctgaatttgtctaaaaagcagaaacctttagatttttctacaaatcagaaactatcagcttttgcatttaagcaggagtaa

SEQ ID NO: 170289 - protein, 192 aa, Artificial Sequence
  derived and/or modified sequence
MAGPQQQPPYLHLAELTASQFLEIWKHFDADGNGYIEGKELENFFQELEKARKGSGMMSKSDNFGEKMKEFMQKYDKNSDGKIEMAELAQILPTEENFLLCFRQHVGSSAEFMEAWRKYDTDRSGYIEANELKGFLSDLLKKANRPYDEPKLQEYTQTILRMFDLNGDGKLGLSEMSRIEAATLTSMSWMPF

SEQ ID NO: 170290 - DNA, 579 bp, Artificial Sequence
  derived and/or modified sequence
atggctgggcctcaacagcagcctccttatctgcacctggccgaactcacggcctcacagttcctcgaaatctggaagcacttcgatgccgacggcaatggttatattgaaggcaaagagctggagaacttctttcaggaactggagaaggctaggaagggctccggcatgatgagtaagagcgacaacttcggcgagaaaatgaaggaattcatgcagaagtacgacaagaatagcgacgggaagatcgagatggcagaactcgctcagatactccccactgaggaaaatttcctgctctgttttagacaacacgttgggagttccgcggaatttatggaagcatggcgcaagtatgacacagatcggagtggctacatcgaggctaatgaactgaaaggctttctgagtgacctgttgaagaaggctaacagaccttacgatgaacctaagctgcaagagtacacgcagaccatcctgcggatgttcgacctgaacggtgacggaaagctgggcctcagcgaaatgagccgaatagaggcagccactcttacttcaatgtcctggatgccattttag

SEQ ID NO: 170291 - DNA, 579 bp, Artificial Sequence
  derived and/or modified sequence
atggccggcccccagcagcagcccccctacctgcacctggccgagctgacagccagccagttcctggagatctggaagcactttgatgctgatggaaatggctacatcgagggcaaggagctggagaacttcttccaggagctggagaaggccaggaaaggaagtggcatgatgagcaagagtgacaactttggagagaagatgaaggagttcatgcagaagtatgacaagaacagtgatggcaagattgagatggccgagctggcccagatcctgcccacagaggagaacttcctgctgtgcttccggcagcacgtgggcagcagcgctgagttcatggaggcctggaggaaatatgacacagacaggagcggctacatcgaggccaatgagctgaagggcttcctgagtgacctgctgaagaaggccaaccggccctatgatgagcccaagctgcaggagtacacccagaccatcctgaggatgtttgacctgaatggagatggcaagctgggcctgtctgagatgagcagaattgaagctgccaccctgacctccatgtcctggatgcccttctag

SEQ ID NO: 170292 - DNA, 579 bp, Artificial Sequence
  derived and/or modified sequence
atggccggcccccagcagcagcccccctacctgcacctggccgagctcaccgcatcgcagttcctagagatctggaagcattttgatgccgacggcaatggatacatcgaaggaaaggaactcgaaaacttcttccaagagctggaaaaggcacggaaaggtagcggtatgatgtccaagagcgataactttggtgagaagatgaaggagttcatgcaaaaatacgacaagaattcggatgggaaaatagagatggctgaattagctcaaatactaccaacagaggaaaacttcctactatgcttccgacagcacgtgggcagttccgctgagttcatggaggcttggagaaagtacgatacagatcgctccggctacattgaggccaacgaactgaaggggtttctgtcagacctactgaaaaaagctaacaggccttacgacgaaccgaagctgcaggagtatacccagactatcttaagaatgtttgacctgaacggtgatgggaaactggggctgtctgaaatgtcgcgaattgaggccgcaaccttaacatccatgtcatggatgcctttttag

SEQ ID NO: 170293 - DNA, 579 bp, Artificial Sequence
  derived and/or modified sequence
atggccggaccccaacagcaaccaccctatctacacctagccgaactgaccgcatcacagtttctcgaaatttggaaacactttgatgcagatggaaacggatatatcgagggtaaagagctggagaattttttccaggaactagaaaaggcgcgaaaagggagcggcatgatgtccaagagcgacaatttcggggagaagatgaaggaatttatgcagaaatacgataaaaactccgatgggaaaatagaaatggcggaactggcccagattttgcctactgaggagaattttctgctgtgtttcaggcagcatgttggctccagcgccgagttcatggaagcatggaggaagtatgacactgaccgcagtggatacattgaagccaatgagctcaagggttttctgtccgatctcctcaaaaaagccaaccgcccttatgacgagccgaagctacaggaatacacccaaacgatcctgagaatgttcgatctgaatggtgacggcaagctgggtttgtctgaaatgagccggatcgaagctgcaactcttacctctatgtcatggatgccattttag

SEQ ID NO: 170294 - DNA, 1373 bp, Artificial Sequence
  derived and/or modified sequence
gcacaaccccagcgcgagtgccagagcccagccggcgcggagcgggagcggtgcaggctgaggtctccgagcggctcgccatggctggcccgcagcagcagcccccttacctgcacctggccgagctgacggcgtcccagttcctggaaatatggaagcactttgacgcagacggaaatgggtatattgaaggtaaagagctagaaaactttttccaagagctggagaaggcaaggaaaggctctggcatgatgtcaaagagtgacaactttggagaaaagatgaaggagttcatgcagaagtatgataaaaactcagatgggaaaatcgagatggcagagctggcgcagatcctgccaaccgaagagaacttccttctgtgcttcaggcagcacgtgggctccagcgccgagtttatggaggcttggcggaagtacgacacagacaggagtggctacatcgaagccaatgagctcaagggattcctgtcagacctgctgaagaaggcgaaccggccgtacgatgagcccaagctccaggaatacacccaaaccatactacggatgtttgacttgaacggggatggcaaattgggcctctcagagatgtcccggatagaagcggctacattgacgagcatgagctggatgcccttttgaaggatctgtacgagaaaaacaaaaaggaaatgaatattcaacagctcaccaactacagaaagagcgtcatgtccttggcagaggcagggaagctctaccgcaaggacctggagattgtgctctgcagcgagccccccatgtaaagtggggacgggggctgcttctccacctcccccaaaccctgcttctgctgccctgatgcgtctacccagactcagagaccgtgagcgccccgcccccacccctacagcctgcacacacctgcctgcagagcaggaaatgagagatagaggatgggcagctggggggctgtcctgagccccctgcacccacccctgcccaggcagtctttgctcagtggatcacacacatggaaggtgatgggggcatgggtggagggtccctaattctcttcgctgtgatgcatgagctccctcgctgtatgatttaggcttctatgtccaacagagtggactcttccctctcgctcccctctgccggtcccccatgccaccacccaccccaaacttccaggttccatccaccaccttgccaatggtgtagctgtcctctcagaactcctgtgtgtggaaggcacccgccctttccttgccttctttactcggcgtgctccttttctctttgggtttcttgtttaccaaagaagagtttacagacaataaaatggaaaggtcctgctgtggaaacttaccc

SEQ ID NO: 170295 - DNA, 579 bp, Artificial Sequence
  derived and/or modified sequence
atggccggcccccagcagcagcccccctacctgcacctggccgagctgaccgccagccagttcctggagatctggaagcacttcgacgccgacggcaacggctacatcgagggcaaggagctggagaacttcttccaggagctggagaaggccagaaagggcagcggcatgatgagcaagagcgacaacttcggcgagaagatgaaggagttcatgcagaagtacgacaagaacagcgacggcaagatcgagatggccgagctggcccagatcctgcccaccgaggagaacttcctgctgtgcttcagacagcacgtgggcagcagcgccgagttcatggaggcctggagaaagtacgacaccgacagaagcggctacatcgaggccaacgagctgaagggcttcctgagcgacctgctgaagaaggccaacagaccctacgacgagcccaagctgcaggagtacacccagaccatcctgagaatgttcgacctgaacggcgacggcaagctgggcctgagcgagatgagcagaatcgaggccgccaccctgaccagcatgagctggatgcccttctag

SEQ ID NO: 170296 - protein, 248 aa, Artificial Sequence
  derived and/or modified sequence
MAELDPFGAPAGAPGGPALGNGVAGAGEEDPAAAFLAQQESEIAGIENDEAFAILDGGAPGPQPHGEPPGGPDAVDGVMNGEYYQESNGPTDSYAAISQVDRLQSEPESIRKWREEQMERLEALDANSRKQEAEWKEKAIKELEEWYARQDEQLQKTKANNRVADEAFYKQPFADVIGYVTNINHPCYSLEQAAEEAFVNDIDESSPGTEWERVARLCDFNPKSSKQAKDVSRMRSVLISLKQAPLVH

SEQ ID NO: 170297 - DNA, 747 bp, Artificial Sequence
  derived and/or modified sequence
atggccgaattggatccttttggggcccctgcaggcgctcccggagggccagctcttgggaacggtgtcgcgggggccggcgaagaggatcccgcagcagcattcctcgcgcagcaggagagtgagattgctgggatcgagaacgacgaggccttcgctatcctggacggcggtgcccctggcccccaaccacacggagagcccccgggcggtcccgacgccgtagacggtgtgatgaatggtgagtattaccaggagtcgaacgggccaaccgactcttacgccgctatctcccaggtggaccgactgcagagtgagccagaatccatacgaaagtggcgggaagagcaaatggagagacttgaggcactggacgcgaactcccggaaacaagaagctgaatggaaggagaaagcgattaaagaactggaagaatggtacgccaggcaagacgagcaattgcaaaagacgaaggcaaacaatcgggtggccgatgaggccttttacaaacagccgtttgcagatgtaattggatacgtgaccaatattaatcacccttgttacagtctcgaacaggcggcggaagaggcctttgtcaatgacatcgacgaatcaagtccgggaaccgaatgggaaagggtggcacgcctgtgcgattttaatccaaaaagttctaagcaggcgaaagatgtcagccgcatgcgctcagtcctcattagcctgaagcaggcccctcttgtccactag

SEQ ID NO: 170298 - DNA, 747 bp, Artificial Sequence
  derived and/or modified sequence
atggccgagcttgacccttttggcgcgcccgctggggccccgggaggcccagctctgggaaacggtgtcgctggagccggcgaggaagacccagccgcagcattcctggcccagcaagagtctgagattgccggcattgaaaacgatgaagcctttgcaatattggatggtggagccccggggccgcagccccacggtgagcctcccgggggacccgacgcagtcgatggagtcatgaacggcgaatactatcaggagtccaacgggccaaccgacagttatgccgctatatctcaggttgatcgcctgcaatcagagcctgagagcatcaggaaatggagagaagagcagatggagaggctagaggcactggacgctaattcccgtaaacaggaggcagagtggaaggagaaggctattaaagagttggaggaatggtacgctcgtcaggatgagcagctgcaaaagaccaaggccaataatagggttgccgacgaggccttttataagcagccatttgctgacgtcattggttacgtcaccaatattaaccacccttgctactcgcttgaacaggctgctgaagaggcttttgtcaacgacattgacgagagctctccgggaacggagtgggagcgagtcgcgcggttatgtgatttcaacccgaagtcttcaaaacaggcaaaagatgtcagccggatgcgctccgtgctgatatccctgaaacaggcgccactcgtccactag

SEQ ID NO: 170299 - DNA, 747 bp, Artificial Sequence
  derived and/or modified sequence
atggccgagctggacccctttggagccccagctggggcccctgggggccctgccctgggcaatggagtggccggggccggggaggaggaccctgctgctgccttcctggcccagcaggagagcgagattgctggcattgaaaatgatgaggcctttgccatcctggatggaggagcccctggcccccagccccatggagagcccccaggcggcccagatgctgtggatggagtgatgaatggagagtactaccaggagagcaatggccccacagacagctatgctgccatcagccaggtggaccggctgcagagcgagcctgagagcatcaggaagtggagggaggagcagatggagcggctggaggccctggatgccaacagcaggaagcaggaggccgagtggaaggagaaggccatcaaggagctggaggagtggtacgcccggcaggatgagcagctgcagaagaccaaggccaacaacagagtggctgatgaggccttctacaagcagccctttgctgatgtgattggctacgtgaccaacatcaaccacccctgctacagcctggagcaggccgctgaggaggcctttgtgaatgacattgatgagagcagccctggaacagagtgggagcgggtggcccggctgtgtgacttcaaccccaagagcagcaagcaggccaaggatgtgtccaggatgaggtctgtgctgatcagcctgaagcaggcccccctggtgcactag

SEQ ID NO: 170300 - DNA, 747 bp, Artificial Sequence
  derived and/or modified sequence
atggccgagctggaccccttcggcgcccccgccggcgcccccggcggtccggccttgggtaacggagtggcaggtgcaggcgaagaggacccagccgcggccttcttagcccagcaggaatccgaaatagcaggcatagagaacgacgaagcctttgccatcctggatggcggggcaccagggcctcaaccacatggagaaccacctggtgggcccgatgctgttgacggggtgatgaacggggagtactaccaggagtccaatggtcccactgattcctatgcagccatctcccaggtcgaccgcttgcaatcagagcctgaaagcattcggaaatggcgcgaagagcagatggagagactggaggctctcgacgccaacagtaggaagcaggaagccgaatggaaagaaaaagcaattaaggagcttgaggaatggtacgctagacaggacgaacagctacagaaaacaaaggcgaataaccgcgtcgccgacgaggcgttctataagcaacctttcgctgacgtgatcggctacgtgaccaatatcaaccacccctgttattctctcgaacaggcggccgaggaagcatttgtgaacgatattgatgaatcttctcctggtaccgagtgggaacgagtggccaggctgtgcgatttcaatcctaagtcaagtaaacaggctaaggacgtgagccggatgagatctgtattaatttcactgaaacaggccccattggtgcactag

SEQ ID NO: 170301 - DNA, 747 bp, Artificial Sequence
  derived and/or modified sequence
atggccgagctggaccccttcggcgcccccgccggcgcccccggcggccctgccctgggaaacggagttgctggggccggagaagaagatcctgctgctgccttcctcgcccagcaggaatccgagatagcaggaattgagaacgacgaggcttttgccatcctcgatggtggtgcgcccggaccacaaccccacggcgaaccaccaggagggccagatgcagtggacggtgttatgaacggagagtattaccaggaatctaacggccccaccgactcctatgccgctatcagccaagtggatagattgcaatcggaaccggagagtatcaggaagtggcgggaggagcaaatggagcgtctcgaggccctcgatgcaaattccaggaaacaggaagctgagtggaaggagaaggcaatcaaggagctcgaggaatggtatgctaggcaagacgagcagctccagaaaaccaaggcaaacaacagagtggctgatgaagcgttttacaagcagcctttcgccgacgtgatcgggtacgtgactaatattaatcacccctgctactcattagaacaagcggcagaggaggcattcgtgaatgatattgacgaaagttcaccagggactgagtgggaaagggttgctcggttgtgtgacttcaatcccaagagtagcaaacaggccaaggatgttagtaggatgaggtctgtccttatcagcctgaaacaggccccccttgttcactag

SEQ ID NO: 170302 - DNA, 747 bp, Artificial Sequence
  derived and/or modified sequence
atggccgaactggacccattcggtgcccctgccggagctcccggtgggcctgctctgggaaatggcgtagcaggcgctggagaagaggaccccgctgccgctttcctggcacagcaggagagcgaaatagccggaattgaaaacgacgaggcctttgctatcctggacggcggagcgcctggaccccaaccccacggagagcctcctgggggtccagacgccgtggacggagtcatgaatggtgagtactaccaagaatccaatgggccaaccgacagttacgctgccataagccaggtggaccggcttcagagcgagccagaatctattcggaagtggcgcgaggaacagatggagcgactggaagcattggatgctaactcacgcaaacaggaggctgagtggaaagaaaaagcaatcaaggagcttgaggagtggtatgccaggcaagacgagcagttacaaaagacgaaggcaaacaacagggtggcagacgaagcgttctacaagcaaccgtttgccgacgtgattggctatgtcaccaacattaatcatccgtgttactcactggagcaagctgctgaagaagcttttgtgaatgatattgacgagtcctcaccaggaactgagtgggaacgcgttgccagactctgcgatttcaatccgaaatcatcaaaacaagccaaggacgtgtctcgaatgcgttctgtcctaatctccctgaagcaggccccactggttcattag

SEQ ID NO: 170303 - DNA, 747 bp, Artificial Sequence
  derived and/or modified sequence
atggccgagttggacccctttggtgcccctgctggcgcaccaggagggcctgccttagggaatggagtcgcgggagccggtgaagaggacccagctgccgctttcctggctcagcaagaatccgaaattgccggaattgagaatgatgaagccttcgccattctggacggtggggctcccggaccacaaccccacggtgagccccctggcggacctgatgctgtggatggggttatgaacggagaatactatcaggagtctaacgggccaactgacagctacgctgccatcagtcaggtcgaccgactgcagagcgagccagagtcaatcagaaagtggcgggaggaacaaatggaaagactggaggcgctggacgctaatagccgaaaacaggaagccgagtggaaggaaaaagcgatcaaggagcttgaggaatggtacgccagacaggatgagcagctgcagaaaactaaggccaataacagggtagcggatgaagccttttacaagcagccatttgcggatgtcataggatatgtcactaacattaatcatccatgctactccctggagcaggctgcagaagaggcattcgtcaatgatatcgacgaaagctctccagggaccgagtgggagcgtgtggcacggctgtgtgatttcaaccccaaatcatcaaaacaggccaaggacgtcagtaggatgagaagcgtgctcattagcctaaagcaggcccctctggtccactag

SEQ ID NO: 170304 - DNA, 1152 bp, Artificial Sequence
  derived and/or modified sequence
cctcctggcgcttgtcctcctctcccagtcggcaccacagcggtggctgccgggcgtggtgtcggtgggtcggttggtttttgtctcaccgttggtgtccgtgccgttcagttgcccgccatggctgagctggatccgttcggcgcccctgccggcgcccctggcggtcccgcgctggggaacggagtggccggcgccggcgaagaagacccggctgcggccttcttggcgcagcaagagagcgagattgcgggcatcgagaacgacgaggccttcgccatcctggacggcggcgcccccgggccccagccgcacggcgagccgccggggggtccggatgctgttgatggagtaatgaatggtgaatactaccaggaaagtaatggtccaacagacagttatgcagctatttcacaagtggatcgattgcagtcagagcctgaaagtatccgtaaatggagagaagaacaaatggaacgcttggaagcccttgatgccaattctcggaagcaagaagcagagtggaaagaaaaggcaataaaggagctagaagaatggtatgcaagacaggacgagcagctacagaaaacaaaagcaaacaacagggtggcagatgaagctttctacaaacaacccttcgctgacgtgattggttatgtcacaaacataaaccatccttgctacagcctagaacaggcagcagaagaagcctttgtaaatgacattgacgagtcgtccccaggcactgagtgggaacgggtggcccggctgtgtgactttaaccccaagtctagcaagcaggccaaagatgtctcccgcatgcgctcagtcctcatctccctcaagcaggccccgctggtgcactgaagagccaccctgtggaaacactacatctgcaatatcttaatcctactcagtgaagctcttcacagtcattggattaattatgttgagttcttttggaccaaacctttttgtctttagagttgttcattgtttgtgattgcatgtttccttccttcaactgtgttctccctggcattcagagaggagggagaggaggaagaggaaggggagggaagcttcccaagagtagcctcaacctgtgcttctgtgcattattctgagaataaatttctgtttcaaactgta

SEQ ID NO: 170305 - DNA, 1235 bp, Artificial Sequence
  derived and/or modified sequence
gattggttgttcccttttcggctctgcaacaccgcctagaccgaccggatacacgggtagggcttccgctttacccgtctccctcctggcgcttgtcctcctctcccagtcggcaccacagcggtggctgccgggcgtggtgtcggtgggtcggttggtttttgtctcaccgttggtgtccgtgccgttcagttgcccgccatggctgagctggatccgttcggcgcccctgccggcgcccctggcggtcccgcgctggggaacggagtggccggcgccggcgaagaagacccggctgcggccttcttggcgcagcaagagagcgagattgcgggcatcgagaacgacgaggccttcgccatcctggacggcggcgcccccgggccccagccgcacggcgagccgccggggggtccggatgctgttgatggagtaatgaatggtgaatactaccaggaaagtaatggtccaacagacagttatgcagctatttcacaagtggatcgattgcagtcagagcctgaaagtatccgtaaatggagagaagaacaaatggaacgcttggaagcccttgatgccaattctcggaagcaagaagcagagtggaaagaaaaggcaataaaggagctagaagaatggtatgcaagacaggacgagcagctacagaaaacaaaagcaaacaacagggtggcagatgaagctttctacaaacaacccttcgctgacgtgattggttatgtcacaaacataaaccatccttgctacagcctagaacaggcagcagaagaagcctttgtaaatgacattgacgagtcgtccccaggcactgagtgggaacgggtggcccggctgtgtgactttaaccccaagtctagcaagcaggccaaagatgtctcccgcatgcgctcagtcctcatctccctcaagcaggccccgctggtgcactgaagagccaccctgtggaaacactacatctgcaatatcttaatcctactcagtgaagctcttcacagtcattggattaattatgttgagttcttttggaccaaacctttttgtctttagagttgttcattgtttgtgattgcatgtttccttccttcaactgtgttctccctggcattcagagaggagggagaggaggaagaggaaggggagggaagcttcccaagagtagcctcaacctgtgcttctgtgcattattctgagaataaatttctgtttcaaactgtatt

SEQ ID NO: 170306 - DNA, 747 bp, Artificial Sequence
  derived and/or modified sequence
atggccgagctggaccccttcggcgcccccgccggcgcccccggcggccccgccctgggcaacggcgtggccggcgccggcgaggaggaccccgccgccgccttcctggcccagcaggagagcgagatcgccggcatcgagaacgacgaggccttcgccatcctggacggcggcgcccccggcccccagccccacggcgagccccccggcggccccgacgccgtggacggcgtgatgaacggcgagtactaccaggagagcaacggccccaccgacagctacgccgccatcagccaggtggacagactgcagagcgagcccgagagcatcagaaagtggagagaggagcagatggagagactggaggccctggacgccaacagcagaaagcaggaggccgagtggaaggagaaggccatcaaggagctggaggagtggtacgccagacaggacgagcagctgcagaagaccaaggccaacaacagagtggccgacgaggccttctacaagcagcccttcgccgacgtgatcggctacgtgaccaacatcaaccacccctgctacagcctggagcaggccgccgaggaggccttcgtgaacgacatcgacgagagcagccccggcaccgagtgggagagagtggccagactgtgcgacttcaaccccaagagcagcaagcaggccaaggacgtgagcagaatgagaagcgtgctgatcagcctgaagcaggcccccctggtgcactag

SEQ ID NO: 170307 - protein, 1640 aa, Artificial Sequence
  derived and/or modified sequence
MAQILPVRFQEHFQLQNLGINPANIGFSTLTMESDKFICIREKVGEQAQVTIIDMSDPMAPIRRPISAESAIMNPASKVIALKAGKTLQIFNIEMKSKMKAHTMAEEVIFWKWVSVNTVALVTETAVYHWSMEGDSQPMKMFDRHTSLVGCQVIHYRTDEYQKWLLLVGISAQQNRVVGAMQLYSVDRKVSQPIEGHAAAFAEFKMEGNAKPATLFCFAVRNPTGGKLHIIEVGQPAAGNQPFVKKAVDVFFPPEAQNDFPVAMQIGAKHGVIYLITKYGYLHLYDLESGVCICMNRISADTIFVTAPHKPTSGIIGVNKKGQVLSVCVEEDNIVNYATNVLQNPDLGLRLAVRSNLAGAEKLFVRKFNTLFAQGSYAEAAKVAASAPKGILRTRETVQKFQSIPAQSGQASPLLQYFGILLDQGQLNKLESLELCHLVLQQGRKQLLEKWLKEDKLECSEELGDLVKTTDPMLALSVYLRANVPSKVIQCFAETGQFQKIVLYAKKVGYTPDWIFLLRGVMKISPEQGLQFSRMLVQDEEPLANISQIVDIFMENSLIQQCTSFLLDALKNNRPAEGLLQTWLLEMNLVHAPQVADAILGNKMFTHYDRAHIAQLCEKAGLLQQALEHYTDLYDIKRAVVHTHLLNPEWLVNFFGSLSVEDSVECLHAMLSANIRQNLQLCVQVASKYHEQLGTQALVELFESFKSYKGLFYFLGSIVNFSQDPDVHLKYIQAACKTGQIKEVERICRESSCYNPERVKNFLKEAKLTDQLPLIIVCDRFGFVHDLVLYLYRNNLQRYIEIYVQKVNPSRTPAVIGGLLDVDCSEEVIKHLIMAVRGQFSTDELVAEVEKRNRLKLLLPWLESQIQEGCEEPATHNALAKIYIDSNNSPECFLRENAYYDSSVVGRYCEKRDPHLACVAYERGQCDLELIKVCNENSLFKSEARYLVCRKDPELWAHVLEETNPSRRQLIDQVVQTALSETRDPEEISVTVKAFMTADLPNELIELLEKIVLDNSVFSEHRNLQNLLILTAIKADRTRVMEYISRLDNYDALDIASIAVSSALYEEAFTVFHKFDMNASAIQVLIEHIGNLDRAYEFAERCNEPAVWSQLAQAQLQKDLVKEAINSYIRGDDPSSYLEVVQSASRSNNWEDLVKFLQMARKKGRESYIETELIFALAKTSRVSELEDFINGPNNAHIQQVGDRCYEEGMYEAAKLLYSNVSNFARLASTLVHLGEYQAAVDNSRKASSTRTWKEVCFACMDGQEFRFAQLCGLHIVIHADELEELMCYYQDRGYFEELILLLEAALGLERAHMGMFTELAILYSKFKPQKMLEHLELFWSRVNIPKVLRAAEQAHLWAELVFLYDKYEEYDNAVLTMMSHPTEAWKEGQFKDIITKVANVELCYRALQFYLDYKPLLINDLLLVLSPRLDHTWTVSFFSKAGQLPLVKPYLRSVQSHNNKSVNEALNHLLTEEEDYQGLRASIDAYDNFDNISLAQQLEKHQLMEFRCIAAYLYKGNNWWAQSVELCKKDHLYKDAMQHAAESRDAELAQKLLQWFLEEGKRECFAACLFTCYDLLRPDMVLELAWRHNLVDLAMPYFIQVMREYLSKVDKLDALESLRKQEEHVTEPAPLVFDFDGHE

SEQ ID NO: 170308 - DNA, 4923 bp, Artificial Sequence
  derived and/or modified sequence
atggctcagattcttcccgttaggtttcaagaacacttccagctgcagaacctcggaatcaatccagctaacattggattctccactctgaccatggagtctgataaattcatatgtataagggagaaggtgggggagcaggcccaggtgaccattattgatatgtctgatcccatggccccaatacggaggccaatttccgcagagagcgcgattatgaaccctgctagtaaagttatcgctttaaaggcaggaaagactttgcagatctttaacatcgagatgaagtcaaaaatgaaagctcacaccatggccgaggaagtaatattctggaagtgggtgagcgtgaacactgttgcgctggttacagaaactgctgtctaccattggagtatggagggtgactcacagccaatgaaaatgttcgataggcacacctcattggtgggctgtcaagtgatccactacagaacagatgaataccagaagtggctcctgctagttgggatctctgcccaacaaaatcgtgtagtgggggcaatgcaactctattccgtcgaccgcaaagtaagccagccaatcgaggggcatgcagccgctttcgctgaattcaagatggagggcaatgccaaacctgctaccctgttttgcttcgcggtcaggaatcccaccgggggaaagctgcatatcatcgaggtggggcaacccgctgcgggaaaccaacctttcgtgaaaaaggcagtggatgtattcttcccgcccgaggcccagaacgactttcccgtggccatgcaaatcggcgcaaaacacggcgtgatctacctcatcactaagtatgggtatctacacctgtacgacttagaaagcggtgtttgcatatgtatgaatcgcatctctgccgacaccattttcgtgaccgcgcctcacaaaccaaccagtggaatcatcggggttaacaagaagggtcaggttctgagcgtttgcgttgaagaagataacattgtgaactacgcaaccaacgtcctgcagaacccagatcttgggcttcgattagcagtaaggagtaacctggctggggccgaaaagctgttcgtgagaaagttcaacacgttatttgctcagggctcttacgcagaagccgccaaggtggccgcctcagcccctaaaggtatcctgagaacacgtgaaacagtacagaagttccagtcaatacccgctcagtccggacaagcaagccctttattacagtacttcggtatccttttggaccagggacaactgaacaaactggaaagcttagagttgtgtcacctggtgctccagcagggcagaaagcagctattggagaagtggctgaaggaagataagctggagtgctcagaggagttaggcgacctcgtcaagaccacagacccgatgctggctctttctgtatacctccgcgcaaacgtgccttctaaggtcattcagtgttttgcagagacaggtcaattccaaaagatcgtgctgtacgccaaaaaagtcgggtatacacctgactggatcttcctgctgcgtggggttatgaagatcagccctgagcagggacttcagttttccagaatgttggtgcaggatgaggaaccacttgcaaacattagtcagattgtagacattttcatggaaaattctctaatacagcagtgtacatcctttcttctagatgcccttaagaacaacagaccggccgagggcctcctgcagacatggctgctcgaaatgaacctcgtccacgcgcctcaggtggcagacgccattctgggcaataagatgttcacacactatgacagagcccacattgcacaactgtgtgagaaagccggcttgttgcaacaggccctggaacactatacagacttgtacgacataaagcgggccgtagtgcatacgcatcttctcaatcctgaatggcttgttaactttttcggatcgttatccgtcgaggattcagtggaatgcctccacgccatgcttagcgcgaacataaggcagaatctgcaactgtgcgtgcaggtcgcgtctaagtaccacgagcagcttgggacccaagccctggtggaactgtttgaatctttcaagtcttataagggcctgttttactttcttggttctattgttaatttcagccaggaccctgatgtgcatttgaaatacatccaagccgcatgcaagaccggccagattaaagaagtggagcgtatttgtcgggagagtagttgttataaccccgagagggtgaaaaattttctgaaggaagccaaacttacagaccagctccccttgatcattgtatgtgacagattcggctttgtccacgatctcgttctgtatctgtatcggaataatctgcagaggtatatcgagatttatgttcagaaagtgaacccatccaggactccagcagtgattggcggactgcttgatgtcgattgctccgaggaggtcatcaagcatttgatcatggctgtgcggggccagttttcaactgacgaactagtggccgaagtggagaagagaaacaggctcaagctgctgttgccctggctggagagtcagattcaggaagggtgtgaggaacctgccacccacaacgctctggcaaagatttacatcgactcaaataacagccccgaatgttttctccgggaaaatgcctactatgactccagcgtcgtcggacggtactgtgagaaacgagatcctcatctggcatgtgtagcatatgaaaggggacagtgtgacctggagctgatcaaggtctgtaatgagaactccttgttcaaatccgaggctcgttatctggtgtgcagaaaggaccctgagctttgggctcacgtgctggaagagaccaatccatccaggcgccagctgatcgatcaggttgtgcagaccgcattgagcgagacacgtgatcctgaggagatcagtgtcaccgtcaaggcattcatgactgccgacctcccaaacgagctcatcgaacttttggagaaaattgtgctggataactctgttttttcggaacatcggaacctgcagaacctccttatcctcaccgctatcaaggccgaccggacccgcgtaatggagtatatcagcaggctcgacaattacgacgctctcgatattgcgagcatcgctgtgtcttccgctctctacgaggaggcctttaccgtttttcataagtttgacatgaacgcttccgctatccaagtactcatcgaacatattgggaacctcgaccgggcgtacgagttcgctgaacgatgcaacgaacctgcagtctggtctcagctggcacaggcacaattgcagaaagacctggtcaaagaggccatcaactcctacattcggggggacgatccatcatcttacctggaggtggtgcagtcggcctcacgttctaataattgggaagatttggtaaaattcctccagatggcccggaagaagggccgagagagttacattgaaacggagctgatctttgccctagccaagacctccagggtttccgagctcgaggatttcattaacggacccaacaacgcccacatccagcaggtgggcgatcgatgttacgaggagggtatgtacgaggcagctaagctgctatactccaacgtgtccaatttcgcaagactcgccagcaccctagtgcatctcggagaatatcaggcagccgtagataactctcggaaagccagttcaaccagaacatggaaggaggtatgcttcgcatgcatggatggacaggaattccggttcgctcagctgtgcggcctgcacatcgtcatacacgctgatgagttggaagaactgatgtgttactatcaagacagaggatatttcgaggaattgattctcctcctagaagccgcactcggcctggaacgcgctcacatgggcatgttcacggagctcgctatcctttactccaaatttaagccccagaaaatgttggaacacttggaattgttttggtcccgcgtaaatattccaaaggtgttgagggccgcagagcaagctcacctctgggcggagctggtgtttctgtatgacaaatacgaagaatacgacaacgccgtactgacaatgatgagccatcccaccgaagcttggaaagaaggtcaatttaaagacatcatcacgaaagtggccaatgtggaactctgttatcgggctcttcagttttacctagactataagccactgctgattaacgacctgttgttggtgctgtccccgaggctcgaccatacttggacggtttctttcttcagtaaagctggacagctgcctctggtcaagccatatttgagaagtgtccagtcgcacaacaacaaatccgtgaacgaggcacttaatcatctcctgaccgaggaggaggattaccagggtctgcgggcctctatagacgcatacgataattttgataatatttccctcgcgcagcagcttgaaaagcaccaactcatggagtttagatgcattgccgcatacctgtataagggcaacaattggtgggcccagagcgttgaattgtgtaaaaaggaccatctgtataaagacgccatgcagcacgctgcagaatcaagagatgccgaacttgcccagaaacttctgcagtggttcctcgaagaaggaaaaagggaatgttttgcggcatgcctatttacctgctacgacttactccggcccgatatggtcctggaactcgcctggcgccataacctcgtcgacctagccatgccgtactttatccaggttatgcgtgagtacctgtcgaaggtggacaagctagatgcgttggagagtctcagaaagcaggaggagcacgtcacagagcctgcccccctggtgtttgacttcgatgggcacgaatag

SEQ ID NO: 170309 - DNA, 4923 bp, Artificial Sequence
  derived and/or modified sequence
atggctcagatactgcctgttcgctttcaggagcactttcagctgcagaacctgggaatcaatcctgcaaacattggcttttccaccctcacaatggaatcggacaaatttatttgcatacgggagaaggtaggggaacaggcccaggtgacaattatcgatatgtctgacccaatggcaccaattcggcgccctatcagcgccgagtcggcaatcatgaaccctgcatcaaaagtcattgcacttaaagctggaaaaacactgcagatctttaatatagagatgaagagcaagatgaaagctcataccatggcagaagaagtaatattttggaaatgggtgagtgtgaatactgtggctctagtgacggagacggctgtttaccattggagcatggaaggggactcccagcctatgaagatgttcgataggcatacatcactggtgggctgccaggtgatacattaccggaccgacgaataccagaaatggctgcttctggtggggatctctgcccagcagaaccgtgtcgtaggagcaatgcagctgtattcagtggacaggaaagtcagccagccgattgagggccacgctgctgctttcgcagagttcaaaatggaagggaacgctaaaccagccacacttttctgctttgctgtgaggaatcccactggcggaaagctgcatatcatagaggttggacagcccgctgccggcaatcaaccattcgttaaaaaggctgtggacgtattctttcctcccgaggctcagaatgacttccccgtcgctatgcagattggcgcgaaacatggagtgatctatcttatcacaaagtacggttatttgcatctttacgacctggaatccggtgtgtgtatttgtatgaaccgcatcagcgccgataccatctttgtgacggccccccataaaccgaccagcgggataataggcgtaaacaagaagggccaggtgctcagcgtttgcgtcgaggaagataacattgtcaactacgccacaaatgtgctccagaacccagacctgggtctgaggctcgcagtgcgctctaatcttgctggcgcagagaagttattcgtccggaaattcaacacactgtttgcccaggggtcttatgccgaggctgccaaggtagcagcctccgcccccaagggaatcttacgcacccgcgaaactgtccaaaagtttcagagcatccctgcacaaagcgggcaggctagtcctctgctgcagtattttggcatactccttgaccaaggccagctgaacaagctagagagccttgagttgtgtcacctggtgctccagcagggcagaaagcaactgttggaaaagtggctgaaggaggacaagctcgagtgctccgaggaattgggggacctggtgaaaacaaccgacccaatgttggctttgtccgtatacttgcgcgctaacgtcccgtctaaggtaatacaatgtttcgccgaaaccggtcagttccaaaagatagtgctttatgctaagaaagtggggtacaccccagattggatcttcctgctcaggggcgtgatgaaaatctcaccagaacaagggcttcagttttctagaatgttggtccaggacgaggagcctttggccaacatcagtcagatagtggacatttttatggagaatagtctcatccagcagtgcaccagcttcctgctggatgctctaaaaaataaccgcccagccgaaggacttctccaaacttggctgttggagatgaacttagtgcatgccccacaagtcgctgatgccattctgggcaacaagatgttcacacactatgatagagcacacattgcacagctatgtgagaaagccgggctgctgcagcaagcactagagcattatactgatttgtatgatatcaaacgtgccgtggtgcacacacacttacttaacccagagtggcttgtcaacttctttgggagcctgtccgtggaagactcggtggagtgcctacacgctatgctgtccgcaaacattcggcagaatctccaattgtgtgtgcaagtggcctccaaatatcacgagcagctaggaacccaagctctggtcgaattgtttgagtctttcaagagttacaagggccttttctatttcctgggctccatcgtgaatttttcccaggaccccgacgttcacctcaagtatattcaggctgcatgcaaaaccggccagattaaagaggtagagcgcatttgccgagagtccagttgctataatcccgaaagggtaaagaacttcttaaaggaggccaagctgactgaccaactgccattaatcatcgtctgcgacagattcggcttcgtgcacgatctggtcttatacttgtaccggaacaatctgcagcggtacatagagatatacgtccagaaagtcaatccttcacgcacccctgccgttatcggcgggctgcttgatgtggattgctctgaagaagtgatcaagcacttgataatggccgtgcgaggtcagttttccactgacgagctggtggcagaggtcgagaaaagaaataggctcaagctgctgctgccatggctggagtctcagatacaggaggggtgcgaggagccagcaacccacaatgcgctggctaaaatctatatagattccaacaatagtccggaatgttttttgagagaaaacgcgtattacgattcatccgttgtgggacggtattgtgaaaagagggatccccacctagcatgcgttgcctatgagagagggcagtgcgacctagagctgatcaaagtgtgcaacgaaaacagcctgtttaagagcgaagctaggtatctagtgtgccgcaaggaccccgagctttgggctcatgtgctcgaagagacaaatccgagcagacgccagctcatcgaccaggtggtccaaacggccctttccgaaactagagatccagaggaaattagcgtgaccgttaaagcgttcatgaccgctgacctgcccaacgaacttattgaacttctggagaagatagtgctggacaacagcgtattctctgaacataggaacttgcagaaccttttaattctgactgcaatcaaagccgaccgcactagggttatggagtacatctccagacttgataactacgacgctctcgacattgcttccattgcagtttcgagcgccctgtacgaagaggcatttaccgtattccacaagttcgatatgaacgcctctgcgatacaggtgctgattgagcacattggtaatctggaccgggcctacgagttcgctgaacggtgcaacgaacccgctgtgtggtcacaactcgctcaggctcaactacagaaagaccttgttaaagaggccatcaacagctacatcaggggggatgacccttctagctacttagaggtcgtgcaatcagcatcacgttcaaataattgggaggatctggtgaaattcctgcagatggcgagaaagaaaggcagggagagctatattgaaacagagctcatctttgccctcgccaagacatcccgagtctcagagttagaggatttcattaatggtccaaacaacgcacacatccaacaggtgggcgatcggtgttacgaggaggggatgtatgaggcggctaagctcctctattccaacgtatctaattttgctcgccttgcttccacattggtgcatttgggtgagtaccaggccgccgtagataatagccgcaaagctagctctacgaggacatggaaagaggtgtgctttgcctgcatggatggacaggagttcaggttcgcacagctgtgcggtctccatattgtcattcatgcagacgagctcgaagaattaatgtgctattatcaggatcgcggctacttcgaggaattgatcctgcttctggaggccgctctggggctggaaagagcccatatgggaatgttcacggagctggccatattgtatagcaagttcaaaccacagaaaatgctcgagcatttggagctgttctggtcacgcgtgaatatacccaaagtacttcgagcagccgagcaggcccacctgtgggccgagttagtcttcctctacgacaaatatgaagaatatgataatgcagtactgaccatgatgtcgcatcccaccgaggcatggaaggaagggcagttcaaggacattattacaaaagtcgctaacgtcgagctatgttaccgcgccctccagttctatctggactataagcccctgctaatcaatgatctactgttggtcttgagccctcgcctcgatcacacatggacagtgtcgttcttcagtaaagctggacaactccctctcgtcaagccatatctgcgctccgtgcagtcccacaacaacaaaagtgtcaacgaggcactgaaccatttactgacagaggaggaagactatcaggggctcagagccagcattgatgcatacgacaatttcgataacatttctttggcacagcaattagagaagcatcaactcatggagttccggtgtatcgctgcttatctatataaggggaataactggtgggctcagagtgtggaactgtgcaaaaaagaccacctgtacaaagacgctatgcaacacgcggctgagagtagggacgctgaactagcccaaaagcttctccagtggtttcttgaagaaggtaaacgggagtgtttcgccgcctgcttgttcacttgctacgacctactgcgacccgatatggtgctcgaattggcgtggcgacacaacctcgtagacctggccatgccatattttattcaggtgatgagagagtacctgagtaaagtggataagctcgacgcgttggagtcattaagaaaacaagaagagcacgttactgagccggctcctctggtgtttgattttgacggccatgaatag

SEQ ID NO: 170310 - DNA, 4923 bp, Artificial Sequence
  derived and/or modified sequence
atggcccagatcctgcctgtgcgcttccaggagcacttccagctgcagaacctgggcatcaacccagccaacatcggcttcagcaccctgaccatggagagtgacaagttcatctgcatccgggagaaggtgggggagcaggcccaggtgaccatcatcgacatgtctgaccccatggcccccatcagaagacccatctctgctgagagcgccatcatgaacccagccagcaaggtgattgccctgaaggccggcaagaccctgcagatcttcaacatcgagatgaagagcaagatgaaggcccacaccatggccgaggaggtgatcttctggaagtgggtgtctgtgaacacagtggccctggtgacagaaacagctgtgtaccactggagcatggagggggacagccagcccatgaagatgtttgacagacacaccagcctggtgggctgccaggtgatccactacagaacagatgagtaccagaagtggctgctgctggtgggcatcagcgcccagcagaacagagtggtgggcgccatgcagctgtacagcgtggacaggaaggtgtcccagcccatcgagggccacgccgccgcctttgctgagttcaagatggagggcaatgccaagccagccaccctcttctgctttgctgtgaggaaccccaccggcggcaagctgcacatcatcgaggtgggccagcctgctgctggcaaccagccctttgtgaagaaggctgtggatgtgttcttccccccagaggcccagaatgacttccctgtggccatgcagatcggggccaagcacggcgtcatctacctgatcaccaagtatggctacctgcacctgtatgacctggagagcggcgtgtgcatctgcatgaaccgcatctctgctgacaccatctttgtgacagccccccacaagcccaccagcggcatcatcggcgtgaacaagaagggccaggtgctgtctgtgtgtgtggaggaggacaacatcgtgaactatgccaccaacgtgctgcagaacccagacctgggcctgcggctggccgtgcgcagcaacctggccggggctgagaagctgtttgtgaggaagttcaacaccctgtttgcccagggcagctatgcagaggccgccaaggtggccgccagcgcccccaagggcatcctgcggacccgggagaccgtgcagaagttccagagcatcccagcccagagcggccaggccagccccctgctgcagtacttcggcatcctgctggaccagggccagctgaacaagctggagagcctggagctgtgccacctggtgctgcagcagggcaggaagcagctgctggagaagtggctgaaggaggacaagctggagtgcagcgaggagctgggggacctggtgaagaccacagaccccatgctggccctgtctgtgtacctgcgggccaacgtgcccagcaaggtgatccagtgctttgctgagaccggccagttccagaagatcgtgctgtatgccaagaaggtgggctacaccccagactggatcttcctgctgcggggcgtgatgaagatcagccctgagcagggcctgcagttcagcaggatgctggtgcaggatgaggagcccctggccaacatcagccagatcgtggacatcttcatggagaacagcctcatccagcagtgcaccagcttcctgctggatgccctgaagaacaacagacctgctgagggcctgctgcagacctggctgctggagatgaacctggtgcacgccccccaggtggctgatgccatcctgggcaacaagatgttcacccactatgaccgggcccacatcgcccagctgtgtgagaaggccggcctgctgcagcaggccctggagcactacacagacctgtatgacatcaagagagctgtggtgcacacccacctgctgaaccctgagtggctggtgaacttcttcggcagcctgtctgtggaggacagcgtggagtgcctgcacgccatgctgagcgccaacatccggcagaacctgcagctgtgtgtgcaggtggccagcaagtaccacgagcagctgggcacccaggccctggtggagctgtttgagagcttcaagagctacaagggcctcttctacttcctgggcagcatcgtgaacttcagccaggaccctgatgtgcacctgaagtacatccaggccgcctgcaagacaggccagatcaaggaggtggagcgcatctgccgggagagcagctgctacaaccctgagcgggtgaagaacttcctgaaggaggccaagctgacagaccagctgcccctcatcatcgtgtgtgacagatttggatttgtgcatgacctggtgctgtacctgtacagaaacaacctgcagcgctacatcgagatctacgtgcagaaggtgaaccccagcaggaccccagctgtgattggaggcctgctggatgtggactgcagcgaggaggtgatcaagcacctgatcatggctgtgcggggccagttcagcacagatgagctggtggccgaggtggagaagaggaaccggctgaagctgctgctgccctggctggagagccagatccaggagggctgtgaggagcccgccacccacaatgccctggccaagatctacatcgacagcaacaacagccctgagtgcttcctgcgggagaatgcctactatgacagctctgtggtgggccgctactgtgagaagagggacccccacctggcctgtgtggcctatgagcggggccagtgtgacctggagctgatcaaggtgtgcaatgaaaacagcctcttcaagtctgaggcccgctacctggtgtgcaggaaggaccctgagctgtgggcccacgtgctggaggagaccaaccccagccggcggcagctgattgaccaggtggtgcagacagccctgtctgagacccgggaccctgaggagatctctgtgacagtgaaggccttcatgacagctgacctgcccaatgagctgattgagctgctggagaagatcgtgctggacaacagcgtcttcagcgagcacaggaacctgcagaacctgctgatcctgacagccatcaaggctgacaggaccagggtgatggagtacatcagccggctggacaactatgatgccctggacatcgccagcattgctgtgagcagcgccctgtatgaggaggccttcaccgtcttccacaagtttgacatgaatgccagcgccatccaggtgctgattgagcacatcggcaacctggaccgggcctatgaatttgctgagcgctgcaatgaacctgctgtgtggagccagctggcccaggcccagctgcagaaggacctggtgaaggaggccatcaacagctacatcagaggagatgaccccagcagctacctggaggtggtgcagagcgccagccgcagcaacaactgggaggacctggtgaagttcctgcagatggccaggaagaagggccgggagagctacattgaaacagagctgatctttgccctggccaagaccagccgggtgtctgagctggaggacttcatcaatggccccaacaatgcccacatccagcaggtgggggaccgctgctatgaggagggcatgtatgaagctgccaagctgctgtacagcaatgtgagcaactttgcccggctggccagcaccctggtgcacctgggggagtaccaggccgctgtggacaacagcaggaaggccagcagcaccaggacctggaaggaggtgtgctttgcctgcatggatggccaggagttccgctttgcccagctgtgtggcctgcacatcgtcatccacgcagatgagctggaggagctgatgtgctactaccaggaccggggctactttgaggagctgatcctgctgctggaggccgccctgggcctggagcgggcccacatgggcatgttcacagagctggccatcctgtacagcaagttcaagccccagaagatgctggagcacctggagctgttctggagccgggtgaacatccccaaggtgctgcgggctgctgagcaggcccacctgtgggccgagctggtgttcctgtatgacaagtatgaggagtatgacaatgctgtgctgaccatgatgagccaccccacagaggcctggaaggagggccagttcaaggacatcatcaccaaggtggccaacgtggagctgtgctaccgggccctgcagttctacctggactacaagcccctgctgatcaatgacctgctgctggtgctgagcccccggctggaccacacctggacagtgtccttcttcagcaaggccggccagctgcccctggtgaagccctacctgcggtctgtgcagagccacaacaacaagtctgtgaatgaggccctgaaccacctgctgacagaggaggaggactaccagggcctgcgggccagcattgatgcctatgacaactttgacaacatcagcctggcccagcagctggagaagcaccagctgatggagttccgctgcatcgccgcctacctgtacaagggcaacaactggtgggcccagagcgtggagctgtgcaagaaggaccacctgtacaaggatgccatgcagcacgccgctgagagcagagatgctgagctggcccagaagctgctgcagtggttcctggaggagggcaagcgggagtgctttgctgcctgcctcttcacctgctatgacctgctgcggccagacatggtgctggagctggcctggaggcacaacctggtggacctggccatgccctacttcatccaggtgatgagggagtacctgagcaaggtggacaagctggatgccctggagagcctgaggaagcaggaggagcacgtgacagagcccgcccccctggtgtttgattttgatggccatgaatag

SEQ ID NO: 170311 - DNA, 4923 bp, Artificial Sequence
  derived and/or modified sequence
atggcccagatcctgcccgtgcggttccaggagcacttccagctgcagaatctaggcattaatcccgccaacatcggatttagcacactgacaatggaatcagacaaatttatttgtatccgggagaaggtaggcgaacaggcccaagttactattatagacatgagtgatcccatggcaccaatccgaagaccgatcagtgcagaatcagcaatcatgaatcccgcttctaaagtgattgcacttaaggccggcaagaccctccagatcttcaacatcgaaatgaaatctaaaatgaaagcgcatacaatggccgaggaggtcattttctggaaatgggtgtccgtcaacacagtggctcttgtgacagaaactgcagtgtaccactggtccatggagggcgactcccagccaatgaaaatgtttgatagacacacttccttagtaggctgccaggtcatccattaccggactgatgagtaccagaaatggctactcttagtcggaatctctgctcagcagaatagggtcgtgggagcaatgcagttatacagcgtggatagaaaggtgtcccagccaattgagggccatgctgccgctttcgccgagtttaaaatggaaggcaacgcaaagcctgctaccttattctgtttcgctgtcagaaatcctaccggcggaaagctgcatatcatcgaggtcggccagcctgccgcaggaaatcagcctttcgtcaagaaagctgtggatgtcttcttcccacctgaagcacagaacgacttcccagtcgccatgcaaatcggagccaaacatggagtgatataccttattacaaagtatgggtacctgcatttatatgatctcgagagcggagtttgcatttgcatgaacaggatttctgccgatactattttcgttaccgccccacataaaccaacgtctggaataatcggggtcaataaaaaaggccaggtgctgtcagtgtgcgtcgaggaggacaacatagtgaattatgctactaacgtgctccagaatccggacctgggcctccgacttgccgttcgctctaacttggcaggcgctgagaagttgttcgtgcgcaaattcaacacactgtttgcccagggatcctatgccgaagcggcaaaggttgcagcgagtgccccaaaaggaattctaaggacccgagagacagtccagaagtttcagtctattcccgcacaaagcggacaagcatccccattactgcaatactttggcatcttgctggaccagggccagcttaacaaactggaaagtctggagctgtgccaccttgtgctgcaacagggtcgaaaacagctgttggaaaaatggctgaaagaggacaagctcgagtgctcagaggaactgggtgacttagtgaagaccacagatcccatgctggccctttctgtctacctgcgcgcaaacgtgcccagcaaagttatccagtgcttcgccgagactggacagtttcagaaaatcgtgctgtacgccaagaaagtgggctacacccccgattggatttttcttctaaggggagtgatgaagatctccccagagcaggggctccagttttcacggatgctcgttcaggacgaagaaccattggccaatattagtcagattgtagacatctttatggagaatagcttaattcagcagtgcacatcctttttgctggacgcccttaagaacaacaggcctgctgagggccttctgcagacatggctgctagagatgaatctggtgcacgccccgcaggtcgccgatgccattttgggaaataagatgtttactcactacgatcgcgcacatattgctcagctctgcgagaaggccggcctgctgcagcaagctctcgagcactacacagacttatatgatatcaagagggccgtggtgcacactcatctcctcaacccagagtggcttgtcaatttctttgggtccctgtctgtggaggactccgtggagtgtctgcatgcaatgctttccgccaatataagacagaatttgcagctgtgcgtgcaggtggcgagtaagtatcacgaacagctcggcacacaggccctagtggaactgtttgagtcattcaaaagttataaaggtctcttctacttcctcgggtcaatcgtgaacttttctcaagatcctgatgtgcacctaaaatatatacaggcggcttgtaaaaccggccaaatcaaagaagtggagaggatttgcagggaatcttcttgctacaatcctgagcgggtgaagaatttccttaaagaggctaaactgactgaccagctgccactcattattgtatgtgacagattcggctttgtgcatgatctcgtcctctacctgtaccggaacaacttgcagagatatatcgagatttacgtgcagaaggtgaacccttccagaacccctgctgtgatcgggggactactcgatgtggactgttccgaggaagtgattaaacatctgattatggccgtgcgcggccaattttctaccgatgaactggttgcagaggtagaaaaacgcaaccgcctgaaactgctgctgccctggctcgagagtcagatccaggagggctgcgaggagccagctacccacaatgccctggcgaagatctacattgactctaacaattctcctgagtgtttcctgcgcgagaatgcctactatgatagctctgttgtgggaaggtactgtgaaaagcgggacccccatctggcttgcgttgcctacgaaaggggccagtgtgacctcgagttgattaaagtctgtaacgagaattccctttttaagagcgaggcccggtacctcgtatgccgcaaggatcccgagctctgggctcatgtgctagaggaaacaaacccttctcgacgccagctgatagatcaggttgtgcagactgccttatctgagaccagggaccccgaagagatctcagtgactgtcaaggcattcatgacagcagacttgcccaacgagctgattgagttgttggaaaagattgtgctcgataacagtgtcttctcagaacatcgcaatctccagaacctcttgattttaactgccattaaggcagaccggacgcgggtaatggagtacatctctcgccttgataactacgatgccctggacattgctagtatcgctgtaagcagtgccctctatgaggaagcattcacagtcttccataaattcgatatgaacgcctctgctatccaggtgttaattgaacatattggaaatctggaccgcgcatatgagttcgcagagagatgcaatgaaccagcagtgtggtctcagctcgctcaagcacagctgcagaaggacctggtcaaggaggccatcaactcctacatccgaggggatgatccctcctcctatttagaggtcgtacagtctgcgtctaggagcaacaattgggaggatctcgtcaaattcctccaaatggccagaaaaaagggccgagagtcctacatcgaaacggaattgatcttcgcattggcaaaaacctctcgagtgtccgagcttgaggactttatcaatgggccaaataacgcacatattcagcaagtgggagatcgctgttatgaggagggcatgtacgaagccgcaaaacttttgtacagcaacgtgtctaattttgcacgcctggctagtacactggtgcatctcggcgagtaccaggccgctgtagataacagtaggaaagcttccagcacaagaacctggaaagaggtgtgctttgcatgtatggatggtcaagaattcagatttgcacaactgtgcggcctgcatatcgtgatacacgccgacgaactggaagagcttatgtgctattaccaggatcgaggctattttgaggagctgatcttactcctagaagctgcccttgggcttgaacgggcccacatggggatgttcaccgagctagcaattctgtattccaaatttaaacctcagaagatgctcgaacacttggaactgttctggtctagagttaacattcctaaggtgctgagagcggccgagcaggcacatctgtgggctgagctggtcttcctgtacgacaagtacgaggaatacgacaacgctgtcctcaccatgatgagtcaccctaccgaagcatggaaagagggccagttcaaagatataatcaccaaggttgcaaacgttgagctatgttaccgggcgctccagttctacctagactacaaacccctgttaattaatgatttactcttggtactgagccctcggctcgaccacacttggaccgtcagctttttctctaaagctggacagttacccctggttaagccgtacttacgcagtgtgcaaagccacaataacaaatctgttaatgaagctttaaaccatctattgacggaggaggaggactaccagggtttgcgagcctctatcgatgcttacgataactttgataatatctccctggctcagcagctggagaaacaccagttgatggaatttcgatgcatagccgcctatctgtacaaggggaacaattggtgggctcagtctgtcgagctctgtaagaaagaccacctctacaaggacgcgatgcaacatgccgccgaaagtcgggacgcggaactggcccagaagctgctacagtggttcttggaagaagggaagagggaatgttttgctgcctgtctgtttacgtgctatgacctgttgcggcctgacatggttctcgagttagcctggaggcataacctagtggatttggccatgccctactttatacaggtgatgcgtgagtacctgagtaaagtcgacaaattggacgccttggagtctctgagaaaacaggaggagcacgtgaccgaacccgcaccactggtattcgacttcgacggccatgagtag

SEQ ID NO: 170312 - DNA, 4923 bp, Artificial Sequence
  derived and/or modified sequence
atggcccagatcctgcccgtgcggttccaggagcacttccagctgcagaatcttggaatcaaccctgcgaacataggattctccaccctgaccatggagtcagacaagtttatttgcattagagagaaggtgggtgaacaggcccaggtgaccatcatcgacatgtctgatccaatggcccccatccggcgcccaatttccgcagagtccgcaattatgaatcctgcatccaaggtcatcgccttgaaagccggcaagaccctacagattttcaatatcgaaatgaagtctaagatgaaagctcacaccatggccgaagaggtcatcttttggaaatgggttagcgtaaacactgtcgctttagtaacagagactgccgtgtatcactggtctatggaaggtgactctcagcctatgaaaatgttcgatcgtcacacctcactcgtggggtgtcaggtcattcactaccgaacagatgaatatcagaaatggcttcttctggtaggcatatccgcacagcagaatagagtcgtcggcgccatgcaactctatagcgttgatagaaaggtgtcccagcctattgagggacacgccgccgcttttgcagaatttaaaatggaagggaacgccaagccagccacactgttttgttttgcagtgcggaatcctaccggagggaagttgcatattattgaagtaggtcaaccagctgctggcaaccaaccttttgtgaaaaaggccgtggatgttttcttccctcctgaggctcagaacgacttccccgtggccatgcagattggggccaaacacggggtaatatacctcattacaaagtacgggtatttgcatctgtacgatctggagagcggggtctgtatttgtatgaacaggattagtgcggacaccatcttcgtgacagccccacacaaacccacaagcggtatcatcggcgtgaataagaaaggacaggttctgtcggtgtgcgtcgaggaggacaatatcgttaactacgctacaaacgtgctgcagaacccagacttgggcttgaggctggccgtcagatcaaatctcgcgggcgccgaaaaactgttcgtgaggaagttcaacactttgtttgcccagggatcctacgcagaggctgccaaagtagctgcatctgcccccaaaggcattctgcgtacacgcgagactgtgcagaaatttcaatccatccccgcgcaaagtggccaagccagcccccttctgcagtatttcgggatactcctggatcagggtcagttaaataagcttgagagtctggaactctgccatctcgtgctgcagcagggtcgcaaacagctccttgagaaatggcttaaggaagataaactggagtgctccgaggagttgggcgatctggttaagactactgatcccatgctggctttgagcgtttacctgcgcgctaatgttccatcgaaggtcatacaatgttttgcagagactggacagtttcaaaagatcgtactttatgctaagaaagtgggatacacccccgattggatttttctgttaagaggggtgatgaaaatcagccccgagcagggcctacaattctccagaatgttagtgcaggacgaagagcctctggcaaatatctcacagattgtggacatttttatggagaactccctgattcagcaatgtacaagctttctcctggacgctctgaaaaataaccgacccgcagaggggcttttgcaaacgtggctgctcgaaatgaatctggtgcacgcaccccaggtggctgacgccatactcgggaacaaaatgtttactcactatgatcgcgcccacatcgcacagttgtgtgaaaaagctggcctcctccaacaggcactggagcactacactgatctttatgatatcaagagagccgtcgtacacacccacctcctcaatccggagtggctcgttaactttttcggatctctaagtgttgaagattctgtggagtgcttgcacgccatgctttccgccaatatccgacagaacctgcagctatgtgtgcaggtggctagtaagtaccatgagcagcttggaacacaggccctggtggaactatttgaatcttttaagagttataagggcctgttctactttctgggatccatagtgaactttagccaggaccccgatgttcacctgaagtacattcaagccgcctgtaaaaccggacaaataaaggaagtagagcggatatgcagagaatcatcctgttataatcccgagagagtgaagaacttcttgaaagaagcaaagctgacggaccaactgccgctgattatcgtttgtgacagatttggtttcgtgcacgaccttgtgctctatttatataggaacaatcttcagcggtacatcgaaatctatgttcagaaggtgaacccgtctagaacaccagcagtgattggggggctactagatgtggattgtagcgaggaggtcatcaagcatctcattatggcagtcagagggcagttcagcactgacgaattggttgccgaagtcgaaaagagaaataggctcaaattgctgctgccctggcttgagtcccagatccaggaaggatgcgaagagccagcaacccacaatgctttggccaaaatttatatcgattcaaataactcacccgaatgtttcctgagggagaacgcctactatgattcttctgtggttggaaggtattgcgaaaagcgggatccccacctggcctgtgtggcttacgagagagggcaatgtgatttggagcttataaaggtttgtaatgagaattcactttttaagagtgaagcacgctacctggtgtgcagaaaggacccagagctttgggcgcatgtacttgaagagacaaatccttctaggcgtcagttgattgaccaggtggtgcagacagcactttccgaaacccgtgatcccgaagagatttcggtcaccgtaaaggcctttatgactgctgatttgcctaacgaactgatcgagctcctggaaaagatcgtcctcgacaacagcgttttttctgaacaccgtaatctgcagaaccttctcatcctgactgcaataaaagcagataggacaagggtgatggagtacatttcccgccttgacaattatgacgcacttgatatcgcgagtatcgctgtgtccagcgctctttatgaggaagcattcacagtcttccacaagttcgacatgaacgcttccgcaatccaggtactcatcgaacacattggcaatctggatcgagcctacgagtttgctgaacggtgcaatgaaccggcggtctggtcacagctcgcacaggctcagttgcagaaagacctagttaaagaggcaattaattcatacatccgaggggatgacccttcttcctacttggaggtggttcaatccgcatctaggtctaacaattgggaggacctggtcaagttcttgcagatggcccgcaagaaaggacgcgagtcatacatcgagaccgaactcatttttgccctggccaagacatcccgggtttcggagctggaggacttcatcaacgggccaaataacgctcatattcagcaagtcggcgaccggtgttacgaagagggaatgtacgaggctgccaaactgttatacagtaacgtgagtaacttcgcccgcctcgcctctactctcgtgcatttgggtgaatatcaagcagccgtcgacaactctagaaaggcctcaagcacaagaacctggaaggaggtctgtttcgcctgcatggatggacaggagttccgctttgcccagctttgcggtctgcatattgtaatccatgccgatgagctggaggaactgatgtgctattatcaggatcgcgggtatttcgaagagctaattctgctcctggaggccgccctcggcctcgaaagggcccacatgggaatgtttacggaattagcaattctctacagcaaatttaaaccccagaaaatgctcgagcatctggagctgttctggagcagagttaacatacctaaggtcctccgagccgccgagcaggcccacctttgggctgaactggtcttcctgtatgacaagtacgaggagtatgataacgctgtgctgactatgatgtcacatcctacagaggcgtggaaggagggccagttcaaggacatcattactaaagtggccaacgtggaactgtgttaccgggcgctgcagttttatcttgattacaagcccttactgataaacgatttgctcttggtcctctcgccgcgtctggatcacacctggacagtcagctttttctcgaaggctggacagctgccgctggtaaagccctacttgcgctctgtgcagagtcacaacaacaagtctgtcaatgaagcattgaaccatctgcttacggaagaggaggactatcagggactcagagctagtattgacgcctatgataattttgacaatatctccttagcacagcaactcgaaaaacatcagcttatggagtttaggtgtattgccgcgtatctgtacaaaggcaataattggtgggcccagtctgtggaactgtgcaaaaaggatcacctctataaggacgccatgcagcatgctgctgagtcccgcgacgcggagctcgcccagaaactgctccagtggttcctagaagagggcaagcgggagtgttttgccgcctgcctgtttacctgttatgatctccttaggccggacatggtacttgaactggcctggcgtcacaatctggtggatctcgctatgccatattttattcaagttatgcgcgagtatctgtctaaggtcgataaactggacgcgcttgaatccttaagaaagcaggaggaacacgtgaccgaacctgcccccttggtcttcgactttgacggccacgagtag

SEQ ID NO: 170313 - DNA, 4923 bp, Artificial Sequence
  derived and/or modified sequence
atggcccagattctgcctgttagattccaggaacactttcagctgcagaaccttggcataaatcctgccaatattggcttctctacccttacaatggaaagtgacaagttcatttgtattagggagaaggtgggcgaacaagcccaagtgaccataattgatatgtctgatcctatggcacctatccgcagacctatcagcgccgaatccgccattatgaacccggcttccaaggtgattgccctgaaagccggaaaaactctgcagatcttcaatatagagatgaaatctaagatgaaagctcatactatggcggaggaggtgatcttttggaagtgggtgtctgtcaacaccgtcgccttggttacggagaccgctgtctaccattggagtatggagggtgattcacagcctatgaaaatgttcgaccgccacacaagcctggtcggttgtcaggtgattcactatcgaaccgacgagtaccaaaagtggttactccttgttggaatcagtgctcaacaaaacagagtggttggagccatgcagttgtactcagtggatcggaaggtgagccagcctattgagggccacgcagcagctttcgcggaatttaagatggaaggcaatgctaaacccgcaaccctgttctgttttgccgtgagaaatccgacgggaggaaagctgcatatcattgaggtggggcaacccgctgctggcaatcaacccttcgtcaaaaaggctgttgacgtgttttttccacctgaggcccagaacgacttcccagtcgcaatgcagatcggggcaaagcacggagtgatctacctaattacaaaatatggctacctgcacctgtatgatcttgaatctggagtctgcatctgtatgaaccgcatcagtgcagatacgatcttcgtcaccgccccacataaacccacttctggtatcatcggcgtaaacaagaaggggcaggtcctctcggtatgtgtcgaggaagacaacatcgtgaactacgccacaaatgttctccaaaatcccgacctcgggctgagactggccgtgcggtctaatcttgccggagcggagaagcttttcgtgagaaaattcaacaccttgttcgcacaaggcagttatgctgaagctgccaaagtggccgcttccgctcctaagggcatactccgcactagagagaccgttcagaagtttcaatcaattccagcccagtcaggccaggccagtcctttacttcaatactttggcattcttctcgaccagggccaacttaataagctcgagtccctagaactctgtcacttagttctgcagcaagggcgtaagcagcttctggaaaaatggctaaaggaagacaagctggaatgtagtgaagagttaggagatctggtcaaaaccactgacccgatgttggccctctcggtctacctgagggcaaatgtcccatctaaggttatccaatgctttgccgaaaccggtcagtttcagaaaatcgtgctgtacgccaagaaggtgggctatactcccgactggatcttcttacttaggggagttatgaagataagcccagagcagggtctgcagttctctagaatgttggtgcaggacgaggaaccgctagccaacatcagccagatcgtcgacatcttcatggaaaattcactaatccagcaatgcacttctttcctgctggatgcacttaaaaataaccggcctgctgagggcctcctgcagacttggcttctcgagatgaacctcgtgcatgccccacaagtcgctgacgccatattaggcaacaaaatgtttacacattacgatagggctcacattgctcagttatgcgaaaaggctggtctcctgcaacaggctcttgagcactacaccgatctgtatgatataaaacgggctgtagtccacacccacctcctgaatccggagtggctggtgaacttttttggttctctgtctgtcgaggatagcgtggagtgtctgcacgctatgctgtctgcaaatatccgtcaaaacctgcagctttgcgtgcaggtggcctctaagtatcacgaacaactgggcacacaggcacttgtggaactttttgaatcgttcaaatcttacaaagggctcttctatttcctgggctctatcgtgaattttagccaagatcctgacgtgcacttgaagtacattcaggccgcatgcaaaaccgggcagatcaaagaggttgaaaggatctgccgcgaatcttcctgctacaatcctgaacgcgtgaagaacttcctgaaagaagcgaagctgacggaccagctcccattgattatcgtgtgtgatcgtttcggcttcgtccatgacctggtcctgtatctgtacaggaataacctgcagcggtacattgagatctatgtccagaaagtcaaccccagccgaacccccgctgttatcggtggattgttggatgtggattgctcggaggaagttattaagcacctcatcatggccgtgcgaggacaattttcaactgacgaactcgtggctgaggtcgaaaaaagaaacaggctcaagctcctgcttccctggctagaatctcagattcaggaaggctgtgaggagccagccactcacaacgcactggcaaagatttacatcgactcaaataattccccagagtgttttctgagagagaatgcatactacgactcttctgtcgtaggtcggtactgcgaaaaacgcgatccccaccttgcctgcgtagcttatgaacgaggccagtgcgatcttgagttaatcaaagtgtgtaacgagaatagcttgtttaagtcagaggcgcgttacctggtatgtcgaaaggatcccgagctgtgggcccacgtactggaagaaaccaacccctccaggaggcagttgatagatcaggtcgttcagaccgctctctcagagacccgggatccagaggagatctcggtgaccgtgaaggcattcatgaccgcagacttaccaaacgaacttattgaactactggaaaagatagtcctagataattccgtatttagtgagcatcgaaacctgcagaatttgctaatcctcaccgctattaaggctgatagaacacgtgtcatggagtatatctccagactcgataactacgacgcactcgatatagccagtattgctgtctctagcgctctgtatgaggaagctttcacagtgttccacaaatttgacatgaatgcaagtgcaattcaggtcctgatcgagcatatcggcaacttggatcgcgcttacgagttcgctgagaggtgcaacgagccagctgtttggtcgcagctggcacaggcccagcttcagaaagacctggtgaaagaagcaattaacagctacatcaggggcgacgatccaagcagctatctcgaggtggtacagagcgcctctagaagtaacaactgggaggacttggttaaatttctgcaaatggctcgaaagaagggtcgtgagtcctacatcgaaacagagcttatcttcgcgctagcgaagacttctagagtcagcgagcttgaggattttattaatggtcccaataacgcgcacatccagcaggtcggagataggtgctatgaagaggggatgtatgaagccgcaaagctgttgtactccaacgtcagtaattttgccaggctggcctctacactggtgcatttaggagaataccaggcagccgttgacaatagcaggaaggcatccagcacacggacctggaaagaagtgtgttttgcttgtatggacggtcaggagttcagattcgcccagttatgtggactgcacatcgtgattcacgccgacgaactcgaggaactgatgtgctactatcaggatcgcggatatttcgaagaactgattttgctccttgaagctgctttaggcctcgagagggcgcacatgggaatgttcaccgagttagctatcctctacagtaaattcaagcctcagaagatgcttgagcatttggagctgttttggagtcgcgtgaatattcccaaagttttgcgcgctgctgagcaggctcatctgtgggctgagctggtgtttctgtacgacaaatatgaggagtacgataacgcagttctgactatgatgtcccatcctaccgaagcatggaaggagggccagtttaaggatattatcaccaaagtagcaaatgtggagctgtgctaccgagcattgcaattttatttagactacaagccattgttaattaatgacctgcttcttgtattatccccgaggctggaccacacgtggaccgtgtccttctttagcaaggcagggcagctcccacttgtcaagccgtacctaaggagtgttcagtcacataacaataagtccgtcaacgaggcattgaaccatctcctgacagaggaggaagattaccaggggttacgggcatccatcgacgcttacgataactttgacaatatctctctggcccagcagctggagaagcaccaactaatggagttccggtgtattgctgcctacctgtataagggcaataattggtgggcccagagtgtagagctgtgtaagaaagatcatctgtacaaggatgcgatgcagcacgcggctgaatctagggatgccgaacttgcacagaagctgctccaatggtttctggaagaaggaaaacgcgaatgtttcgccgcttgtctgtttacctgttatgatttgctgcggccagatatggtgctggaactggcgtggcggcacaacctggtcgatctagccatgccgtacttcatccaagtgatgcgagaatatctaagtaaagtggataagctggacgccctggagtcgctgcggaagcaggaggaacacgtgaccgagcctgcaccacttgtgtttgatttcgacggacatgagtag

SEQ ID NO: 170314 - DNA, 4923 bp, Artificial Sequence
  derived and/or modified sequence
atggctcaaatactccctgtgcggtttcaagaacactttcagctacaaaacttagggatcaaccctgccaatattggcttttcgaccctgacaatggaaagcgacaagtttatctgcattcgagagaaggtgggagagcaagcccaggttacaatcatagacatgtcagaccctatggcccctatccggagaccaatcagcgccgagtctgctattatgaatcctgcatccaaagttatcgctctaaaagcaggcaaaaccctccagatatttaatatcgaaatgaaaagcaaaatgaaagcgcacactatggcagaggaagtcattttctggaaatgggttagcgtgaacaccgttgcactggtgacagaaacagccgtttaccattggagtatggaaggtgattctcagcccatgaagatgttcgatcggcacacgagcctggttggatgccaggtaattcattaccgcaccgacgagtaccagaaatggttgctgctcgtcgggatatccgcccagcaaaatcgtgtagtcggcgcaatgcagttgtactctgtggatcggaaagtttctcagcctattgaggggcatgctgccgcattcgctgagttcaagatggaagggaatgccaagcctgcaaccctgttctgcttcgccgtcagaaaccccaccgggggaaagttgcacattattgaagtgggccaacccgcagccggtaatcagccatttgtgaaaaaggcagtcgacgtgttcttccctccggaagcccaaaatgattttcctgtcgctatgcagataggagctaaacacggagtaatctacctaattacaaagtacgggtaccttcacttgtatgatctagaaagcggagtgtgcatctgtatgaataggatatccgccgatactatttttgtcaccgcaccacacaagccgacatcaggcataataggcgtcaacaaaaaagggcaagtcctcagcgtctgcgttgaagaggataacattgttaattacgctaccaacgtgctgcagaaccctgatctcgggttaagactcgccgtgcggagcaacctcgcaggcgctgaaaagctgtttgtgaggaagttcaacactctttttgcccagggcagttacgccgaggcggcaaaagtcgcagcatcggcccctaagggaattttacgcactcgagagactgtgcagaagttccagagtatccccgctcaatccggacaagcttcccctctcctgcagtacttcgggattctgttagatcagggacagttgaataaactagagagccttgagctttgtcacttggtcctgcagcaaggtagaaagcagctgttggaaaaatggttgaaagaggataagctggagtgctccgaggaactaggtgatttagtaaagacaaccgacccgatgctggccctttcagtctaccttagggcgaatgtcccttcaaaagtcatccagtgcttcgccgaaactgggcagtttcagaagatagtgctttatgcaaagaaagtgggttacactccggactggatcttcctgcttcgaggggtgatgaaaatttcgcctgagcagggattacagttctcacggatgctggttcaagatgaagagcctctggccaatatctctcaaattgttgatattttcatggaaaactccctaattcaacaatgcacttccttcctgctcgacgcactcaagaacaaccggccagccgaaggcctgctccaaacatggctgttggagatgaaccttgtgcacgccccacaggtggccgacgcaatcttgggcaataaaatgtttacacactatgaccgtgcacatatcgctcagctttgcgaaaaggctgggctcctccaacaggccctagagcattacaccgatctctatgacatcaagagggccgtagtacatactcacttgctgaaccccgagtggctggtcaacttttttgggagcctcagcgtggaggattcagtcgagtgcctgcatgccatgctgtctgctaacattagacagaatctccagctgtgcgtgcaggttgccagcaagtaccacgagcagttgggaacacaggccctcgtggagctgttcgagagctttaagagttataagggactgttctacttcctgggctccattgtcaactttagtcaagaccccgacgttcatctgaaatacattcaggcagcctgtaagaccgggcagatcaaagaagtggagcgcatttgccgggaatctagctgctacaaccctgagagagtgaagaactttctcaaagaagccaaactcaccgatcaactgccactgattattgtgtgcgatcgctttggcttcgtgcacgatcttgtcttatatctatacagaaataacttacaaaggtatatagagatctatgtacagaaggtgaatccgagccggacaccagcagtcatcgggggactgttggacgttgactgttccgaggaggtcattaaacatctgattatggctgtgaggggacagttctccaccgatgagctggtcgctgaagttgagaaaagaaacaggcttaagcttttgttaccttggctcgagagtcagatccaggaaggctgcgaggagccagccacccacaacgccttagcaaagatctacattgatagcaacaactctccagaatgctttttgcgcgagaatgcctattatgacagctctgttgtgggcagatattgcgagaagagggacccccacctggcatgtgttgcgtatgagcggggtcagtgcgaccttgaactaataaaggtatgcaacgaaaattctttatttaaatccgaggcaaggtacttggtgtgccgcaaagatcctgaactctgggcgcatgtgctagaagaaactaacccttcacgccgtcagttgattgaccaggtggtgcagaccgctctatccgaaacccgggaccctgaggaaatcagcgtgacagtgaaagctttcatgacagcggacctcccgaatgaattaatcgaactgctcgagaagatagtgttggataactccgtgttctcagaacatcgaaacctccagaatctcttaatactcacagcgattaaggcagatcgaactagggtgatggagtatatcagcaggctggataattatgatgctttagatattgcgagcatcgctgtctcctcggccctgtacgaagaggcctttaccgttttccacaaattcgatatgaacgccagcgcaatccaggtgctgatagagcatatcggcaacctcgacagagcttatgaattcgccgagcggtgcaacgagcctgctgtgtggagccaactggcacaggcgcagctacaaaaggatcttgtaaaggaggccattaacagctatattaggggggatgacccgtcgtcataccttgaagtggtccagagcgcttcacgatccaataattgggaagaccttgttaagtttttgcagatggctaggaaaaagggaagggagagctacatcgaaacagagttaatctttgctcttgccaagacgtctcgtgtgagtgagttagaagactttattaacggcccaaataacgctcacatacagcaagtcggggataggtgctatgaagagggcatgtatgaagccgcaaagttattgtatagtaatgtctccaacttcgccagactggccagtacactggtacatctgggtgagtaccaagctgcagtagacaacagcagaaaagcttcttcgacccggacttggaaggaagtgtgttttgcttgcatggatggacaggagtttcgtttcgcccaattgtgcggactccatattgtcatccatgccgacgaactcgaggagctcatgtgctactaccaagatcggggatactttgaagagctcatcctcctgctagaggctgcccttggtctggaaagggctcatatggggatgttcactgagctggccatcctgtattccaagttcaagccacaaaagatgctggagcacctagaactcttctggagtcgggtgaacatccctaaggtcctcagagcagccgagcaagctcatctctgggccgaacttgtcttcctatatgacaagtacgaggaatatgacaatgcggtccttactatgatgagccaccctaccgaggcgtggaaagaaggtcagttcaaggacatcatcacaaaggttgctaatgtcgaattgtgctaccgggctctgcaattttacctggattacaagcctcttctcatcaatgacttgctactcgtgttgtcacccagactggatcacacatggaccgtgagcttctttagcaaagccggacagctgcccctggtgaaaccgtacctgcgctctgtgcagtcacataataacaaatccgtgaatgaagcattaaaccatttactcaccgaagaggaggattatcaaggtcttcgagcttctatcgatgcatacgataactttgataacatatcccttgctcaacagcttgagaaacaccaactgatggaatttcgctgtattgccgcttacttgtataagggcaataactggtgggctcagtcggtcgaactgtgcaagaaagaccacctgtataaggatgccatgcagcacgccgcagaaagtcgcgatgcagaactggcacaaaagttattgcagtggttcctggaggagggcaaacgcgaatgctttgctgcctgcctcttcacttgctacgaccttttgaggccggatatggtgttagagctcgcgtggaggcataacctggtggacctggccatgccatactttatccaggtgatgcgcgagtacctctccaaagttgataagcttgatgcccttgagagtttgaggaagcaggaggagcatgttactgagcccgctcctctggtcttcgatttcgacggtcatgagtag

SEQ ID NO: 170315 - DNA, 5513 bp, Artificial Sequence
  derived and/or modified sequence
cggtcagcccgcgcgaggggtcggcgttcattcctgccgctgccgccgccgccgccgaggtcccgcaccagccatggcgcagatcctccctgttcgctttcaggagcacttccagctccaaaaccttggaattaatccagctaacattggattcagcacactgaccatggaatctgacaagttcatatgtatccgagagaaagttggtgagcaggcacaggtcacgatcattgacatgagtgacccaatggctccgatccgacggcctatctctgcagagagtgccatcatgaatccagcctctaaggtgatagctctgaaagctgggaagacacttcagatctttaatattgagatgaagagtaaaatgaaggctcatactatggcagaagaagtgattttctggaaatgggtttctgtgaacactgttgccttggtgaccgagaccgcggtctaccactggagcatggaaggtgactcccagcccatgaagatgtttgatagacataccagtctggtgggctgccaggtgattcactaccggactgatgagtaccagaagtggctgctgctcgtaggcatctcggctcagcaaaaccgtgtggttggagcaatgcagctctactctgtggataggaaggtttcacaacccatagaaggccatgctgcggcttttgcagagttcaagatggaggggaatgccaagcctgccacccttttctgctttgctgtacgtaatcccacaggaggcaagttgcacatcattgaagttggacagcctgcagcgggaaaccaaccttttgtaaagaaagcagtagatgtgttttttcctccagaggcacagaatgattttccagtggctatgcagattggagctaaacatggtgttatttacttgatcacaaagtatggctatcttcatctgtacgacctagagtctggcgtgtgcatctgcatgaaccgtattagtgctgacacaatatttgtcactgctccacacaaaccaacctctggaattattggtgtcaacaaaaagggacaggtactgtcagtttgtgttgaggaagataacattgtgaattatgcaaccaacgtgcttcagaatccagaccttggtctgcgtttggccgttcgtagtaacctggctggggcagagaagttgtttgtgagaaaattcaataccctctttgcacagggcagctatgctgaagccgccaaagttgcagcgtctgcaccaaagggaatcctgcgtaccagagagacggtccagaaattccagagtatacccgctcagtctggccaggcttctccattgctgcagtacttcggaatcctgctcgaccagggtcagctcaataaacttgaatccttagaactttgccatctggttcttcagcaggggcgtaagcaactcctagagaagtggctgaaagaagataagctggagtgctcagaggagctcggagacttggtcaaaaccactgaccccatgctcgctctgagtgtgtaccttcgggcaaatgtgccaagcaaagtgatccagtgttttgcagaaacaggccaattccagaaaattgtgctctatgccaaaaaggttgggtacaccccagactggatctttctgctgaggggtgtaatgaagatcagtccggaacagggcctgcagttttctcgaatgctagtgcaggacgaggagccgctggccaacattagccagattgtggacattttcatggaaaacagtttaattcagcagtgtacttccttcttattggatgccttgaagaataatcgcccagctgagggactcctgcagacatggctgttggagatgaaccttgttcatgcaccccaggttgcagatgccatccttggaaataaaatgtttactcattacgaccgggcccacattgcccagctctgtgagaaggcaggcctcctgcagcaagcactggagcactacaccgacctctatgacatcaagagggctgtggtccacactcacctcctcaatcccgagtggcttgtcaatttctttggctccttatcggtggaggattctgtggagtgtctgcatgccatgctgtctgctaacatcagacagaaccttcagctgtgtgtgcaggtggcctctaagtaccacgagcagctgggcacgcaggccctggtggagctctttgaatccttcaagagttacaaaggcctcttctacttcctgggctcaatcgtgaacttcagccaagacccagatgtgcatctgaaatacattcaggctgcctgtaagacagggcagatcaaggaggtggagaggatatgccgagagagcagctgctacaacccagagcgtgtgaagaacttcctgaaggaggccaagctcacagaccagcttcccctcatcatcgtgtgtgatcgttttggctttgtccatgaccttgtcctatatttataccgcaacaacctgcagaggtacattgagatctacgtgcagaaggtcaaccctagccggaccccagctgtgattggagggctgcttgatgtggattgttctgaggaagtgattaaacacttaatcatggcagtgagaggacagttctctactgatgagttggtggctgaagtagaaaaaagaaataggctcaagctgctgcttccctggctggagtcccagattcaggaaggctgtgaggagcctgccactcacaatgcactggctaaaatctacatcgacagcaacaacagccccgagtgcttcctgagagagaatgcctactatgacagcagcgtggtgggccgctactgtgagaagcgagacccccatctggcctgtgttgcctatgagcgggggcagtgtgaccttgagctcatcaaggtgtgcaatgagaattctctgttcaaaagcgaggcccgctacctggtatgcagaaaggatccggagctctgggctcacgtccttgaggagaccaacccatccaggagacagctaattgaccaggtggtacagacagcattgtcagaaacacgggatcctgaagagatttcggtcactgtcaaagcctttatgacagccgacctgcctaatgaactgattgaactgctggagaagatagttctggataactctgtcttcagcgagcacaggaatctacagaatctgttgatcctgactgccatcaaggcagaccgcacacgggtcatggagtacatcagccgcctggacaactatgacgcactggacatcgcgagcatcgctgtcagcagcgcactgtatgaggaggccttcaccgttttccacaagtttgatatgaatgcctcagcaatccaggtcctgatcgagcacattggaaacctggaccgggcatatgagtttgcggagagatgcaatgagcctgctgtgtggagtcagctggcccaagcccagctccagaaagatttggtgaaggaagccatcaactcctatatcagaggggacgacccttcctcttacctggaagttgttcagtcagccagcaggagcaacaactgggaggatctagttaaatttctgcagatggccaggaaaaagggccgtgagtcctatatagagactgaacttatttttgccttggctaaaaccagccgtgtttctgagctagaagattttattaatggacccaacaatgcccacatccagcaggttggagaccgctgttacgaggagggaatgtacgaggctgccaagctgctctatagcaatgtttctaactttgcccgcctggcttccaccttggttcacctcggtgagtatcaggcagcagtggacaacagccgcaaggccagcagcacccggacgtggaaggaggtgtgctttgcctgcatggatggacaagagttccgcttcgcacagctgtgtggtcttcacatcgtcattcatgcagatgagctggaggagctgatgtgctattaccaggatcgtggctactttgaggagctgatcttgctgttggaagcggccctgggcctggagcgggcccacatgggcatgttcactgagctggccatcctctactccaaattcaagccacagaagatgctggagcatctggagcttttctggtcccgtgtcaacatcccaaaggtgctgagggctgcagagcaggcacacctgtgggctgagctggtgttcctctatgacaagtacgaggagtatgacaatgctgtgctcaccatgatgagccaccccactgaggcctggaaggagggtcagttcaaggacatcattaccaaggttgccaacgtcgagctctgttacagagccctgcagttctatttggattacaaaccactgctcatcaatgacctgctgctggtgctttcaccccggctggaccacacctggacagtcagtttcttttcaaaggcaggtcagctgcccctggtgaagccttacctgcggtcagtccagagccacaacaacaagagtgtgaatgaggcactcaaccacctgctgacagaggaggaggactatcagggcttaagggcatctatcgatgcctatgacaactttgacaacatcagcctggctcagcagctggagaagcatcagctgatggagttcaggtgcattgcggcctatctgtacaagggcaataactggtgggcccagagcgtggagctctgcaagaaggatcatctctacaaggatgccatgcagcatgctgcagagtcgcgggatgctgagctggcccagaagttgctgcagtggttcctggaggaaggcaagagggagtgcttcgcagcttgtctcttcacctgctatgacctgcttcgcccagacatggtgcttgagctggcctggaggcacaacctcgtggacttggccatgccctacttcatccaggtgatgagggagtacctgagcaaggtggacaaactggatgccttggagagtctgcgcaagcaagaggagcatgtgacagagcctgcccctctcgtgtttgattttgatgggcatgaatgagacccagctgattgcactaagccctgccgtgggcccagcccctgccagcttcccctatggatatgcctctgctcccaacttcgccagcctccaatgtacaacttccgcgtgtagtgggcgttgtcaccacccaccctacctgcagagttactaacttctccaaggagcatgtcactccagcagcacaggggacgcaatgggaggcagggacacctggacaatatttatttttgctgaaacccaatgacggcaacctctgagccatcccagagcctggggaggccagggtagaggctgacggcgcaagaccagctttagccgacaacagagactggactgtgggccctcctgctggagccaggccttcctcctgggcgcctccgactggctggagctgccccctccaggccagtttgaagactacatgaacacgtcttgtttggaggtaccggacctcataaaaggactctcagcctcttggcaatcataaatattaaagtcggtttatccaggcaaa

SEQ ID NO: 170316 - DNA, 5512 bp, Artificial Sequence
  derived and/or modified sequence
accggtcagcccgcgcgaggggtcggcgttcattcctgccgctgccgccgccgccgccgaggtcccgcaccagccatggcgcagatcctccctgttcgctttcaggagcacttccagctccaaaaccttggaattaatccagctaacattggattcagcacactgaccatggaatctgacaagttcatatgtatccgagagaaagttggtgagcaggcacaggtcacgatcattgacatgagtgacccaatggctccgatccgacggcctatctctgcagagagtgccatcatgaatccagcctctaaggtgatagctctgaaagctgggaagacacttcagatctttaatattgagatgaagagtaaaatgaaggctcatactatggcagaagaagtgattttctggaaatgggtttctgtgaacactgttgccttggtgaccgagaccgcggtctaccactggagcatggaaggtgactcccagcccatgaagatgtttgatagacataccagtctggtgggctgccaggtgattcactaccggactgatgagtaccagaagtggctgctgctcgtaggcatctcggctcagcaaaaccgtgtggttggagcaatgcagctctactctgtggataggaaggtttcacaacccatagaaggccatgctgcggcttttgcagagttcaagatggaggggaatgccaagcctgccacccttttctgctttgctgtacgtaatcccacaggaggcaagttgcacatcattgaagttggacagcctgcagcgggaaaccaaccttttgtaaagaaagcagtagatgtgttttttcctccagaggcacagaatgattttccagtggctatgcagattggagctaaacatggtgttatttacttgatcacaaagtatggctatcttcatctgtacgacctagagtctggcgtgtgcatctgcatgaaccgtattagtgctgacacaatatttgtcactgctccacacaaaccaacctctggaattattggtgtcaacaaaaagggacaggtactgtcagtttgtgttgaggaagataacattgtgaattatgcaaccaacgtgcttcagaatccagaccttggtctgcgtttggccgttcgtagtaacctggctggggcagagaagttgtttgtgagaaaattcaataccctctttgcacagggcagctatgctgaagccgccaaagttgcagcgtctgcaccaaagggaatcctgcgtaccagagagacggtccagaaattccagagtatacccgctcagtctggccaggcttctccattgctgcagtacttcggaatcctgctcgaccagggtcagctcaataaacttgaatccttagaactttgccatctggttcttcagcaggggcgtaagcaactcctagagaagtggctgaaagaagataagctggagtgctcagaggagctcggagacttggtcaaaaccactgaccccatgctcgctctgagtgtgtaccttcgggcaaatgtgccaagcaaagtgatccagtgttttgcagaaacaggccaattccagaaaattgtgctctatgccaaaaaggttgggtacaccccagactggatctttctgctgaggggtgtaatgaagatcagtccggaacagggcctgcagttttctcgaatgctagtgcaggacgaggagccgctggccaacattagccagattgtggacattttcatggaaaacagtttaattcagcagtgtacttccttcttattggatgccttgaagaataatcgcccagctgagggactcctgcagacatggctgttggagatgaaccttgttcatgcaccccaggttgcagatgccatccttggaaataaaatgtttactcattacgaccgggcccacattgcccagctctgtgagaaggcaggcctcctgcagcaagcactggagcactacaccgacctctatgacatcaagagggctgtggtccacactcacctcctcaatcccgagtggcttgtcaatttctttggctccttatcggtggaggattctgtggagtgtctgcatgccatgctgtctgctaacatcagacagaaccttcagctgtgtgtgcaggtggcctctaagtaccacgagcagctgggcacgcaggccctggtggagctctttgaatccttcaagagttacaaaggcctcttctacttcctgggctcaatcgtgaacttcagccaagacccagatgtgcatctgaaatacattcaggctgcctgtaagacagggcagatcaaggaggtggagaggatatgccgagagagcagctgctacaacccagagcgtgtgaagaacttcctgaaggaggccaagctcacagaccagcttcccctcatcatcgtgtgtgatcgttttggctttgtccatgaccttgtcctatatttataccgcaacaacctgcagaggtacattgagatctacgtgcagaaggtcaaccctagccggaccccagctgtgattggagggctgcttgatgtggattgttctgaggaagtgattaaacacttaatcatggcagtgagaggacagttctctactgatgagttggtggctgaagtagaaaaaagaaataggctcaagctgctgcttccctggctggagtcccagattcaggaaggctgtgaggagcctgccactcacaatgcactggctaaaatctacatcgacagcaacaacagccccgagtgcttcctgagagagaatgcctactatgacagcagcgtggtgggccgctactgtgagaagcgagacccccatctggcctgtgttgcctatgagcgggggcagtgtgaccttgagctcatcaaggtgtgcaatgagaattctctgttcaaaagcgaggcccgctacctggtatgcagaaaggatccggagctctgggctcacgtccttgaggagaccaacccatccaggagacagctaattgaccaggtggtacagacagcattgtcagaaacacgggatcctgaagagatttcggtcactgtcaaagcctttatgacagccgacctgcctaatgaactgattgaactgctggagaagatagttctggataactctgtcttcagcgagcacaggaatctacagaatctgttgatcctgactgccatcaaggcagaccgcacacgggtcatggagtacatcagccgcctggacaactatgacgcactggacatcgcgagcatcgctgtcagcagcgcactgtatgaggaggccttcaccgttttccacaagtttgatatgaatgcctcagcaatccaggtcctgatcgagcacattggaaacctggaccgggcatatgagtttgcggagagatgcaatgagcctgctgtgtggagtcagctggcccaagcccagctccagaaagatttggtgaaggaagccatcaactcctatatcagaggggacgacccttcctcttacctggaagttgttcagtcagccagcaggagcaacaactgggaggatctagttaaatttctgcagatggccaggaaaaagggccgtgagtcctatatagagactgaacttatttttgccttggctaaaaccagccgtgtttctgagctagaagattttattaatggacccaacaatgcccacatccagcaggtcggggaccgctgttacgaggagggaatgtacgaggctgccaagctgctctatagcaatgtttctaactttgcccgcctggcttccaccttggttcacctcggtgagtatcaggcagcagtggacaacagccgcaaggccagcagcacccggacgtggaaggaggtgtgctttgcctgcatggatggacaagagttccgcttcgcacagctgtgtggtcttcacatcgtcattcatgcagatgagctggaggagctgatgtgctattaccaggatcgtggctactttgaggagctgatcttgctgttggaagcggccctgggcctggagcgggcccacatgggcatgttcactgagctggccatcctctactccaaattcaagccacagaagatgctggagcatctggagcttttctggtcccgtgtcaacatcccaaaggtgctgagggctgcagagcaggcacacctgtgggctgagctggtgttcctctatgacaagtacgaggagtatgacaatgctgtgctcaccatgatgagccaccccactgaggcctggaaggagggtcagttcaaggacatcattaccaaggttgccaacgtcgagctctgttacagagccctgcagttctatttggattacaaaccactgctcatcaatgacctgctgctggtgctttcaccccggctggaccacacctggacagtcagtttcttttcaaaggcaggtcagctgcccctggtgaagccttacctgcggtcagtccagagccacaacaacaagagtgtgaatgaggcactcaaccacctgctgacagaggaggaggactatcagggcttaagggcatctatcgatgcctatgacaactttgacaacatcagcctggctcagcagctggagaagcatcagctgatggagttcaggtgcattgcggcctatctgtacaagggcaataactggtgggcccagagcgtggagctctgcaagaaggatcatctctacaaggatgccatgcagcatgctgcagagtcgcgggatgctgagctggcccagaagttgctgcagtggttcctggaggaaggcaagagggagtgcttcgcagcttgtctcttcacctgctatgacctgcttcgcccagacatggtgcttgagctggcctggaggcacaacctcgtggacttggccatgccctacttcatccaggtgatgagggagtacctgagcaaggtggacaaactggatgccttggagagtctgcgcaagcaagaggagcatgtgacagagcctgcccctctcgtgtttgattttgatgggcatgaatgagacccagctgattgcactaagccctgccgtgggcccagcccctgccagcttcccctatggatatgcctctgctcccaacttcgccagcctccaatgtacaacttccgcgtgtagtgggcgttgtcaccacccaccctacctgcagagttactaacttctccaaggagcatgtcactccagcagcacaggggacgcaatgggaggcagggacacctggacaatatttatttttgctgaaacccaatgacggcaacctctgagccatcccagagcctggggaggccagggtagaggctgacggcgcaagaccagctttagccgacaacagagactggactgtgggccctcctgctggagccaggccttcctcctgggcgcctccgactggctggagctgccccctccaggccagtttgaagactacatgaacacgtcttgtttggaggtaccggacctcataaaaggactctcagcctcttggcaatcataaatattaaagtcggtttatccaggc

SEQ ID NO: 170317 - DNA, 4923 bp, Artificial Sequence
  derived and/or modified sequence
atggcccagatcctgcccgtgagattccaggagcacttccagctgcagaacctgggcatcaaccccgccaacatcggcttcagcaccctgaccatggagagcgacaagttcatctgcatcagagagaaggtgggcgagcaggcccaggtgaccatcatcgacatgagcgaccccatggcccccatcagaagacccatcagcgccgagagcgccatcatgaaccccgccagcaaggtgatcgccctgaaggccggcaagaccctgcagatcttcaacatcgagatgaagagcaagatgaaggcccacaccatggccgaggaggtgatcttctggaagtgggtgagcgtgaacaccgtggccctggtgaccgagaccgccgtgtaccactggagcatggagggcgacagccagcccatgaagatgttcgacagacacaccagcctggtgggctgccaggtgatccactacagaaccgacgagtaccagaagtggctgctgctggtgggcatcagcgcccagcagaacagagtggtgggcgccatgcagctgtacagcgtggacagaaaggtgagccagcccatcgagggccacgccgccgccttcgccgagttcaagatggagggcaacgccaagcccgccaccctgttctgcttcgccgtgagaaaccccaccggcggcaagctgcacatcatcgaggtgggccagcccgccgccggcaaccagcccttcgtgaagaaggccgtggacgtgttcttcccccccgaggcccagaacgacttccccgtggccatgcagatcggcgccaagcacggcgtgatctacctgatcaccaagtacggctacctgcacctgtacgacctggagagcggcgtgtgcatctgcatgaacagaatcagcgccgacaccatcttcgtgaccgccccccacaagcccaccagcggcatcatcggcgtgaacaagaagggccaggtgctgagcgtgtgcgtggaggaggacaacatcgtgaactacgccaccaacgtgctgcagaaccccgacctgggcctgagactggccgtgagaagcaacctggccggcgccgagaagctgttcgtgagaaagttcaacaccctgttcgcccagggcagctacgccgaggccgccaaggtggccgccagcgcccccaagggcatcctgagaaccagagagaccgtgcagaagttccagagcatccccgcccagagcggccaggccagccccctgctgcagtacttcggcatcctgctggaccagggccagctgaacaagctggagagcctggagctgtgccacctggtgctgcagcagggcagaaagcagctgctggagaagtggctgaaggaggacaagctggagtgcagcgaggagctgggcgacctggtgaagaccaccgaccccatgctggccctgagcgtgtacctgagagccaacgtgcccagcaaggtgatccagtgcttcgccgagaccggccagttccagaagatcgtgctgtacgccaagaaggtgggctacacccccgactggatcttcctgctgagaggcgtgatgaagatcagccccgagcagggcctgcagttcagcagaatgctggtgcaggacgaggagcccctggccaacatcagccagatcgtggacatcttcatggagaacagcctgatccagcagtgcaccagcttcctgctggacgccctgaagaacaacagacccgccgagggcctgctgcagacctggctgctggagatgaacctggtgcacgccccccaggtggccgacgccatcctgggcaacaagatgttcacccactacgacagagcccacatcgcccagctgtgcgagaaggccggcctgctgcagcaggccctggagcactacaccgacctgtacgacatcaagagagccgtggtgcacacccacctgctgaaccccgagtggctggtgaacttcttcggcagcctgagcgtggaggacagcgtggagtgcctgcacgccatgctgagcgccaacatcagacagaacctgcagctgtgcgtgcaggtggccagcaagtaccacgagcagctgggcacccaggccctggtggagctgttcgagagcttcaagagctacaagggcctgttctacttcctgggcagcatcgtgaacttcagccaggaccccgacgtgcacctgaagtacatccaggccgcctgcaagaccggccagatcaaggaggtggagagaatctgcagagagagcagctgctacaaccccgagagagtgaagaacttcctgaaggaggccaagctgaccgaccagctgcccctgatcatcgtgtgcgacagattcggcttcgtgcacgacctggtgctgtacctgtacagaaacaacctgcagagatacatcgagatctacgtgcagaaggtgaaccccagcagaacccccgccgtgatcggcggcctgctggacgtggactgcagcgaggaggtgatcaagcacctgatcatggccgtgagaggccagttcagcaccgacgagctggtggccgaggtggagaagagaaacagactgaagctgctgctgccctggctggagagccagatccaggagggctgcgaggagcccgccacccacaacgccctggccaagatctacatcgacagcaacaacagccccgagtgcttcctgagagagaacgcctactacgacagcagcgtggtgggcagatactgcgagaagagagacccccacctggcctgcgtggcctacgagagaggccagtgcgacctggagctgatcaaggtgtgcaacgagaacagcctgttcaagagcgaggccagatacctggtgtgcagaaaggaccccgagctgtgggcccacgtgctggaggagaccaaccccagcagaagacagctgatcgaccaggtggtgcagaccgccctgagcgagaccagagaccccgaggagatcagcgtgaccgtgaaggccttcatgaccgccgacctgcccaacgagctgatcgagctgctggagaagatcgtgctggacaacagcgtgttcagcgagcacagaaacctgcagaacctgctgatcctgaccgccatcaaggccgacagaaccagagtgatggagtacatcagcagactggacaactacgacgccctggacatcgccagcatcgccgtgagcagcgccctgtacgaggaggccttcaccgtgttccacaagttcgacatgaacgccagcgccatccaggtgctgatcgagcacatcggcaacctggacagagcctacgagttcgccgagagatgcaacgagcccgccgtgtggagccagctggcccaggcccagctgcagaaggacctggtgaaggaggccatcaacagctacatcagaggcgacgaccccagcagctacctggaggtggtgcagagcgccagcagaagcaacaactgggaggacctggtgaagttcctgcagatggccagaaagaagggcagagagagctacatcgagaccgagctgatcttcgccctggccaagaccagcagagtgagcgagctggaggacttcatcaacggccccaacaacgcccacatccagcaggtgggcgacagatgctacgaggagggcatgtacgaggccgccaagctgctgtacagcaacgtgagcaacttcgccagactggccagcaccctggtgcacctgggcgagtaccaggccgccgtggacaacagcagaaaggccagcagcaccagaacctggaaggaggtgtgcttcgcctgcatggacggccaggagttcagattcgcccagctgtgcggcctgcacatcgtgatccacgccgacgagctggaggagctgatgtgctactaccaggacagaggctacttcgaggagctgatcctgctgctggaggccgccctgggcctggagagagcccacatgggcatgttcaccgagctggccatcctgtacagcaagttcaagccccagaagatgctggagcacctggagctgttctggagcagagtgaacatccccaaggtgctgagagccgccgagcaggcccacctgtgggccgagctggtgttcctgtacgacaagtacgaggagtacgacaacgccgtgctgaccatgatgagccaccccaccgaggcctggaaggagggccagttcaaggacatcatcaccaaggtggccaacgtggagctgtgctacagagccctgcagttctacctggactacaagcccctgctgatcaacgacctgctgctggtgctgagccccagactggaccacacctggaccgtgagcttcttcagcaaggccggccagctgcccctggtgaagccctacctgagaagcgtgcagagccacaacaacaagagcgtgaacgaggccctgaaccacctgctgaccgaggaggaggactaccagggcctgagagccagcatcgacgcctacgacaacttcgacaacatcagcctggcccagcagctggagaagcaccagctgatggagttcagatgcatcgccgcctacctgtacaagggcaacaactggtgggcccagagcgtggagctgtgcaagaaggaccacctgtacaaggacgccatgcagcacgccgccgagagcagagacgccgagctggcccagaagctgctgcagtggttcctggaggagggcaagagagagtgcttcgccgcctgcctgttcacctgctacgacctgctgagacccgacatggtgctggagctggcctggagacacaacctggtggacctggccatgccctacttcatccaggtgatgagagagtacctgagcaaggtggacaagctggacgccctggagagcctgagaaagcaggaggagcacgtgaccgagcccgcccccctggtgttcgacttcgacggccacgagtag

SEQ ID NO: 170318 - protein, 158 aa, Artificial Sequence
  derived and/or modified sequence
MAEQATKSVLFVCLGNICRSPIAEAVFRKLVTDQNISENWVIDSGAVSDWNVGRSPDPRAVSCLRNHGIHTAHKARQITKEDFATFDYILCMDESNLRDLNRKSNQVKTCKAKIELLGSYDPQKQLIIEDPYYGNDSDFETVYQQCVRCCRAFLEKAH

SEQ ID NO: 170319 - DNA, 477 bp, Artificial Sequence
  derived and/or modified sequence
atggcggaacaagcaactaagtcggtactcttcgtatgcctaggaaatatctgccgctcacctattgccgaagcggtattcaggaaactggttaccgaccaaaacatctccgagaattgggtgattgattcgggggccgtgtctgactggaatgtggggagaagcccggatcccagggccgtatcttgcttgcggaatcatgggatccataccgcccacaaggcccgccagatcactaaagaggatttcgctactttcgattacatcctttgtatggacgaatctaatttgcgtgatctcaaccgaaagagtaatcaggttaagacctgcaaagctaaaatcgagctgctggggagctacgaccctcagaagcaacttatcatagaggatccatattatggcaacgattcagactttgagactgtttaccagcagtgtgtgaggtgctgcagagcctttctcgaaaaggcacactag

SEQ ID NO: 170320 - DNA, 477 bp, Artificial Sequence
  derived and/or modified sequence
atggccgagcaggccaccaagtctgtgctgtttgtgtgcctgggcaacatctgccgcagccccatcgccgaggccgtgttcaggaagctggtgacagaccagaacatcagcgagaactgggtgattgacagcggggctgtgtctgactggaatgtgggccgcagcccagaccccagggctgtgtcctgcctgagaaatcatggcatccacacagcccacaaggcccggcagatcaccaaggaggactttgccacctttgactacatcctgtgcatggatgagagcaacctgcgggacctgaacaggaagagcaaccaggtgaagacctgcaaggccaagattgagctgctgggcagctatgacccccagaagcagctgatcatcgaggacccctactatggaaatgacagcgactttgaaacagtgtaccagcagtgtgtgcgctgctgccgggccttcctggagaaggcccactag

SEQ ID NO: 170321 - DNA, 477 bp, Artificial Sequence
  derived and/or modified sequence
atggccgagcaggccaccaagagcgtgctgttcgtgtgcctgggcaacatctgtaggtcaccaattgcggaagccgtgttcaggaagctggtgactgaccagaacattagtgagaactgggtgattgactcaggcgcagtttcagattggaacgttgggaggagccctgacccgcgcgctgtctcctgtctgcgcaatcacggcattcataccgcccataaggccagacaaatcacgaaggaagattttgccacctttgattacatactctgtatggacgagagcaatctccgagatctgaaccggaagtcaaatcaggtgaaaacgtgtaaggcaaaaatcgaactgcttgggtcctatgacccacaaaagcaattaattatagaggatccgtactacggtaatgattctgatttcgagacagtgtaccagcagtgcgtgagatgctgcagggctttcttagagaaagctcattag

SEQ ID NO: 170322 - DNA, 477 bp, Artificial Sequence
  derived and/or modified sequence
atggcagaacaagctacaaagtcggtgctgttcgtctgtctgggaaatatctgtcgcagccccattgctgaggctgtgttcagaaagctcgtgaccgaccagaacatcagcgaaaactgggtcatcgatagcggcgctgtgagcgactggaacgtcgggagaagccccgaccctcgagctgtcagctgcctaaggaaccacgggattcataccgcccataaggcccgacagattactaaggaggacttcgccaccttcgactatatcttgtgcatggacgaatcgaatttgagagatctaaatcggaagagcaatcaggtaaagacctgtaaggcaaagatcgagctgctaggtagctatgacccccagaagcaactgatcattgaagacccttactatggaaatgatagcgattttgagacggtgtatcagcagtgcgtgcgttgctgtagggccttcctggaaaaggcacattag

SEQ ID NO: 170323 - DNA, 1552 bp, Artificial Sequence
  derived and/or modified sequence
actgcgcaggcgcgcggggcaagagggtggcagtgcgcctgcgccgcgtcggcgtgcggaacgccgcggtgtctcggcgcctctgcgcgcgggaagatggcggaacaggctaccaagtccgtgctgtttgtgtgtctgggtaacatttgtcgatcacccattgcagaagcagttttcaggaaacttgtaaccgatcaaaacatctcagagaattgggtcattgacagcggtgctgtttctgactggaacgtgggccggtccccagacccaagagctgtgagctgcctaagaaatcatggcattcacacagcccataaagcaagacagattaccaaagaagattttgccacatttgattatatactatgtatggatgaaagcaatctgagagatttgaatagaaaaagtaatcaagttaaaacctgcaaagctaaaattgaactacttgggagctatgatccacaaaaacaacttattattgaagatccctattatgggaatgactctgactttgagacggtgtaccagcagtgtgtcaggtgctgcagagcgttcttggagaaggcccactgaggcaggttcgtgccctgctgcggccagcctgactagaccccaccctgaggtcctgcatttctcagtcggtgtgtaatcacgttccagggcccaaagcccagctctttgttcagttgacttactgtttcttaccttaaaaagtaattgtagatggaaatcagttgtgtttggcaggagaatcaataaaaatctttgattcagacagcttatggggtattttaagcattcttagactagttgaacatctcactttgccccagttacaaaaatagtagaacaagcaacataaaacaatgaaggaaaacctcacttgaaggcccaggtcaacatctaagcctgttgagacttagataatcgagtctacctcttcagtaggtttgtgtggatggcctggagggcaggtgccctctgctccccagtgctacctctctcttccctagggccttttgtggattgacagtagtcccctccgtaggagctcacagtctagattagaagtgttttaatttctacacacccatagtgcacacttgtatattgaaaagatagggaagagagaaacatttatggaatcagtcgttggcaccttcaatacttcatgatttttgtcgagtttacttcatgaggaggtcagcccattggctcccatctgaaccactttgcctctgaaacttaattacatccagaaagaaggacacttgtatgctagtctatggtcagttgaggaatatgactgtttttatatgcacatgtaacccaaatgtccaatataaattggcttattttttaaaataattttaaaagttgggaaaagtgttattatttggcatgcttaaatattgaataagtattcttcatcagcatttaataaatgtataggcagatgtaaggtaatttctgtgtattttgagataatgtcaaaatcatgaatatttcaaaataaactggggagttataaaaatacaactagagatataaa

SEQ ID NO: 170324 - DNA, 574 bp, Artificial Sequence
  derived and/or modified sequence
atggcggaacaggctaccaagtccgtgctgtttgtgtgtctgggtaacatttgtcgatcacccattgcagaagcagttttcaggaaacttgtaaccgatcaaaacatctcagagaattggagggtagacagcgcggcaacttccggtgggtcattgacagcggtgctgtttctgactggaacgtgggccggtccccagaccaagagctgtgctgcctaagaaatcatggcattcacacagcccataaagcaagacagattaccaaagaagattttgccacatttgattatatactatgtatggatgaaagcaatctgagagatttgaatagaaaaagtaatcaagttaaaacctgcaaagctaaaattgaactacttgggagctatgatccacaaaaacaacttattattgaagatccctattatgggaatgactctgactttgagacggtgtaccagcagtgtgtcaggtgctgcagagcgttcttggagaaggcccactgaggcaggttcgtgccctgctgcggccagcctgactagaccccaccctgaggtcctgcatttctcagtcggtg

SEQ ID NO: 170325 - DNA, 477 bp, Artificial Sequence
  derived and/or modified sequence
atggccgagcaggccaccaagagcgtgctgttcgtgtgcctgggcaacatctgcagaagccccatcgccgaggccgtgttcagaaagctggtgaccgaccagaacatcagcgagaactgggtgatcgacagcggcgccgtgagcgactggaacgtgggcagaagccccgaccccagagccgtgagctgcctgagaaaccacggcatccacaccgcccacaaggccagacagatcaccaaggaggacttcgccaccttcgactacatcctgtgcatggacgagagcaacctgagagacctgaacagaaagagcaaccaggtgaagacctgcaaggccaagatcgagctgctgggcagctacgacccccagaagcagctgatcatcgaggacccctactacggcaacgacagcgacttcgagaccgtgtaccagcagtgcgtgagatgctgcagagccttcctggagaaggcccactag

SEQ ID NO: 170326 - protein, 464 aa, Artificial Sequence
  derived and/or modified sequence
MLATRRLLGWSLPARVSVRFSGDTTAPKKTSFGSLKDEDRIFTNLYGRHDWRLKGSLSRGDWYKTKEILLKGPDWILGEIKTSGLRGRGGAGFPTGLKWSFMNKPSDGRPKYLVVNADEGEPGTCKDREILRHDPHKLLEGCLVGGRAMGARAAYIYIRGEFYNEASNLQVAIREAYEAGLIGKNACGSGYDFDVFVVRGAGAYICGEETALIESIEGKQGKPRLKPPFPADVGVFGCPTTVANVETVAVSPTICRRGGTWFAGFGRERNSGTKLFNISGHVNHPCTVEEEMSVPLKELIEKHAGGVTGGWDNLLAVIPGGSSTPLIPKSVCETVLMDFDALVQAQTGLGTAAVIVMDRSTDIVKAIARLIEFYKHESCGQCTPCREGVDWMNKVMARFVRGDARPAEIDSLWEISKQIEGHTICALGDGAAWPVQGLIRHFRPELEERMQRFAQQHQARQAAS

SEQ ID NO: 170327 - protein, 457 aa, Artificial Sequence
  derived and/or modified sequence
MLATRRLLGWSLPARVSTAPKKTSFGSLKDEDRIFTNLYGRHDWRLKGSLSRGDWYKTKEILLKGPDWILGEIKTSGLRGRGGAGFPTGLKWSFMNKPSDGRPKYLVVNADEGEPGTCKDREILRHDPHKLLEGCLVGGRAMGARAAYIYIRGEFYNEASNLQVAIREAYEAGLIGKNACGSGYDFDVFVVRGAGAYICGEETALIESIEGKQGKPRLKPPFPADVGVFGCPTTVANVETVAVSPTICRRGGTWFAGFGRERNSGTKLFNISGHVNHPCTVEEEMSVPLKELIEKHAGGVTGGWDNLLAVIPGGSSTPLIPKSVCETVLMDFDALVQAQTGLGTAAVIVMDRSTDIVKAIARLIEFYKHESCGQCTPCREGVDWMNKVMARFVRGDARPAEIDSLWEISKQIEGHTICALGDGAAWPVQGLIRHFRPELEERMQRFAQQHQARQAAS

SEQ ID NO: 170328 - protein, 335 aa, Artificial Sequence
  derived and/or modified sequence
MLATRRLLGWSLPARVSVRFSGDTTAPKKTSFGSLKDEDRIFTNLYGRHDWRLKGSLSRGDWYKTKEILLKGPDWILGEIKTSGLRGRGGAGFPTGLKWSFMNKPSDGSPTTVANVETVAVSPTICRRGGTWFAGFGRERNSGTKLFNISGHVNHPCTVEEEMSVPLKELIEKHAGGVTGGWDNLLAVIPGGSSTPLIPKSVCETVLMDFDALVQAQTGLGTAAVIVMDRSTDIVKAIARLIEFYKHESCGQCTPCREGVDWMNKVMARFVRGDARPAEIDSLWEISKQIEGHTICALGDGAAWPVQGLIRHFRPELEERMQRFAQQHQARQAAS

SEQ ID NO: 170329 - protein, 363 aa, Artificial Sequence
  derived and/or modified sequence
MNKPSDGRPKYLVVNADEGEPGTCKDREILRHDPHKLLEGCLVGGRAMGARAAYIYIRGEFYNEASNLQVAIREAYEAGLIGKNACGSGYDFDVFVVRGAGAYICGEETALIESIEGKQGKPRLKPPFPADVGVFGCPTTVANVETVAVSPTICRRGGTWFAGFGRERNSGTKLFNISGHVNHPCTVEEEMSVPLKELIEKHAGGVTGGWDNLLAVIPGGSSTPLIPKSVCETVLMDFDALVQAQTGLGTAAVIVMDRSTDIVKAIARLIEFYKHESCGQCTPCREGVDWMNKVMARFVRGDARPAEIDSLWEISKQIEGHTICALGDGAAWPVQGLIRHFRPELEERMQRFAQQHQARQAAS

SEQ ID NO: 170330 - DNA, 1395 bp, Artificial Sequence
  derived and/or modified sequence
atgctggcaacacgccgcctcctgggctggagcctccctgcacgggtgtccgtaagattctcaggcgataccactgcaccaaagaaaactagtttcggaagcctcaaagacgaggaccggatttttacaaatctgtacggccgccacgactggaggctcaaaggatctttatcccggggggactggtataagacaaaagagatcctcctcaagggtccagactggatcctaggagagattaaaaccagtggcctgagaggtcggggcggagccggcttcccaacaggactgaagtggagcttcatgaacaaacccagcgatggccgccctaagtatttggtcgtcaacgcggatgaaggagagccggggacttgtaaagaccgtgagatcctgaggcacgatcctcacaaattgttagagggttgcctagtgggaggtcgtgcaatgggtgctcgcgccgcttatatctacatcaggggcgagttttataatgaggcatccaacctgcaggtggcaatcagggaggcctacgaagcaggcctgatcggcaaaaacgcatgtggatccgggtacgatttcgacgtatttgtcgtcagaggagcgggtgcatacatctgcggcgaggaaaccgccctgatcgagtccatcgagggcaaacagggaaagccccgcctgaagccgcccttccctgccgacgtgggtgtcttcggctgccccacaacggtcgccaacgtagagaccgttgcggtgagtcccaccatctgcaggcgtggaggcacctggttcgccggattcggccgtgaaagaaactccgggacaaagctgttcaacatatccggacacgtgaatcatccgtgcacggtcgaggaggaaatgagcgtgcccctgaaggaattgattgagaagcacgccggcggggtcacaggggggtgggacaacttgctcgctgtgattccagggggatcttctacaccactgatccctaaatccgtgtgtgagacagtacttatggactttgacgccctggtccaagcccaaactggacttggaacagccgccgtcatcgttatggaccggtctacagacattgtaaaagctatcgcccgactaatagaattttacaaacatgagtcatgcggtcagtgcacaccatgccgggagggggtggattggatgaataaggtgatggccaggtttgttagaggagatgctcggcccgctgagatcgactccctttgggagatctccaagcagattgagggccacactatctgcgcactgggcgacggggctgcgtggcctgttcagggcctcatcaggcacttcaggccagagctggaagagagaatgcaacgcttcgcacaacagcaccaggcccggcaggccgctagttag

SEQ ID NO: 170331 - DNA, 1374 bp, Artificial Sequence
  derived and/or modified sequence
atgctagctacacgtagacttctcggttggtctctgcctgcaagagtttccacagccccaaaaaagacctcgtttggctcactgaaagatgaggaccgaatcttcacgaacctgtacgggaggcacgactggaggctgaaaggctccctctctagaggagattggtacaaaaccaaggaaatcctcctgaagggcccagactggattctcggagagattaaaacctcaggcctgaggggcaggggaggcgccgggtttccgaccggtcttaaatggagcttcatgaataaaccatccgacgggagacctaagtacttggtggtgaatgccgatgagggagaaccggggacgtgcaaagaccgtgaaatcctgaggcatgaccctcacaagcttctagaggggtgtctggttggggggcgggctatgggagccagagccgcttatatatacatacggggcgaattctataacgaggctagcaatttgcaggtggctatccgtgaggcatacgaagccggcctgattggaaagaatgcttgcggaagcggctacgatttcgacgtgttcgtggtccgtggcgctggggcctacatttgcggggaggaaaccgctttgatagaaagcatcgaagggaagcaaggaaagcccagactgaaacctcctttcccagcagacgttggagttttcgggtgtcccacaactgtagctaacgtggaaacagtggcagtttcacccacaatttgcaggagggggggtacgtggtttgctgggttcggtcgcgaacggaattccggaaccaaactgttcaatatcagcggccacgtaaaccacccgtgcacggtggaggaagaaatgagcgtgcccctaaaggagctcatcgagaagcatgccgggggcgtaaccggtggatgggataacctcctggcagttatacccgggggctccagcactcccctcatcccgaaaagtgtctgtgaaacagtgctcatggacttcgatgccctcgtgcaggcccagacaggactggggacagccgcggtaatcgtgatggaccgatcaacagatatcgttaaggccattgctcgactcatcgaattctacaaacacgaaagttgcggacagtgcactccttgcagagagggagtcgactggatgaacaaggtgatggctaggtttgtgaggggcgatgcgagaccagcagagatagactccctgtgggaaatttcaaaacagatcgaagggcacaccatttgcgccttaggcgatggcgcggcgtggcccgtgcaggggctcatccgtcactttcgccccgagttagaggaacgtatgcaaaggttcgcccagcagcaccaggcacgtcaggctgctagctag

SEQ ID NO: 170332 - DNA, 1395 bp, Artificial Sequence
  derived and/or modified sequence
atgctggccacccggcggctgctgggctggagcctgcctgcccgggtgtctgtgcgcttcagcggggacaccacagcccccaagaagaccagctttggcagcctgaaggatgaggaccgcatcttcaccaacctgtatggaagacatgactggaggctgaagggcagcctgagcagaggagactggtacaagaccaaggagatcctgctgaagggccctgactggatcctgggggagatcaagaccagcggcctgcggggccggggcggggccggcttccccaccggcctgaagtggagcttcatgaacaagcccagtgatggccggcccaagtacctggtggtgaatgctgatgaaggagagcccggcacctgcaaggaccgggagatcctgcggcatgacccccacaagctgctggagggctgcctggtgggcggccgggccatgggcgcccgggccgcctacatctacatccggggggagttctacaatgaggccagcaacctgcaggtggccatccgggaggcctatgaagctggcctcatcggcaagaatgcctgtggcagcggctatgactttgatgtgtttgtggtgagaggagctggggcctacatctgtggggaggagacagccctgattgagagcattgagggcaagcagggcaagccccggctgaagccacccttcccagcagatgtgggcgtgtttggctgccccaccaccgtggccaacgtggagaccgtggccgtgagccccaccatctgccggcggggcggcacctggtttgctggcttcggccgggagagaaattctggcaccaagctgttcaacatcagcggccacgtgaaccacccctgcaccgtggaggaggagatgtctgtgcccctgaaggagctgattgagaagcacgccggcggcgtgactggaggctgggacaacctgctggccgtcatccctgggggcagcagcacccccctcatccccaagtctgtgtgtgagaccgtgctgatggactttgatgccctggtgcaggcccagacaggcctgggcacagctgctgtgattgtgatggacaggagcacagacatcgtgaaggccatcgcccggctgattgagttctacaagcatgagagctgtggccagtgcaccccctgccgggagggcgtggactggatgaacaaggtgatggccaggtttgtgagaggagatgcccggcctgctgagattgacagcctgtgggagatcagcaagcagatcgagggccacaccatctgtgccctgggagatggagctgcctggcctgtgcagggcctcatccgccacttccggcctgagctggaggagaggatgcagagatttgcccagcagcaccaggcccggcaggccgccagctag

SEQ ID NO: 170333 - DNA, 1374 bp, Artificial Sequence
  derived and/or modified sequence
atgctggccacccggcggctgctgggctggagcctgcctgcccgggtgtccacagcccccaagaagaccagctttggcagcctgaaggatgaagatcgcatcttcaccaacctgtatggaagacatgactggaggctgaagggcagcctgagcagaggagactggtacaagaccaaggagatcctgctgaagggccctgactggatcctgggggagatcaagaccagcggcctgcggggccggggcggggccggcttccccaccggcctgaagtggagcttcatgaacaagcccagtgatggccggcccaagtacctggtggtgaatgctgatgaaggagagcccggcacctgcaaggaccgggagatcctgcggcatgacccccacaagctgctggagggctgcctggtgggcggccgggccatgggcgcccgggccgcctacatctacatccggggggagttctacaatgaggccagcaacctgcaggtggccatccgggaggcctatgaggccggcctgattggcaagaatgcctgtggcagcggctatgactttgatgtgtttgtggtgcggggggccggggcctacatctgtggggaggagacagccctgattgagagcattgagggcaagcagggcaagccccggctgaagccacccttcccagcagatgtgggcgtgtttggctgccccaccaccgtggccaacgtggagaccgtggccgtgagccccaccatctgcagaagaggaggcacctggtttgctggcttcggccgggagaggaacagcggcaccaagctgttcaacatcagcggccacgtgaaccacccctgcaccgtggaggaggagatgtctgtgcccctgaaggagctgattgagaagcatgctggaggagtgactggaggctgggacaacctgctggccgtcatccctgggggcagcagcacccccctcatccccaagtctgtgtgtgaaacagtgctgatggactttgatgccctggtgcaggcccagacaggcctgggcacagctgctgtgattgtgatggacaggagcacagacatcgtgaaggccatcgcccggctcatcgagttctacaagcatgagagctgtggccagtgcaccccctgccgggagggcgtggactggatgaacaaggtgatggccaggtttgtgagaggagatgcccggcctgctgagattgacagcctgtgggagatcagcaagcagatcgagggccacaccatctgtgccctgggagatggagctgcctggcctgtgcagggcctcatccgccacttccggcctgagctggaggagaggatgcagagatttgcccagcagcaccaggcccggcaggccgccagctag

SEQ ID NO: 170334 - DNA, 1596 bp, Artificial Sequence
  derived and/or modified sequence
gaagttgaaggggcgcagcgataccggtgcgcggcgctggcgtcgggcgcgtgacgtctttcctgcgcgccacctagcgtctctatcgcgccagttcctcagcctcagtgctatgaaggtgacagcgtgaggtgacccatctggcccgccgcgatgctggcaacacggcggctgctcggctggtcgcttcccgcgcgggtatctgtgcgtttcagcggcgacacgacagcacccaagaaaacctcatttggctcgctgaaggatgaagaccggattttcaccaacctgtacggccgccatgactggaggctgaaaggttccctgagtcgaggtgactggtacaagacaaaggagatcctgctgaaggggcccgactggatcctgggcgagatcaagacatcgggtttgaggggccgtggaggcgctggcttccccactggcctcaagtggagcttcatgaataagccctcagatggcaggcccaagtatctggtggtgaacgcagacgagggggagccgggcacctgcaaggaccgggagatcttacgccatgatcctcacaagctgctggaaggctgcctggtggggggccgggccatgggcgcccgcgctgcctatatctacatccgaggggaattctacaatgaggcctccaatctgcaggtggccatccgagaggcctatgaggcaggtctgattggcaagaatgcttgtggctctggctatgattttgacgtgtttgtggtgcgcggggctggggcctacatctgtggagaggagacagcgctcatcgagtccattgagggcaagcagggcaagccccgcctgaagccccccttccccgcagacgtgggagtgtttggctgccccacaactgtggccaacgtggagacagtggcagtgtcccccacaatctgccgccgtggaggtacctggtttgctggctttggcagagaacgcaactcaggcaccaaactattcaacatctctggccatgtcaaccacccttgcactgtggaggaggagatgtctgtgcccttgaaagaactgattgagaagcatgctgggggtgtcacgggcggctgggacaacctccttgctgtgatccctggcggctcgtctaccccactgatccccaagtctgtgtgtgagacggtgctgatggacttcgatgcgctggtgcaggcacagacaggcctgggcacagctgcggtgatcgtcatggaccgctcgacggacatcgtgaaagccatcgcccgcctcattgagttctataagcacgagagctgtggccagtgtaccccatgccgtgagggtgtggactggatgaacaaggtgatggcacgtttcgtgaggggggatgcccggccggccgagatcgactccctgtgggagatcagcaagcagatagaaggccatacgatttgtgctctgggtgacggggccgcctggcctgtgcagggtctgatccgccactttcggccggagctcgaggagcggatgcagcggtttgcccagcagcatcaggcccggcaggctgcctcttagcccaccaccctggcctgctgtcctgcgtctatccatgtggaatgctgg

SEQ ID NO: 170335 - DNA, 1512 bp, Artificial Sequence
  derived and/or modified sequence
agttcctcagcctcagtgctatgaaggtgacagcgtgaggtgacccatctggcccgccgcgatgctggcaacacggcggctgctcggctggtcgcttcccgcgcgggtatctacagcacccaagaaaacctcatttggctcgctgaaggatgaagaccggattttcaccaacctgtacggccgccatgactggaggctgaaaggttccctgagtcgaggtgactggtacaagacaaaggagatcctgctgaaggggcccgactggatcctgggcgagatcaagacatcgggtttgaggggccgtggaggcgctggcttccccactggcctcaagtggagcttcatgaataagccctcagatggcaggcccaagtatctggtggtgaacgcagacgagggggagccgggcacctgcaaggaccgggagatcttacgccatgatcctcacaagctgctggaaggctgcctggtggggggccgggccatgggcgcccgcgctgcctatatctacatccgaggggaattctacaatgaggcctccaatctgcaggtggccatccgagaggcctatgaggcaggtctgattggcaagaatgcttgtggctctggctatgattttgacgtgtttgtggtgcgcggggctggggcctacatctgtggagaggagacagcgctcatcgagtccattgagggcaagcagggcaagccccgcctgaagccccccttccccgcagacgtgggagtgtttggctgccccacaactgtggccaacgtggagacagtggcagtgtcccccacaatctgccgccgtggaggtacctggtttgctggctttggcagagaacgcaactcaggcaccaaactattcaacatctctggccatgtcaaccacccttgcactgtggaggaggagatgtctgtgcccttgaaagaactgattgagaagcatgctgggggtgtcacgggcggctgggacaacctccttgctgtgatccctggcggctcgtctaccccactgatccccaagtctgtgtgtgagacggtgctgatggacttcgatgcgctggtgcaggcacagacaggcctgggcacagctgcggtgatcgtcatggaccgctcgacggacatcgtgaaagccatcgcccgcctcattgagttctataagcacgagagctgtggccagtgtaccccatgccgtgagggtgtggactggatgaacaaggtgatggcacgtttcgtgaggggggatgcccggccggccgagatcgactccctgtgggagatcagcaagcagatagaaggccatacgatttgtgctctgggtgacggggccgcctggcctgtgcagggtctgatccgccactttcggccggagctcgaggagcggatgcagcggtttgcccagcagcatcaggcccggcaggctgcctcttagcccaccaccctggcctgctgtcctgcgtctatccatgtggaatgctggacaataaagcgagtgctgcccaccctcca

SEQ ID NO: 170336 - DNA, 1395 bp, Artificial Sequence
  derived and/or modified sequence
atgctggccacccggcggctgctgggctggagcctgcccgcccgggtgtccgtgcgcttctctggggatactactgcaccaaaaaagacctcgtttgggagtctgaaagacgaggaccgaatttttacaaatctctacgggaggcatgactggcgtctgaagggttccctcagcaggggtgactggtataaaacaaaagagattctgctgaaaggtcctgattggattttgggcgagattaagacctccggactcagaggcaggggcggagccggtttccccaccggactgaagtggtcttttatgaacaagccttccgatggccggcctaaatatctggtcgttaacgcagacgaaggagagcccggaacttgcaaggaccgggagattctgcggcacgatccccataaactgctggaaggctgcttggtgggtggccgagctatgggagcccgcgccgcgtacatctacataagaggggaattttacaatgaggcgagtaatttacaagtcgcaatcagggaggcctatgaggccggccttataggaaagaatgcctgcggctctggttacgacttcgatgtgttcgtagtgcgtggggccggtgcctacatttgcggcgaggagactgcgctcattgagtctatagaagggaagcagggaaagcctaggttaaagcccccgttccctgccgacgtgggggtcttcggctgtcccactactgtggctaatgtggaaaccgtcgcagtctctccaactatttgccgtcgaggtggcacatggttcgccggatttggccgggagaggaactccggaacaaaactgttcaatatctctggacacgttaaccatccttgtacagtggaagaagagatgagcgtgccccttaaagagctgatcgaaaagcatgcaggtggggtgacaggcggctgggacaaccttctggctgtgattccagggggatccagtacccctttaatacctaagtcagtttgcgaaactgtgctgatggactttgacgccctggtgcaagcacaaacaggcctcggcacagcagccgttattgtcatggataggtctaccgatatcgtcaaggcaattgctaggctgattgaattttataagcacgaaagctgtggccagtgcaccccatgcagggagggggttgattggatgaataaggtaatggcccggttcgtgcggggcgatgctcgacctgccgagatagactcattgtgggaaattagtaagcagatcgaaggacacaccatctgcgccctaggagatggcgcagcctggcccgtgcagggtctgatacgccatttcagacctgagctggaggagagaatgcagagattcgcccaacagcaccaggccagacaggcagccagttag

SEQ ID NO: 170337 - DNA, 1374 bp, Artificial Sequence
  derived and/or modified sequence
atgctggccacccggcggctgctgggctggagcctgcccgcccgggtgtcaaccgctcctaaaaaaacctcatttggcagcctcaaagatgaagaccgaatcttcacaaatctctatggtcggcatgactggaggttgaaaggctcgttgagcagaggtgattggtacaaaacgaaagaaatcctgttgaagggcccagactggatccttggcgagattaaaaccagcggactgcgaggacgggggggagccgggtttcccacaggcttgaagtggtcatttatgaataagccttccgacgggagacctaaatacctggtggtaaatgctgacgagggcgaacccgggacctgcaaagatcgggaaattctgcgccacgatccccataagctcttggaaggctgcttagtgggaggccgggccatgggggcgcgcgccgcgtatatctatatccgtggggaattctataacgaggccagcaacctccaagtcgctataagagaggcgtatgaagctggccttatcggcaaaaatgcctgtggcagtggctacgacttcgatgttttcgtcgtgcggggggcgggagcctacatttgcggggaggaaactgccctcattgaaagtatcgagggaaagcaaggaaaacctcggctgaaaccgccctttccagctgatgtgggagtgttcgggtgccccaccactgtggccaatgtcgaaacggtcgctgtatctcccaccatttgccggagaggaggaacgtggtttgctgggtttgggagagagcgaaactctgggacgaaactcttcaatatctctggacacgtgaaccacccctgtacagttgaggaggaaatgagcgttcccctaaaggaactgatagagaagcacgcgggtggcgtgaccggtggctgggataaccttctggccgtcatccctggtggtagtagtacgccactgatcccgaaatctgtgtgcgaaactgtgctgatggacttcgacgctctggttcaagctcagactggccttggcacggctgcagtgattgtcatggatagatccacagatatagttaaggccattgcccggctgatcgaattctacaagcatgaatcatgtggacagtgtaccccatgcagagagggcgtggactggatgaacaaagttatggctcgatttgtgcgaggggatgccaggccagcagagatcgactcactttgggaaatcagcaagcagattgagggacacaccatctgcgctcttggcgatggtgctgcatggcccgtgcagggattaattcgtcatttccgccccgagcttgaggagcgcatgcagcgattcgcccagcagcatcaggcccgacaggcggcaagctag

SEQ ID NO: 170338 - DNA, 1395 bp, Artificial Sequence
  derived and/or modified sequence
atgctggccacccgacggttgctggggtggtccctccccgctagggtgtccgtgcgattcagcggggacacaacagcccctaagaaaacaagctttggcagccttaaggacgaggatcgcatttttaccaacttatacggacgtcacgactggcggctgaaggggtctctctcccgtggggactggtacaaaacgaaggagatattgctgaagggtccagactggatcctcggtgaaatcaagacctccggccttcgcggaaggggtggcgctggcttccctactggcctgaagtggagctttatgaataagccaagtgacggccgacccaaatacttggtagtcaacgctgacgagggagagcctgggacatgcaaggatagagaaatcttgcgacatgacccccacaaactgctggagggctgtcttgtcgggggacgcgcaatgggcgcaagggctgcctacatctacattagaggcgagttctacaacgaagcaagcaatctgcaagtagccatccgggaagcttacgaggctggcttaatcggaaaaaatgcatgcggcagtgggtacgacttcgacgttttcgttgttcgcggtgcaggcgcatacatttgtggtgaggaaactgcccttatcgaaagtatcgagggaaagcaaggaaagcccaggttgaaaccccctttcccggcagatgttggagtcttcggatgtccaaccacggttgctaacgtcgaaacggtagctgtgtcacctaccatctgtcgaagaggcggtacgtggttcgccggttttgggagagaaagaaattcgggaacgaaactgtttaacattagcggccatgtgaaccatccgtgcaccgtggaagaagagatgtccgtccccttgaaggagttgattgaaaagcacgctgggggagtaaccgggggatgggacaatctgctggcagttatccctgggggatccagcacccctctgatcccaaagagtgtgtgcgagaccgtgctgatggatttcgatgctctggttcaggcacaaacaggactcgggaccgctgctgtgatcgtcatggaccgtagcacggatattgtgaaggcaatcgcacgtctgattgagttctataagcatgagtcatgcgggcagtgtaccccttgtagagagggagttgattggatgaacaaggtgatggcgcgatttgtccgcggagacgccaggcccgctgaaatcgactcgttgtgggagattagtaagcagatcgaaggccataccatctgcgctctgggagatggagccgcttggccggtgcagggtctgataaggcactttcggccagagttggaagagaggatgcagcggttcgctcagcagcatcaggctcgacaggccgcatcatag

SEQ ID NO: 170339 - DNA, 1374 bp, Artificial Sequence
  derived and/or modified sequence
atgctcgctacaaggcgactgcttgggtggagtctgcctgcacgggtttccacagcgcctaaaaagacctccttcggaagcctgaaagacgaagatcggatatttaccaacctctatgggcgtcacgactggagactgaaggggtctttgtccagaggcgactggtacaagacaaaggagattctgctgaaaggaccagattggatcctgggcgaaataaaaacctccggcttgcgcggacggggaggcgctgggttccccaccggactgaaatggtcctttatgaacaagccctcagatggacgcccaaagtatctcgttgtgaatgccgacgagggcgagcctggtacatgcaaggacagggaaattctccggcacgatccacacaagctgctggaggggtgtctcgtcggaggacgggctatgggcgctcgagccgcttacatatatatccgcggagaattctacaacgaagctagtaatcttcaggttgctattagggaagcctacgaagctgggctgattggcaagaacgcatgtggatcagggtacgacttcgacgtgttcgtggtgcgcggtgccggtgcctatatttgcggggaagaaacggctctcattgagagtatagaaggtaagcaaggcaaacccaggctgaagcctcccttccctgccgatgtgggagttttcgggtgtcctactacagtcgcaaatgttgaaaccgtagccgtttctccaacaatctgcagacgaggtggaacatggtttgccggtttcggcagggagcgcaatagcggtacaaagctcttcaatatcagcggccacgttaatcatccatgcactgttgaagaggagatgagcgttccattgaaagaactcatcgaaaaacacgcaggtggcgtgactggcggttgggataaccttctggcagtgattcctgggggtagttctacccctcttatccccaaatccgtgtgcgagaccgttctaatggattttgatgccctggtgcaggctcagaccggacttggcaccgctgctgtgattgttatggatcgcagcacggacatcgtgaaggcaattgctcgcctcattgaattttacaaacacgagagttgcggacaatgtaccccttgtcgggaaggcgtcgactggatgaacaaggtgatggcccgttttgtaagaggcgacgctcgcccagccgagatcgattcgctatgggagatttcaaaacagatcgagggccacacaatatgcgcgctcggcgacggagctgcttggcctgtgcagggtctcatccgccatttcaggcctgagctcgaggagagaatgcagcggtttgctcagcagcatcaagccagacaggctgcgagttag

SEQ ID NO: 170340 - DNA, 1395 bp, Artificial Sequence
  derived and/or modified sequence
atgctggccaccagaagactgctgggctggagcctgcccgccagagtgagcgtgagattcagcggcgacaccaccgcccccaagaagaccagcttcggcagcctgaaggacgaggacagaatcttcaccaacctgtacggcagacacgactggagactgaagggcagcctgagcagaggcgactggtacaagaccaaggagatcctgctgaagggccccgactggatcctgggcgagatcaagaccagcggcctgagaggcagaggcggcgccggcttccccaccggcctgaagtggagcttcatgaacaagcccagcgacggcagacccaagtacctggtggtgaacgccgacgagggcgagcccggcacctgcaaggacagagagatcctgagacacgacccccacaagctgctggagggctgcctggtgggcggcagagccatgggcgccagagccgcctacatctacatcagaggcgagttctacaacgaggccagcaacctgcaggtggccatcagagaggcctacgaggccggcctgatcggcaagaacgcctgcggcagcggctacgacttcgacgtgttcgtggtgagaggcgccggcgcctacatctgcggcgaggagaccgccctgatcgagagcatcgagggcaagcagggcaagcccagactgaagccccccttccccgccgacgtgggcgtgttcggctgccccaccaccgtggccaacgtggagaccgtggccgtgagccccaccatctgcagaagaggcggcacctggttcgccggcttcggcagagagagaaacagcggcaccaagctgttcaacatcagcggccacgtgaaccacccctgcaccgtggaggaggagatgagcgtgcccctgaaggagctgatcgagaagcacgccggcggcgtgaccggcggctgggacaacctgctggccgtgatccccggcggcagcagcacccccctgatccccaagagcgtgtgcgagaccgtgctgatggacttcgacgccctggtgcaggcccagaccggcctgggcaccgccgccgtgatcgtgatggacagaagcaccgacatcgtgaaggccatcgccagactgatcgagttctacaagcacgagagctgcggccagtgcaccccctgcagagagggcgtggactggatgaacaaggtgatggccagattcgtgagaggcgacgccagacccgccgagatcgacagcctgtgggagatcagcaagcagatcgagggccacaccatctgcgccctgggcgacggcgccgcctggcccgtgcagggcctgatcagacacttcagacccgagctggaggagagaatgcagagattcgcccagcagcaccaggccagacaggccgccagctag

SEQ ID NO: 170341 - DNA, 1374 bp, Artificial Sequence
  derived and/or modified sequence
atgctggccaccagaagactgctgggctggagcctgcccgccagagtgagcaccgcccccaagaagaccagcttcggcagcctgaaggacgaggacagaatcttcaccaacctgtacggcagacacgactggagactgaagggcagcctgagcagaggcgactggtacaagaccaaggagatcctgctgaagggccccgactggatcctgggcgagatcaagaccagcggcctgagaggcagaggcggcgccggcttccccaccggcctgaagtggagcttcatgaacaagcccagcgacggcagacccaagtacctggtggtgaacgccgacgagggcgagcccggcacctgcaaggacagagagatcctgagacacgacccccacaagctgctggagggctgcctggtgggcggcagagccatgggcgccagagccgcctacatctacatcagaggcgagttctacaacgaggccagcaacctgcaggtggccatcagagaggcctacgaggccggcctgatcggcaagaacgcctgcggcagcggctacgacttcgacgtgttcgtggtgagaggcgccggcgcctacatctgcggcgaggagaccgccctgatcgagagcatcgagggcaagcagggcaagcccagactgaagccccccttccccgccgacgtgggcgtgttcggctgccccaccaccgtggccaacgtggagaccgtggccgtgagccccaccatctgcagaagaggcggcacctggttcgccggcttcggcagagagagaaacagcggcaccaagctgttcaacatcagcggccacgtgaaccacccctgcaccgtggaggaggagatgagcgtgcccctgaaggagctgatcgagaagcacgccggcggcgtgaccggcggctgggacaacctgctggccgtgatccccggcggcagcagcacccccctgatccccaagagcgtgtgcgagaccgtgctgatggacttcgacgccctggtgcaggcccagaccggcctgggcaccgccgccgtgatcgtgatggacagaagcaccgacatcgtgaaggccatcgccagactgatcgagttctacaagcacgagagctgcggccagtgcaccccctgcagagagggcgtggactggatgaacaaggtgatggccagattcgtgagaggcgacgccagacccgccgagatcgacagcctgtgggagatcagcaagcagatcgagggccacaccatctgcgccctgggcgacggcgccgcctggcccgtgcagggcctgatcagacacttcagacccgagctggaggagagaatgcagagattcgcccagcagcaccaggccagacaggccgccagctag

SEQ ID NO: 170342 - protein, 217 aa, Artificial Sequence
  derived and/or modified sequence
MSSKVSRDTLYEAVREVLHGNQRKRRKFLETVELQISLKNYDPQKDKRFSGTVRLKSTPRPKFSVCVLGDQQHCDEAKAVDIPHMDIEALKKLNKNKKLVKKLAKKYDAFLASESLIKQIPRILGPGLNKAGKFPSLLTHNENMVAKVDEVKSTIKFQMKKVLCLAVAVGHVKMTDDELVYNIHLAVNFLVSLLKKNWQNVRALYIKSTMGKPQRLY

SEQ ID NO: 170343 - DNA, 654 bp, Artificial Sequence
  derived and/or modified sequence
atgtcaagtaaggtgtcacgcgacaccctctatgaggccgtgcgagaggtgttacatggtaatcagcgtaaacgccgcaaattcctggagacagtcgaactgcaaatcagcctgaagaattacgatccgcaaaaggacaagcgattctcaggcacagttcggcttaaaagtacccctaggcccaagttttctgtctgtgttctcggggatcaacaacactgtgacgaagcaaaggccgttgacattccccacatggacattgaagctctcaagaaacttaataagaacaagaagctggtgaaaaagctcgcgaagaaatatgacgcttttctggcatctgaaagcctgatcaaacagattcccaggattctggggcctggattaaacaaagctggcaagttcccctcactgttaactcacaatgagaacatggttgccaaagtggacgaggtcaagagcacgattaagtttcagatgaaaaaagtattgtgtttagcagtcgccgtgggacacgtcaagatgacagatgatgagctcgtgtataatatccacctagctgtgaatttcttagttagccttctgaagaagaactggcagaatgtacgagctctctacattaaaagtacaatgggaaagcctcaacgtctgtattag

SEQ ID NO: 170344 - DNA, 654 bp, Artificial Sequence
  derived and/or modified sequence
atgagcagcaaggtgtcccgggacaccctgtatgaagctgtgcgggaggtgctgcacggcaaccagaggaagaggaggaagttcctggagaccgtggagctgcagatcagcctgaagaactatgacccccagaaggacaagcgcttcagcggcaccgtgcggctgaagagcaccccccggcccaagttctctgtgtgtgtgctgggggaccagcagcactgtgatgaggccaaggctgtggacatcccccacatggacatcgaggccctgaagaagctgaacaagaacaagaagctggtgaagaagctggccaagaagtatgatgccttcctggccagcgagagcctcatcaagcagatcccccgcatcctgggccctggcctgaacaaggccggcaagttccccagcctgctgacccacaatgaaaacatggtggccaaggtggatgaggtgaagagcaccatcaagttccagatgaagaaggtgctgtgcctggccgtggccgtgggccacgtgaagatgacagatgatgagctggtgtacaacatccacctggccgtgaacttcctggtgtccctgctgaagaagaactggcagaatgtgcgggccctgtacatcaagagcaccatgggcaagccccagaggctgtactag

SEQ ID NO: 170345 - DNA, 654 bp, Artificial Sequence
  derived and/or modified sequence
atgagcagcaaggtgagccgggacaccctgtacgaggccgtgcgggaggtgctgcatggaaaccagagaaaaagacggaaatttttggagacggtggaattgcaaatcagcctgaaaaattatgatccccagaaggataagcgcttctccgggacagtccgcttgaaaagcacaccaagaccaaagtttagcgtgtgtgttcttggtgaccagcaacactgtgacgaggcaaaagcagtagatatcccccacatggatattgaggcattaaagaaactgaacaagaataagaagctcgtgaaaaaactggctaaaaagtacgacgcatttcttgccagcgagtcactcatcaaacaaatcccacgaatcctgggtcccggattgaataaggcaggaaagttcccgagtctgctcacacacaatgaaaatatggttgcaaaagtagatgaggttaaatccactattaagtttcagatgaagaaagtcctgtgtctcgccgtggcagtgggccacgtgaaaatgaccgatgatgaacttgtgtacaatatccacctcgcggtgaatttcttagtcagtcttcttaagaagaactggcagaatgtcagagcgctttatattaagagtacaatggggaagcctcagagactgtactag

SEQ ID NO: 170346 - DNA, 654 bp, Artificial Sequence
  derived and/or modified sequence
atgtcttcaaaggtaagccgagacacactttacgaggcagttcgcgaagtgctgcacggaaatcagcgcaagcggcgtaaattcctggagaccgtggagctgcaaatctctctgaagaactacgatccccaaaaagataaacggttctcaggaaccgtgaggttgaaatccacccccaggcctaagttttcggtctgtgtcttgggagaccagcagcactgcgacgaagctaaagcggtcgatattccccacatggatattgaggcgctgaaaaaactcaataagaacaagaaacttgttaagaaactagccaaaaaatacgacgcctttctcgcctcagagtccctgattaagcagattcccagaatacttgggccaggccttaataaggcaggaaagtttcctagccttctcactcataacgaaaatatggtggcaaaagtggacgaggtgaagagtactatcaagttccagatgaagaaggtactctgtctggctgtcgccgtggggcacgtgaaaatgacagacgatgagcttgtgtataacatccatctcgccgtcaacttcctcgtcagtctgctcaagaagaattggcagaacgtgcgtgctctatatattaaaagcactatgggtaagccacagcgcctttattag

SEQ ID NO: 170347 - DNA, 716 bp, Artificial Sequence
  derived and/or modified sequence
tttccggttagcgcggcgtgagaagccatgagcagcaaagtctctcgcgacaccctgtacgaggcggtgcgggaagtcctgcacgggaaccagcgcaagcgccgcaagttcctggagacggtggagttgcagatcagcttgaagaactatgatccccagaaggacaagcgcttctcgggcaccgtcaggcttaagtccactccccgccctaagttctctgtgtgtgtcctgggggaccagcagcactgtgacgaggctaaggccgtggatatcccccacatggacatcgaggcgctgaaaaaactcaacaagaataaaaaactggtcaagaagctggccaagaagtatgatgcgtttttggcctcagagtctctgatcaagcagattccacgaatcctcggcccaggtttaaataaggcaggaaagttcccttccctgctcacacacaacgaaaacatggtggccaaagtggatgaggtgaagtccacaatcaagttccaaatgaagaaggtgttatgtctggctgtagctgttggtcacgtgaagatgacagacgatgagcttgtgtataacattcacctggctgtcaacttcttggtgtcattgctcaagaaaaactggcagaatgtccgggccttatatatcaagagcaccatgggcaagccccagcgcctatattaaggcacatttgaataaattctattaccagttccctc

SEQ ID NO: 170348 - DNA, 654 bp, Artificial Sequence
  derived and/or modified sequence
atgagcagcaaggtgagcagagacaccctgtacgaggccgtgagagaggtgctgcacggcaaccagagaaagagaagaaagttcctggagaccgtggagctgcagatcagcctgaagaactacgacccccagaaggacaagagattcagcggcaccgtgagactgaagagcacccccagacccaagttcagcgtgtgcgtgctgggcgaccagcagcactgcgacgaggccaaggccgtggacatcccccacatggacatcgaggccctgaagaagctgaacaagaacaagaagctggtgaagaagctggccaagaagtacgacgccttcctggccagcgagagcctgatcaagcagatccccagaatcctgggccccggcctgaacaaggccggcaagttccccagcctgctgacccacaacgagaacatggtggccaaggtggacgaggtgaagagcaccatcaagttccagatgaagaaggtgctgtgcctggccgtggccgtgggccacgtgaagatgaccgacgacgagctggtgtacaacatccacctggccgtgaacttcctggtgagcctgctgaagaagaactggcagaacgtgagagccctgtacatcaagagcaccatgggcaagccccagagactgtactag

SEQ ID NO: 170349 - protein, 253 aa, Artificial Sequence
  derived and/or modified sequence
MGELPGSEGMWENCPLGWVKKKASGTLAPLDFLLQRKRLWLWASEPVRPQPQGIHRFREARRQFCRMRGSRLTGGRKGFGSSGLRFGRGGFSEEVMPQPVLKAMRCAEGAWWFSPDGPAGSAASIWPAEGAEGLPGQLGRDRLEVVYSVPDNVPGQNGSRRPLVCKITGKCLSVCSEENAKAGGCSAFPLLLSQLGARMTGREHAHKGPELTTPDSGLPRPPNPALAGFRALAQHSPPLGTSTPSAVLLSAAT

SEQ ID NO: 170350 - DNA, 762 bp, Artificial Sequence
  derived and/or modified sequence
atgggcgagctgcccggcagcgagggcatgtgggagaactgccccctgggctgggtgaagaagaaggccagcggcaccctggcccccctggacttcctgctgcagagaaagagactgtggctgtgggccagcgagcccgtgagaccccagccccagggcatccacagattcagagaggccagaagacagttctgcagaatgagaggcagcagactgaccggcggcagaaagggcttcggcagcagcggcctgagattcggcagaggcggcttcagcgaggaggtgatgccccagcccgtgctgaaggccatgagatgcgccgagggcgcctggtggttcagccccgacggccccgccggcagcgccgccagcatctggcccgccgagggcgccgagggcctgcccggccagctgggcagagacagactggaggtggtgtacagcgtgcccgacaacgtgcccggccagaacggcagcagaagacccctggtgtgcaagatcaccggcaagtgcctgagcgtgtgcagcgaggagaacgccaaggccggcggctgcagcgccttccccctgctgctgagccagctgggcgccagaatgaccggcagagagcacgcccacaagggccccgagctgaccacccccgacagcggcctgcccagaccccccaaccccgccctggccggcttcagagccctggcccagcacagcccccccctgggcaccagcacccccagcgccgtgctgctgagcgccgccacctag

SEQ ID NO: 170351 - DNA, 762 bp, Artificial Sequence
  derived and/or modified sequence
atgggtgaactgcccggctccgaaggaatgtgggaaaactgcccactcggatgggtgaagaaaaaagcgagcggcactctcgcccccctggactttctgctacagagaaaaaggctgtggctgtgggcctctgaaccagtgcgaccacagccacagggcatccataggtttagggaggctcggcgacagttctgccgtatgcggggttcccgtctaactggcgggagaaagggcttcggctcctccgggctcaggtttggtaggggaggatttagtgaagaagttatgcctcagcccgtcctgaaagctatgcgttgtgcggaaggggcctggtggttcagccctgacggccctgccgggtcagccgcctccatatggcctgccgaaggcgccgaaggattgcctggccagctcgggagggacaggctcgaggtggtgtactcagtgccagacaacgtgccggggcaaaatggctcccgccgtcccctggtgtgcaagatcacaggtaagtgtcttagcgtttgcagcgaagaaaacgcgaaggcaggaggttgttccgcctttccattattgttgtcccagctaggcgctagaatgacagggagagagcacgcccacaaggggcccgaactgacaacccccgactctggcctgccccggccacccaatccggccttagcaggcttcagggcgttagcccagcactctccccctctgggaacatcaactcccagcgcagttctccttagcgctgctacctag

SEQ ID NO: 170352 - DNA, 762 bp, Artificial Sequence
  derived and/or modified sequence
atgggagagctgcccggcagcgagggcatgtgggagaactgccccctgggctgggtgaagaagaaggccagcggcaccctggcccccctggacttcctgctgcagaggaagaggctgtggctgtgggccagcgagcctgtgcggccccagccccagggcatccaccgcttccgggaggcccggcggcagttctgcaggatgaggggcagccggctgactggaggcaggaaaggatttggcagcagcggcctgcgcttcggccggggcggcttcagcgaggaggtgatgccccagcctgtgctgaaggccatgagatgtgccgagggcgcctggtggttctccccagatggccctgctggcagcgctgccagcatctggccagctgagggcgctgagggcctgcccggccagctgggccgggaccggctggaggtggtgtacagcgtgcctgacaacgtgcccggccagaatggcagccggcggcccctggtgtgcaagatcaccgggaagtgcctgtctgtgtgcagcgaggagaatgccaaggccggcggctgcagcgccttccccctgctgctgagccagctgggcgccaggatgacaggccgggagcacgcccacaagggccctgagctgaccaccccagacagcggcctgcccaggcctcccaacccagccctggccggcttccgggccctggcccagcacagcccccccctgggcaccagcaccccatctgctgtgctgctgtctgctgccacctag

SEQ ID NO: 170353 - DNA, 762 bp, Artificial Sequence
  derived and/or modified sequence
atgggcgagctgcccggcagcgagggcatgtgggagaactgccccttgggatgggtgaagaaaaaggctagtggcacgctcgctcccttagactttctcctgcagaggaagcgactgtggctctgggcgagcgaaccagtgaggccgcagccccaaggtattcatagattccgggaagctaggcggcagttctgcaggatgaggggttcgcgcctgacgggggggaggaaggggtttgggagctccgggctcagattcgggcggggtgggttctctgaggaagtcatgccacagccagtcttaaaggcgatgaggtgtgctgaaggtgcctggtggttctctccggatggtccggcaggaagcgcggccagcatctggccagctgagggagctgaagggctgcctggccagctgggacgagaccggttagaggtcgtgtattccgtgccagacaacgtcccaggccaaaatggttcaagacggcccctggtctgcaaaataacagggaagtgtttgtctgtgtgctctgaggagaacgcgaaggcaggaggctgctctgcctttcccctgctgctgagtcaactcggggcccggatgacggggcgcgagcacgcccacaagggacccgagctaacaactcccgattcaggactcccaaggcctccaaatccagccttagccggctttcgtgccctggctcagcatagcccccccctgggtacttcgacaccttctgcggtgctgttgagtgccgccacctag

SEQ ID NO: 170354 - DNA, 762 bp, Artificial Sequence
  derived and/or modified sequence
atgggcgaacttcccggtagcgaaggaatgtgggagaactgcccgctcggctgggtgaaaaagaaggccagcgggacgctggccccactggactttctgctgcagcgcaagaggctgtggttgtgggcttctgagccagttcggccacagccgcagggcatccataggtttcgggaggctagaaggcaattctgccgcatgagaggcagtagattaactggcggtagaaagggctttggatcctccgggctgcggttcggcagaggcggattctctgaggaggttatgcctcagccagtgctgaaggccatgcgctgtgccgaaggcgcatggtggttctcccctgatgggcctgcaggatccgctgcgtcaatctggccagcagagggagcggaaggtctccccggacagctgggcagagatcggctggaagtggtgtacagcgttcccgataacgtgccaggacagaatggtagtagaaggccactggtttgcaaaatcacggggaaatgcctttcggtctgctcggaggaaaatgctaaggcaggaggatgttctgctttccccctgctactgtcccagctgggagcccgaatgacaggtagggaacacgcccataaaggacccgaactgacgacccccgactcaggcctgcccagaccacccaatccggcactggcaggctttcgcgctctggcccagcatagccctcccctaggcacatctacaccctccgctgtcttgttgtctgcagccacatag

SEQ ID NO: 170355 - DNA, 1659 bp, Artificial Sequence
  derived and/or modified sequence
agggaagtggggtggctccccatggcttctcccggggctggcactgaagctggagcacaggatgtgctgacgggggtccagaggcagagtccttaacttactcagcttaagcgtggcatgagtcccaactgggaggggccctggcagcatgaaacccccacccccactctctgcgacggcccagatggagggcaggaggaacagcggttcagccctggctggggctgcaggggctggggtgtgttactcactggcacgatggagaactgcatgaagaggcagcggagtgctgtctgtccccacccttccccgcccggcctccaactggtgggaactggattttgcggctgcagaggacttccccaaattttgccacattaacagctgactgcacatctgagccccgaggtgaagcagggcctcaggtagccagggaactggttgagcagaggaaatcggagagacctttttttttgtcatgaacaggctcagtgtgaatgggggaacttcctggttctgagggaatgtgggaaaattgccctttaggctgggtgaagaagaaagcaagtggaaccctggcacccctggacttcctcctccagaggaagcggctttggttgtgggccagcgagcctgtgcgtccccagccccagggcattcaccgcttcagagaagcaaggcgacagttctgccggatgagaggatccaggctgactggaggaaggaagggctttggctcatctgggctcaggtttgggagaggtggcttctcagaggaggtgatgcctcagccagtcttaaaggcaatgcggtgtgcagagggtgcttggtggttctctcctgatggccccgcagggtctgcagcctccatctggccagcagagggcgcagaaggactgcctgggcagctcggacgtgaccgcctggaagtggtgtacagcgttcctgacaacgttcccggccaaaacgggtcccgccgcccacttgtgtgcaagataactggaaaatgtctttctgtgtgctccgaggagaatgcaaaggctggtggatgtagtgcctttcctctactgctctctcagctgggggcaagaatgacaggacgtgaacatgcacacaagggcccggaactcacgacccccgacagcggtctcccccgcccccccaaccccgcgcttgcaggatttagggcactagcacagcacagtccaccccttgggactagcaccccctccgcagttctgctctctgcagcaacatagagtacaaatattgttccttttgtttcttttttccctttggatacatttttaattacaaaaatagagcttgattgttgcacctagacagatgtttgcttgcttctgggcccattgggcctcctctcagagcctggaactcccagcccccagctcctggggtgccttcctccaggtgtgtccctggcttgggctggggggacacagccccgctcctgggacgtgcaggtttaaaatgctattgggtaccatctttgatcgaattcagagtgacagacttagagcaggtcacctctcagcttctaacgaggccaagacggaggaatccccacagcactgggtttgactctgtaattaagctggtaaagtggaaaaataaaagtaggaaacctaagtggaaacc

SEQ ID NO: 170356 - protein, 117 aa, Artificial Sequence
  derived and/or modified sequence
MSSNVPADMINLRLILVSGKTKEFLFSPNDSASDIAKHVYDNWPMDWEEEQVSSPNILRLIYQGRFLHGNVTLGALKLPFGKTTVMHLVARETLPEPNSQGQRNREKTGESNCCVIL

SEQ ID NO: 170357 - DNA, 354 bp, Artificial Sequence
  derived and/or modified sequence
atgagcagcaacgtgcccgccgacatgatcaacctgagactgatcctggtgagcggcaagaccaaggagttcctgttcagccccaacgacagcgccagcgacatcgccaagcacgtgtacgacaactggcccatggactgggaggaggagcaggtgagcagccccaacatcctgagactgatctaccagggcagattcctgcacggcaacgtgaccctgggcgccctgaagctgcccttcggcaagaccaccgtgatgcacctggtggccagagagaccctgcccgagcccaacagccagggccagagaaacagagagaagaccggcgagagcaactgctgcgtgatcctgtag

SEQ ID NO: 170358 - DNA, 354 bp, Artificial Sequence
  derived and/or modified sequence
atgtcctcgaacgtgccagccgacatgattaacctgcgcctgatactggtcagcggcaaaactaaggaatttttgttttcaccaaacgactctgctagcgatatcgctaagcatgtgtatgacaattggccaatggactgggaggaggagcaggtgagctcccccaacattctgaggctcatctatcagggcagattcctgcatggcaatgtcaccctgggcgccctcaaactgccttttgggaaaaccacggtgatgcacttagtggcacgtgagaccttgccagaacctaactcccagggacagcggaaccgagaaaagactggcgagagcaattgctgtgttatcttgtag

SEQ ID NO: 170359 - DNA, 354 bp, Artificial Sequence
  derived and/or modified sequence
atgagcagcaatgtgcctgctgacatgatcaacctgcggctcatcctggtgtctgggaagaccaaggagttcctgttcagccccaatgattctgccagtgacatcgccaagcacgtgtatgacaactggcccatggactgggaggaggagcaggtgagcagccccaacatcctgcggctcatctaccagggccgcttcctgcacggcaatgtgaccctgggcgccctgaagctgccctttgggaagaccaccgtgatgcacctggtggcccgggagaccctgcctgagcccaacagccagggccagaggaaccgggagaagacaggagagagcaactgctgcgtcatcctgtag

SEQ ID NO: 170360 - DNA, 354 bp, Artificial Sequence
  derived and/or modified sequence
atgagcagcaacgtgcccgccgacatgatcaacctgcggctgatcttggtaagcggcaagaccaaggagttcctgttcagcccaaatgacagcgctagcgacatagctaagcatgtgtacgacaactggcctatggactgggaagaagagcaagtatccagcccaaacattctgaggcttatctaccagggtagattcctgcacggcaacgtgacactgggagcgcttaaattgcccttcggcaaaacgacagttatgcatttggttgctcgggagacgttacccgagccaaacagtcagggccagcgtaatagggagaagacaggagagagtaattgttgcgtgattctctag

SEQ ID NO: 170361 - DNA, 354 bp, Artificial Sequence
  derived and/or modified sequence
atgtcctccaatgttccggctgatatgatcaatctgcgtctcatcctcgtgtccggtaaaactaaggagtttctctttagcccgaatgatagcgcatctgacatcgctaaacatgtatatgacaactggccaatggattgggaggaggagcaggtcagttctcccaatattctcaggctgatctatcaggggaggttccttcacggcaacgttacacttggcgctctcaaactaccattcggtaagaccactgttatgcacctagttgctcgggagacactgcccgaaccgaactctcagggacagagaaacagggaaaagacaggcgagtccaactgttgcgttatcctttag

SEQ ID NO: 170362 - DNA, 4384 bp, Artificial Sequence
  derived and/or modified sequence
ggagggaggacgaggacgggggcggcggctgctgcgagggggggcccgtgctctccccgtttcccttagtcgcactcaggcagccgccgccgccgccgctgccgccatgttggtttgagaggcgatgacaggaggcggccgcggcgtgtgggactgaaaagtgaaggaggaggaggagaaacaaagctctgagaggaaaccattcccgggctgaggagaaggaggacccggcctcttccggggaccagccgaagtcggcgtcgcccggagctcgcgaggccggggaggggaggggaagggaaggcggagaccggggaggcggcggcggggaaggcggaggcagaagaggagtggcgaggagccggagacgatgcgccccgaccccagctgctgtccggaggcgcccgcggcctgagcccagaggggctgtggagtgtcccggccggccccgagcacccccgcgctgtcggtcccccgctccggtctttcgctttggcttccaactagttaaatgcccttgagcgcgggtttccgcggcccggctcttcgcccccgcggcgcgagttgagccgtttccccgcgctgtccgcgcgggcgctccgacagcggctctgcagggtccgcggccagcgtccggccaccgctcggccgccactcaaggctcacgcgtcgatgtgtagctacatagttatctgtgtacatccacgctggggcatttttctcctgcttaatgaggacttgactcgggagcaagtgtgaatcattgccggggctgggaaaggaggaaggcgcatttaaccccctcccacccctctccatgtccgtgtgtcactcggctcggtccacctggcgcggccggtcctggggctgctgctgctgttgacgacgacgacgacgacgggggctgcctctgctgtcccgggagtttcctcctgctccggccacacagctcctggggattgttcctcttcgaaccagaacctcggcctgaccggcactttggctccaaaataactttatttttgggggagaaagcacatcacgaaccagtcaaaatcgtggtttatttctgtaacgtgaagacttctgctcttttttctttgtttgtttttttcgtaaacatctgggtgtatatcaaacggcaagatgtccagtaatgtcccggcggatatgataaatttgcgcctcattttggtaagcggaaaaacaaaagagttcctgttttctcctaacgattctgcttctgacattgcaaagcatgtatatgacaattggccaatggactgggaagaagagcaggtcagcagtccaaatattctacgacttatttatcaaggacgatttctacatggaaatgtcacattaggagcattaaaacttccttttggcaaaacaacagtgatgcatttggtggccagagagacattaccagagccaaactctcaaggtcagaggaatcgtgagaagactggagagagtaattgttgtgtaatcctgtaaacactgtctgcctagtgtgatgtgatatagtctttgtctttcatgctgctgggacagaaaagacccgacattgcttcagaaaccgttcagaacagtctgcctgtaaacacatggaactgaattaccacatgaacactgtcatcttttctcatgaaagtaaaaagaaccaagaacatttttcactctgattttttatttcttgtattttttgttgagctgttttaacacatattggtttttgaatgcagtcaatctccaggggaaaagttaacaagttatctttcgtagcagaaaccattttgctgccacaaaattttcatcatcagaactaataaatcaagtgttccaaatacaatttgcattaaaaagattggcattattttcctcatcagcagaatttataacagtgtgtggtatctagaaatacttatatatacaattccacactggaagacactcagcaattaatgaagttaattactgggccaacttgagaggaaaaaatggaaaagaaactaaaatgttgggtgaattctaccaaagtcagccgtggtggctgcactggcacagaatactaaactgagtgtgactattttcactgcaacaaatgaaaaaacaaaatgtgcctgtttaaagcactcagtagagggctgatgaaactaattttttttcctttaagacatgcactcttgagtcctacagtaactgagtgtttgtttagacagcacaagaaggggtgagagtgcgtctcctagccttaatgtgggagggtagtttcagtcactcatcggctttcattattgtgcagaaatattagaaaacctcattgatcaattttatgtatttgaatatcagcaaattgaaattttccataattatcattaatttgtaaccacatccagtgtcatgcttactccttagagttcagatgaattcttaaaattaaaaaaaaactccatagtactaattttgtttctttatatagtttgcgtttgatattagtgcttgcaattgtattaaagtcaaaagctgatttttatggcatacacaagaatgccactttttcttttatttcataccaataatttaaagattgatatgctaaaaacaatttgcacagcactaaagcatgagctactttcatctaaacctgtaaaaatatgaaagatttttatattttttcactgggaagaaattcttcctggatgaaattacaaatatgtgtagaatatatttaataaaagacttataaaatacctaactacaggacttaaaatatagattggcgcgtagtatacagaacaatattccatataaataagtttagcctttataaaaatgaagttgcaggctgacattacattctgtactaagtgtcaacagcccttacaaacattaaatgtaaatggtttcaaatggtcagcgttgtttaaatgtaatcatgttattttattcattgttaatgctttgatgaaaaggctttatatgcagtagatctacgaaaatattgttcatactgatcagaattaaatttgtatagagcagagttttaaaatgaatgtaaatagcactaaacgttttctttctgcaacctgtacttacagattcttcctgtaaactaaataaaaaaaaaatgatagtgcattttggtggtaattttaaaggtcttgattaggtcaataattgtttaagcaccgtctcattcatgttttctactttcatttcttaagcttttaaaattcatttaattaatattctgttgttgttttggggagtattcccaatgtatctttgatatttaacctggttaatttgtggacagtcacaacaatggatagaattatgtagtctccgttatcactaaaatgttatcttcaagagatgttaaatatttatatgctttgttgactagctgaaatgtgaattctgttagtgttgactaaagaatctggtagttgcttaattgggcaattaaacaatttatggctctattttgtaaaacaaactactggtaattatttttaatacctattttcattctgattactctttttttaagttaaagactatcagttaattaagattgagtttttatgatggttaaaaataattctctattggtttttcaatatatttttctgtgtgttctcagattatatatttccctcaatttagagtttgctaagtgaaataaactggttcactagtagagaaagaattacgtcgcttaatacctaatatcatagttgtacaatatgaaaaaaaagaataaaaagtagcagtaaaattatatactgaaaacaccaaaaatttagatgccttaatagtatatacgtgaaatactcagctgtccctttaaaaataattccttggactgcctggtggttaaaatacgattcctcatatccaaggctacttttgaagatccctctgccaaaaatatagctcacttatctaaaggtgagagctgcatagatccagtaatgtacataaagcctgaatgatgagcctatgtccctgcctaacgctggtgtctcactcatctcttttacctaaattgtcctgaactttgttaagtgttctggacaaggccaagcttttctttattaaaacctcagcatgtctccctgatctgaactatttgctttctcttcaagataagttgtattttaccatggaaaaatacagtatctaacattaccattcacgttaaatgaagtttcctcataacatttatctttagttttatgaagtcatcgtgaccaatgttacagtaatttctgttagctgattgtggtaaacaatgtttaatgtgaaaagaaattaaaactttcttcatctgttgtagaatatttctcttctttaaaatggcttctattcataa

SEQ ID NO: 170363 - protein, 118 aa, Artificial Sequence
  derived and/or modified sequence
MDVFLMIRRHKTTIFTDAKESSTVFELKRIVEGILKRPPDEQRLYKDDQLLDDGKTLGECGFTSQTARPQAPATVGLAFRADDTFEALCIEPFSSPPELPDVMKPQDSGSSANEQAVQ

SEQ ID NO: 170364 - DNA, 357 bp, Artificial Sequence
  derived and/or modified sequence
atggacgtgttcctgatgatcagaagacacaagaccaccatcttcaccgacgccaaggagagcagcaccgtgttcgagctgaagagaatcgtggagggcatcctgaagagaccccccgacgagcagagactgtacaaggacgaccagctgctggacgacggcaagaccctgggcgagtgcggcttcaccagccagaccgccagaccccaggcccccgccaccgtgggcctggccttcagagccgacgacaccttcgaggccctgtgcatcgagcccttcagcagcccccccgagctgcccgacgtgatgaagccccaggacagcggcagcagcgccaacgagcaggccgtgcagtag

SEQ ID NO: 170365 - DNA, 357 bp, Artificial Sequence
  derived and/or modified sequence
atggacgtcttcctgatgatccgtcgacacaaaacaactatttttacggacgccaaggaatctagtactgtgtttgagctgaaaaggattgtagagggaatccttaaacggcctcccgatgaacagcggttatataaagacgaccagctgctcgatgatggcaagacactgggtgaatgtggcttcacctcccagaccgcccgccctcaggcacccgcaaccgtaggtctggcctttcgcgccgacgacactttcgaggcactctgtattgagcctttcagtagcccgcctgagctgccagacgtgatgaagcctcaggactctgggtcctcagccaacgagcaagctgtccagtag

SEQ ID NO: 170366 - DNA, 357 bp, Artificial Sequence
  derived and/or modified sequence
atggatgtgttcctgatgatccgccgccacaagaccaccatcttcacagatgccaaggagagcagcacagtgtttgagctgaagagaattgtggagggcatcctgaagaggcccccagatgagcagaggctgtacaaggatgaccagctgctggatgatggcaagaccctgggagaatgtggcttcaccagccagacagcccggccccaggccccagccaccgtgggcctggccttccgggcagatgacacctttgaggccctgtgcatcgagcccttcagcagccccccagagctgcctgatgtgatgaagccccaggacagcggcagcagcgccaatgagcaggccgtgcagtag

SEQ ID NO: 170367 - DNA, 357 bp, Artificial Sequence
  derived and/or modified sequence
atggacgtgttcctgatgatccggcggcacaagaccaccatcttcacagatgctaaggaatcatctaccgtgtttgagcttaaacgtatcgtggagggaatactcaaacgccctccagatgagcagaggctatataaggacgaccaacttctcgatgacggcaagaccctaggggagtgtggttttactagtcagacagcccggccccaggccccagcgacagtaggactggccttcagagccgatgacacatttgaggctctctgcatcgagcccttctctagtccacccgagctgccagatgtgatgaagccccaggactctggctccagcgcaaacgagcaggcagtccagtag

SEQ ID NO: 170368 - DNA, 944 bp, Artificial Sequence
  derived and/or modified sequence
cagcagccgcgatggacgtgttcctcatgatccggcgccacaagaccaccatcttcacggacgccaaggagtccagcacggtgttcgaactgaagcgcatcgtcgagggcatcctcaagcggcctcctgacgagcagcggctgtacaaggatgaccaactcttggatgatggcaagacactgggcgagtgtggcttcaccagtcaaacagcacggccacaggccccagccacagtggggctggccttccgggcagatgacacctttgaggccctgtgcatcgagccgttttccagcccgccagagctgcccgatgtgatgaagccccaggactcgggaagcagtgccaatgaacaagccgtgcagtgaggacccccaagaggcccatttcccccaataaaagagatttgggagtctgcctggttgctgcctctttttcccgcccctccctgggatgggtcccactccctgtgggctccttttggggcttgtgcttggcagttcctgtgctgtcctgtctcccagatcctgagaccctggctgagaacttggcccagcctgctgcttaaaggcaccatggggacctgggttgccctgagacccaagccattgttagcagctagccagccacaccaaccacgccagggggaggaaagggaaggactgggagagacacaaagaccagagccagcctcagggacaagagattccagttttaggcctttctccttctaagtgccccccacccccatagcctgcatgtccactcccagacgatggccaagagcagaaacacaagctggagccagtgtcctggtttgacagcatgttcaacgagggaaccccaagacggacccacacaggtccacccacgctgggggctgtaatcacggagggaagtggctgcccccttaacacacctttaataaacagtctacagaccca

SEQ ID NO: 170369 - DNA, 357 bp, Artificial Sequence
  derived and/or modified sequence
atggatgtgttcttgatgatcaggagacacaagactaccatatttacagatgccaaagagagttccacagtgttcgagctgaagcgaattgtggagggaatcctcaaaaggcctcccgacgagcagcgactgtacaaagacgaccagttacttgacgacggcaagactctgggagaatgtggcttcaccagtcaaacagcccgacctcaggcacctgcgacagtagggttggctttcagagccgatgacacatttgaagccttgtgcattgagcccttctcttccccacctgagctcccagacgttatgaagccacaggattcggggagcagtgctaacgaacaggccgtccagtag

SEQ ID NO: 170370 - protein, 956 aa, Artificial Sequence
  derived and/or modified sequence
METQELRGALALLLLCFFTSASQDLQVIDLLTVGESRQMVAVAEKIRTALLTAGDIYLLSTFRLPPKQGGVLFGLYSRQDNTRWLEASVVGKINKVLVRYQREDGKVHAVNLQQAGLADGRTHTVLLRLRGPSRPSPALHLYVDCKLGDQHAGLPALAPIPPAEVDGLEIRTGQKAYLRMQGFVESMKIILGGSMARVGALSECPFQGDESIHSAVTNALHSILGEQTKALVTQLTLFNQILVELRDDIRDQVKEMSLIRNTIMECQVCGFHEQRSHCSPNPCFRGVDCMEVYEYPGYRCGPCPPGLQGNGTHCSDINECAHADPCFPGSSCINTMPGFHCEACPRGYKGTQVSGVGIDYARASKQVCNDIDECNDGNNGGCDPNSICTNTVGSFKCGPCRLGFLGNQSQGCLPARTCHSPAHSPCHIHAHCLFERNGAVSCQCNVGWAGNGNVCGTDTDIDGYPDQALPCMDNNKHCKQDNCLLTPNSGQEDADNDGVGDQCDDDADGDGIKNVEDNCRLFPNKDQQNSDTDSFGDACDNCPNVPNNDQKDTDGNGEGDACDNDVDGDGIPNGLDNCPKVPNPLQTDRDEDGVGDACDSCPEMSNPTQTDADSDLVGDVCDTNEDSDGDGHQDTKDNCPQLPNSSQLDSDNDGLGDECDGDDDNDGIPDYVPPGPDNCRLVPNPNQKDSDGNGVGDVCEDDFDNDAVVDPLDVCPESAEVTLTDFRAYQTVVLDPEGDAQIDPNWVVLNQGMEIVQTMNSDPGLAVGYTAFNGVDFEGTFHVNTVTDDDYAGFLFSYQDSGRFYVVMWKQTEQTYWQATPFRAVAQPGLQLKAVTSVSGPGEHLRNALWHTGHTPDQVRLLWTDPRNVGWRDKTSYRWQLLHRPQVGYIRVKLYEGPQLVADSGVIIDTSMRGGRLGVFCFSQENIIWSNLQYRCNDTVPEDFEPFRRQLLQGRV

SEQ ID NO: 170371 - protein, 353 aa, Artificial Sequence
  derived and/or modified sequence
MSNPTQTDADSDLVGDVCDTNEDSDGDGHQDTKDNCPQLPNSSQLDSDNDGLGDECDGDDDNDGIPDYVPPGPDNCRLVPNPNQKDSDGNGVGDVCEDDFDNDAVVDPLDVCPESAEVTLTDFRAYQTVVLDPEGDAQIDPNWVVLNQGMEIVQTMNSDPGLAVGYTAFNGVDFEGTFHVNTVTDDDYAGFLFSYQDSGRFYVVMWKQTEQTYWQATPFRAVAQPGLQLKAVTSVSGPGEHLRNALWHTGHTPDQVRLLWTDPRNVGWRDKTSYRWQLLHRPQVGYIRVKLYEGPQLVADSGVIIDTSMRGGRLGVFCFSQENIIWSNLQYRCNDTVPEDFEPFRRQLLQGRV

SEQ ID NO: 170372 - protein, 485 aa, Artificial Sequence
  derived and/or modified sequence
MDNNKHCKQDNCLLTPNSGQEDADNDGVGDQCDDDADGDGIKNVEDNCRLFPNKDQQNSDTDSFGDACDNCPNVPNNDQKDTDGNGEGDACDNDVDGDGIPNGLDNCPKVPNPLQTDRDEDGVGDACDSCPEMSNPTQTDADSDLVGDVCDTNEDSDGDGHQDTKDNCPQLPNSSQLDSDNDGLGDECDGDDDNDGIPDYVPPGPDNCRLVPNPNQKDSDGNGVGDVCEDDFDNDAVVDPLDVCPESAEVTLTDFRAYQTVVLDPEGDAQIDPNWVVLNQGMEIVQTMNSDPGLAVGYTAFNGVDFEGTFHVNTVTDDDYAGFLFSYQDSGRFYVVMWKQTEQTYWQATPFRAVAQPGLQLKAVTSVSGPGEHLRNALWHTGHTPDQVRLLWTDPRNVGWRDKTSYRWQLLHRPQVGYIRVKLYEGPQLVADSGVIIDTSMRGGRLGVFCFSQENIIWSNLQYRCNDTVPEDFEPFRRQLLQGRV

SEQ ID NO: 170373 - DNA, 2871 bp, Artificial Sequence
  derived and/or modified sequence
atggagacccaagaactgcgcggtgctttggctctgctgctgctatgttttttcacttccgcctcacaagatctccaggtcatcgacctgcttactgtgggggagagccggcaaatggtggcggtcgctgaaaagataaggactgccctgctgacagccggtgacatttacctccttagtaccttccggctccctccaaagcagggaggcgtgctattcggactctactcaagacaggacaacacaaggtggctagaagcaagcgttgtgggaaagattaataaggtccttgtgaggtaccagcgcgaagatgggaaggtgcacgcggttaaccttcagcaagccggtctagccgacgggagaactcatactgtactcctgaggctgcgcggtccatccagacctagtcctgcactgcatttgtatgtcgactgcaagctgggagaccagcacgccggactccccgcactggcacccatcccccctgccgaagtggacgggctggagattcgcaccggccaaaaagcctatctgaggatgcaggggttcgtggaaagcatgaagatcattcttggcggaagcatggctcgcgtaggagcattgagtgagtgccccttccagggcgatgaatctatccactccgctgtgactaacgctttgcactctattctgggagagcagacaaaagccttggtaactcagctgaccttgttcaaccagattttggtggagctgcgggacgacataagagatcaggttaaggaaatgtccctgatcaggaacaccattatggagtgtcaggtctgtgggttccacgagcagagaagccattgctctccaaatccgtgcttccgcggagtggattgcatggaagtttacgagtatccgggataccggtgtggaccctgcccaccagggcttcagggaaatggcacacattgctccgatattaatgagtgcgcacacgccgatccttgttttccaggatcctcttgcatcaacacaatgccgggtttccactgcgaagcgtgccccagaggctataaagggacccaggtcagcggcgtcggcatagactatgcgcgtgccagtaaacaagtgtgtaacgacattgacgagtgtaatgatggtaataatgggggatgtgacccaaattctatttgcacgaacacggtgggttccttcaagtgcggtccttgcaggctgggcttcctggggaaccagagtcaaggttgtctgccggcacgcacttgccacagccccgcacattccccttgtcacatacacgctcattgtctcttcgagaggaatggagcggtaagctgccaatgtaatgtgggctgggccggtaatgggaacgtgtgtgggaccgatacagacattgacgggtaccccgaccaggccttgccctgcatggataacaacaagcactgtaagcaggacaattgcttgctgacaccaaattcaggccaagaagatgccgataacgatggagtgggagaccagtgcgatgatgacgccgacggcgatggtatcaaaaacgtggaggacaattgccgcctgttcccgaacaaggaccaacagaactccgatacagactcattcggcgacgcctgtgacaactgcccgaatgtgcctaataatgaccagaaagacaccgatgggaatggagagggcgatgcctgcgacaatgatgttgatggtgacggtattccaaatggcctggataactgccccaaggtgcccaaccctctgcagacagatagggacgaagacggtgtaggggacgcatgcgattcctgtccggagatgagcaatcccacccaaactgatgccgacagcgatctggtcggcgacgtttgtgataccaacgaggactccgacggagacgggcatcaggacacaaaggataattgcccacagctgccaaacagcagtcaattagactccgacaacgacggcctgggggatgaatgtgacggcgacgacgataatgacggaatccccgattacgtgcctcctggtcccgacaactgtagattggtgcctaaccccaaccagaaagattccgacgggaacggagttggcgacgtttgcgaggatgatttcgataacgacgccgtggtcgaccctttagacgtgtgtccggagtctgcagaggttaccctgactgatttccgcgcttaccagaccgtcgtgctggatcctgagggagacgcccagatcgacccaaactgggtggtcctgaatcagggcatggagattgtacagacaatgaattctgatccgggtctagccgtggggtacactgccttcaacggggtcgattttgaagggacattccatgtaaacaccgtaacagacgatgactacgctggcttcctattcagttaccaggatagtggaagattctatgtagtgatgtggaagcaaacagagcagacatattggcaggccactccctttagggctgtcgctcagcccggattgcagctgaaggcagtcacatccgtgtctggcccaggagagcatttgcgcaatgccctttggcatactgggcacacacccgaccaggtgaggctactatggaccgaccccaggaacgtgggatggagggacaaaacaagttaccgttggcaactgctacaccgaccccaggtgggctacatccgtgtaaaactgtacgagggtccccaactggtggcagatagcggggtaattattgatacctctatgagaggtggcaggcttggagtcttttgcttttctcaagagaacataatctggagtaatctccaataccgctgtaatgataccgttccagaggattttgaacctttccggagacagcttctccagggacgggtgtag

SEQ ID NO: 170374 - DNA, 2871 bp, Artificial Sequence
  derived and/or modified sequence
atggagactcaggaactacggggcgcactggctctcttgctcctctgctttttcacctccgcctctcaagacttgcaagttatcgaccttcttacagtgggagaaagcaggcagatggtagccgtcgccgagaaaatcagaaccgccttgctcacagccggggatatatatctgttaagcacctttagactgccccccaagcagggcggcgtgttattcgggctgtactctaggcaggataatactaggtggttagaggcgagcgtagtgggcaaaatcaataaagttctagtgcggtatcagagggaagacggaaaagtacacgcagtcaatctccagcaggcaggccttgctgacggccgtacgcacactgtactgttgaggcttagaggtccatcacggcctagcccagctcttcacctgtatgtggactgcaaactaggcgatcaacacgccggtcttcctgctctggcccctatcccacccgccgaagtagatggattagaaattagaacgggacaaaaagcatacctccggatgcagggcttcgtggagagcatgaaaattattctaggcggcagtatggctcgagtgggagcattgtcagagtgtccgtttcaaggagatgagagtattcacagcgctgttactaacgccctgcactcaatcctgggtgagcagaccaaagcccttgtcacacaattaacactcttcaaccaaatactggttgagcttagagacgacatcagggaccaagtcaaggagatgtccctgatcaggaacacaatcatggaatgccaggtgtgtgggtttcacgaacagaggtctcattgttctcccaatccctgctttaggggagtggactgtatggaggtgtatgagtatcccggctaccggtgtggcccttgccccccaggtctgcaaggtaatggcactcactgctcagatattaatgaatgcgcacacgctgacccttgttttcctggctcttcttgcatcaacacaatgcccggcttccactgtgaggcatgccctcggggctacaagggcacgcaggtctccggggtaggcattgattatgcacgcgcatccaagcaggtctgtaacgacatcgacgaatgcaacgacggtaataacggcggatgtgacccaaattccatttgtaccaatacagtggggtcttttaagtgcgggccttgtcgattaggatttctggggaaccagtcccagggctgtctccccgccagaacatgccacagcccggcccacagtccctgccatatccacgcacattgcctgtttgaacggaacggagctgtcagctgtcaatgtaatgtgggctgggcgggaaatggtaatgtctgtggcaccgacaccgatattgacggatatccagaccaggcactgccatgtatggacaacaacaagcactgcaagcaggataattgtctgctgacaccaaacagtggacaagaggatgctgataacgacggggtgggagatcagtgcgatgacgacgccgacggcgatgggatcaagaatgtagaagacaactgtaggctgttccccaataaggaccagcaaaactccgacacagactctttcggcgacgcatgtgataactgtcctaatgttcccaacaatgatcagaaggataccgatggaaatggggaaggtgacgcttgtgacaatgacgtggacggagacgggatcccaaatggtctggataactgtcctaaggtccccaatcctcttcagacagacagagacgaggatggagtgggagacgcttgcgatagctgccccgagatgagtaacccaacccaaacagacgccgattcggacctagttggtgacgtctgcgacaccaatgaggactctgatggcgatggccatcaggataccaaagataactgcccgcagctcccaaatagttcccagttagacagtgataacgacgggctcggagatgagtgtgacggcgatgatgacaatgatggcatacccgattacgtcccccccggccctgataactgccggctggttcccaatccaaatcagaaggatagcgacggaaatggcgtcggcgatgtgtgcgaagacgatttcgataatgatgctgtggtggacccactcgatgtgtgcccagagtcagctgaggtaacactaaccgacttcagggcatatcagacagttgtgctggatcccgagggagacgcccaaatcgatccaaactgggtggtgctgaaccaaggaatggagattgtgcagactatgaacagtgacccagggctagccgtcggatacacagccttcaatggtgtggattttgaaggaactttccacgtgaataccgtcacagacgacgactacgctggattcctgttctcctatcaggactctggcagattttatgtcgttatgtggaaacagacagagcagacctattggcaggctactcctttcagggccgttgcccagcccggcttgcagctgaaagccgtgacaagtgtctcagggcccggcgagcatctccgaaacgcattgtggcataccgggcatacccctgatcaggtacgtttgctgtggacagaccctcgcaacgtcggttggcgagataagaccagctatagatggcagctgttgcatagaccacaggttgggtacattcgcgtcaagttgtatgagggaccgcagctagtggctgacagtggcgttatcattgatactagcatgcgcggcggcaggctgggcgttttctgctttagtcaggaaaacattatttggagcaacttacagtatagatgcaatgacactgtacccgaggattttgagcccttccgccgtcagctgcttcagggaagggtatag

SEQ ID NO: 170375 - DNA, 2871 bp, Artificial Sequence
  derived and/or modified sequence
atggagactcaggaactacggggcgcactggctctcttgctcctctgctttttcacctccgcctctcaagacttgcaagttatcgaccttcttacagtgggagaaagcaggcagatggtagccgtcgccgagaaaatcagaaccgccttgctcacagccggggatatatatctgttaagcacctttagactgccccccaagcagggcggcgtgttattcgggctgtactctaggcaggataatactaggtggttagaggcgagcgtagtgggcaaaatcaataaagttctagtgcggtatcagagggaagacggaaaagtacacgcagtcaatctccagcaggcaggccttgctgacggccgtacgcacactgtactgttgaggcttagaggtccatcacggcctagcccagctcttcacctgtatgtggactgcaaactaggcgatcaacacgccggtcttcctgctctggcccctatcccacccgccgaagtagatggattagaaattagaacgggacaaaaagcatacctccggatgcagggcttcgtggagagcatgaaaattattctaggcggcagtatggctcgagtgggagcattaagcgaatgccctttccaaggtgacgaatcaatacacagcgccgttactaacgcacttcattcaatcctgggcgagcaaaccaaggccctcgtaacccagttgacgctctttaaccaaatcctcgtggagctgagagacgatatccgagatcaagttaaagagatgagcttgatacggaacacaattatggaatgtcaggtttgcgggttccatgagcagaggagccactgttcaccaaatccatgcttcagaggtgtagattgtatggaagtttacgagtacccaggctacaggtgcgggccctgtccccctggccttcaaggaaatggtactcactgcagtgatattaacgaatgcgcccacgccgatccatgctttccaggtagtagttgtatcaacaccatgcctggtttccattgcgaagcttgtccgcgaggctacaagggcacacaagtctccggggtggggattgactacgcgagagcatcaaagcaggtctgcaatgatatcgatgagtgtaatgacggtaacaatggcggttgcgatcccaatagcatatgcaccaacacagtcggctcctttaaatgtggaccatgtcgactggggtttcttggcaatcagtcgcaaggttgcctgcccgcccgcacctgtcactcaccagctcactctccttgtcacatccacgcccattgtctctttgagagaaacggtgccgtttcctgccaatgtaacgtcggatgggccgggaatgggaacgtgtgcggtacagacacagatatcgacggttaccccgaccaagccttaccttgcatggacaacaataagcattgcaaacaggataattgtctgctcactccgaactctggccaggaagacgccgataatgatggtgtaggtgaccaatgcgacgatgacgctgacggcgatgggataaagaacgtagaagataactgccgattgtttccaaataaagaccagcagaattcggacactgacagctttggcgatgcctgcgacaactgccctaacgttccaaacaacgatcagaaagatactgatgggaacggagaaggagatgcgtgcgacaacgatgtggatggtgacggtattcccaatggtctggataactgcccgaaggtaccgaacccactacagacagaccgtgacgaggacggggtgggcgatgcgtgtgattcgtgccccgaaatgagcaacccgactcagacagacgccgactcggacctcgtgggcgacgtttgcgatacgaatgaagacagcgacggcgatggccaccaggatactaaagacaactgccctcagctgcccaactcaagccaactcgacagtgataatgacggactgggtgacgaatgtgacggtgatgatgataatgatggaattccagactacgtgccgccaggacccgataactgtcgactagtaccaaaccctaatcagaaagatagtgatggcaacggagtgggagatgtgtgcgaagacgattttgataacgatgccgtagttgatccactggatgtttgtcccgagagtgcagaagttactcttacagacttccgggcctatcagacagtcgtattggatccagagggggatgcacaaattgatcccaactgggtcgttttgaatcagggaatggaaatcgtgcagactatgaacagtgacccaggacttgcagtaggttacactgcttttaatggcgttgactttgagggcacatttcatgtgaacaccgttacagacgatgactacgccggttttttgtttagctaccaggattcaggtagattttacgttgtgatgtggaaacagactgaacagacgtattggcaggcgacccctttcagagcagtggcccagccagggttgcagttgaaagccgtgactagcgtaagtggccctggggagcacctaagaaatgctctgtggcatactggacacacccctgatcaggtaagactcctgtggacagaccctcgtaatgtcgggtggagggataagacctcttatcgatggcaactccttcatagaccccaggtagggtacattagggtgaagctttacgaaggaccccaactcgtggctgattcgggtgtaatcattgatacgagcatgcggggtggccgacttggagttttttgcttctctcaggaaaacatcatatggtccaatcttcagtaccgctgcaatgacaccgtgccagaagatttcgagcctttcaggcgccaactactgcagggaagagtttag

SEQ ID NO: 170376 - DNA, 2871 bp, Artificial Sequence
  derived and/or modified sequence
atggagacccaggagctgagaggcgccctggccctgctgctgctgtgcttcttcaccagcgccagccaggacctgcaggtgatcgacctgctgaccgtgggcgagagcagacagatggtggccgtggccgagaagatcagaaccgccctgctgaccgccggcgacatctacctgctgagcaccttcagactgccccccaagcagggcggcgtgctgttcggcctgtacagcagacaggacaacaccagatggctggaggccagcgtggtgggcaagatcaacaaggtgctggtgagataccagagagaggacggcaaggtgcacgccgtgaacctgcagcaggccggcctggccgacggcagaacccacaccgtgctgctgagactgagaggccccagcagacccagccccgccctgcacctgtacgtggactgcaagctgggcgaccagcacgccggcctgcccgccctggcccccatcccccccgccgaggtggacggcctggagatcagaaccggccagaaggcctacctgagaatgcagggcttcgtggagagcatgaagatcatcctgggcggcagcatggccagagtgggcgccctgagcgagtgccccttccagggcgacgagagcatccacagcgccgtgaccaacgccctgcacagcatcctgggcgagcagaccaaggccctggtgacccagctgaccctgttcaaccagatcctggtggagctgagagacgacatcagagaccaggtgaaggagatgagcctgatcagaaacaccatcatggagtgccaggtgtgcggcttccacgagcagagaagccactgcagccccaacccctgcttcagaggcgtggactgcatggaggtgtacgagtaccccggctacagatgcggcccctgcccccccggcctgcagggcaacggcacccactgcagcgacatcaacgagtgcgcccacgccgacccctgcttccccggcagcagctgcatcaacaccatgcccggcttccactgcgaggcctgccccagaggctacaagggcacccaggtgagcggcgtgggcatcgactacgccagagccagcaagcaggtgtgcaacgacatcgacgagtgcaacgacggcaacaacggcggctgcgaccccaacagcatctgcaccaacaccgtgggcagcttcaagtgcggcccctgcagactgggcttcctgggcaaccagagccagggctgcctgcccgccagaacctgccacagccccgcccacagcccctgccacatccacgcccactgcctgttcgagagaaacggcgccgtgagctgccagtgcaacgtgggctgggccggcaacggcaacgtgtgcggcaccgacaccgacatcgacggctaccccgaccaggccctgccctgcatggacaacaacaagcactgcaagcaggacaactgcctgctgacccccaacagcggccaggaggacgccgacaacgacggcgtgggcgaccagtgcgacgacgacgccgacggcgacggcatcaagaacgtggaggacaactgcagactgttccccaacaaggaccagcagaacagcgacaccgacagcttcggcgacgcctgcgacaactgccccaacgtgcccaacaacgaccagaaggacaccgacggcaacggcgagggcgacgcctgcgacaacgacgtggacggcgacggcatccccaacggcctggacaactgccccaaggtgcccaaccccctgcagaccgacagagacgaggacggcgtgggcgacgcctgcgacagctgccccgagatgagcaaccccacccagaccgacgccgacagcgacctggtgggcgacgtgtgcgacaccaacgaggacagcgacggcgacggccaccaggacaccaaggacaactgcccccagctgcccaacagcagccagctggacagcgacaacgacggcctgggcgacgagtgcgacggcgacgacgacaacgacggcatccccgactacgtgccccccggccccgacaactgcagactggtgcccaaccccaaccagaaggacagcgacggcaacggcgtgggcgacgtgtgcgaggacgacttcgacaacgacgccgtggtggaccccctggacgtgtgccccgagagcgccgaggtgaccctgaccgacttcagagcctaccagaccgtggtgctggaccccgagggcgacgcccagatcgaccccaactgggtggtgctgaaccagggcatggagatcgtgcagaccatgaacagcgaccccggcctggccgtgggctacaccgccttcaacggcgtggacttcgagggcaccttccacgtgaacaccgtgaccgacgacgactacgccggcttcctgttcagctaccaggacagcggcagattctacgtggtgatgtggaagcagaccgagcagacctactggcaggccacccccttcagagccgtggcccagcccggcctgcagctgaaggccgtgaccagcgtgagcggccccggcgagcacctgagaaacgccctgtggcacaccggccacacccccgaccaggtgagactgctgtggaccgaccccagaaacgtgggctggagagacaagaccagctacagatggcagctgctgcacagaccccaggtgggctacatcagagtgaagctgtacgagggcccccagctggtggccgacagcggcgtgatcatcgacaccagcatgagaggcggcagactgggcgtgttctgcttcagccaggagaacatcatctggagcaacctgcagtacagatgcaacgacaccgtgcccgaggacttcgagcccttcagaagacagctgctgcagggcagagtgtag

SEQ ID NO: 170377 - DNA, 2871 bp, Artificial Sequence
  derived and/or modified sequence
atggaaacccaggagctgcgaggagccctggctctgctcctcctatgtttttttactagcgcttcgcaggacttgcaggtgatcgatctcctgactgtaggcgagagtcggcagatggtggccgttgccgagaagatcagaaccgcgctgctgaccgccggggatatctatctcttgtctaccttcagactgccccccaagcagggcggcgtactcttcgggctgtactcccggcaggataacacaaggtggctggaggctagcgtggtggggaaaatcaacaaggtcctcgttaggtatcagagagaagacgggaaagtccacgccgttaacctacagcaggccggcttagccgacggacgcacgcacacagtgttattgagattgcgaggtcccagtaggcctagtcccgctctgcacctgtatgtggactgcaaacttggagatcagcatgccggccttccagctctggctccaattcctcctgccgaggttgatggtctcgaaatccggaccgggcagaaagcctacctgcgcatgcaaggctttgtcgaaagcatgaaaattatcctgggaggtagtatggctcgggtcggggcactcagcgaatgcccgtttcagggcgatgagagcatccactccgcggtcacaaatgccctgcattctatcctcggcgagcagaccaaagcactagtcactcagctaacactattcaatcaaatactggttgagttgcgagatgacattagagatcaagtcaaagaaatgagccttattagaaatactattatggagtgccaagtctgtggctttcatgagcaacggtctcattgctcaccgaatccatgttttcgcggcgtcgactgcatggaggtctacgaataccccggttatcgatgcggcccctgtcctccaggcctgcaaggaaatggtacgcattgtagtgatatcaatgagtgtgcccacgccgacccatgcttccctgggtcttcatgtatcaataccatgcctgggttccactgtgaagcgtgcccccgcggctacaagggcacccaggtcagtggtgtaggaattgattacgcaagggcctccaaacaggtctgtaacgatattgatgagtgtaacgacggaaataatggaggctgtgaccctaactctatttgcactaatactgtcggcagtttcaagtgcggcccatgccggctcggcttcctggggaatcagagtcagggctgcttacccgcaaggacatgtcactctcctgcgcattctccctgtcatattcacgcgcattgtcttttcgagcgcaatggagctgttagttgtcagtgcaacgtgggctgggctggtaatggcaacgtgtgtggaacagacaccgacatcgacgggtaccctgatcaggcactgccttgtatggataacaataagcactgcaagcaggataactgtctgttaacgccaaacagcggacaggaggatgctgataacgacggagtaggagatcagtgcgacgacgatgcggatggcgatgggattaaaaatgtcgaagacaactgtagactcttccctaacaaagatcagcaaaacagcgacactgactctttcggcgatgcatgcgataactgccctaacgtccctaataatgatcagaaggataccgatggtaacggcgagggcgacgcttgcgacaacgatgttgacggagacggaatacctaatggactggacaattgccccaaagtacctaaccccctgcagaccgaccgggacgaagatggagtgggcgatgcctgcgactcttgtccagagatgtccaacccaacacagaccgacgctgacagcgaccttgttggcgacgtgtgcgatactaatgaggacagcgatggagatgggcatcaggacacaaaagacaactgtccccaattacccaattctagccagttggactcagataacgatggattaggtgacgagtgtgacggggatgacgataacgacggtatcccagattatgtcccgcctgggccagataactgcagactggtccctaaccctaatcagaaagacagcgacggcaatggcgttggggacgtctgtgaggacgattttgataatgacgctgtcgttgatccgctcgatgtgtgccctgagtcggctgaagtgacactgaccgacttccgcgcctaccagactgtagtactcgatcccgagggtgacgcacagatcgaccctaattgggtcgtcttgaatcagggaatggagattgtgcaaaccatgaattctgacccaggcctcgccgttgggtatactgcgtttaacggcgtagattttgagggaactttccacgtgaataccgtcacagacgacgattatgctggttttttattttcctaccaggattctggacgcttctacgttgtcatgtggaagcagaccgagcaaacttactggcaggcaaccccatttagggcagttgctcagcctggtttacagctgaaagcagtgacttcagtgtcagggccgggcgaacacctccggaatgcgctctggcataccggacacacccctgaccaggtgcggctcctgtggacagaccctcgcaacgtgggctggagggacaagacaagctaccgttggcagctgctgcatcgtccccaggtcgggtacattcgcgtaaaactctacgagggcccacagctggtagcagacagcggcgtcattattgacacatccatgagagggggtcgtctgggcgtcttctgtttctctcaagagaatattatctggtccaatctccagtatcgatgtaacgacaccgtgcccgaagacttcgagccctttagacggcaacttttgcaaggcagagtgtag

SEQ ID NO: 170378 - DNA, 3145 bp, Artificial Sequence
  derived and/or modified sequence
gtagtgagccggctgagaggcatggagacgcaggaacttcggggggccctggctcttctcctcctttgctttttcacatctgccagtcaggatctgcaggtaattgacctgctgactgtgggcgagtctcggcagatggtagctgtggcagagaagatccggacagccttgctcactgctggggacatctacctcttatccaccttccgcctgccccccaagcagggtggtgtcctctttggcctctattctcgccaagacaacactcgatggctggaggcctctgttgtaggcaagatcaacaaagtactggtgcgataccagcgggaggatggcaaagtccacgccgtgaacctacagcaagcgggcctggctgatgggcgcacacacacagttctcctgcgactccgaggtccctccagacccagccctgccctacatctctacgtggactgcaaactgggtgaccaacatgcaggccttccagcactggcccccattcctccagcggaggtcgatgggctggagattaggactggacagaaggcgtatttgaggatgcagggctttgtggaatctatgaaaattattctgggtgggtccatggcccgggtaggagccctgagtgagtgtccattccaaggggacgagtccatccacagtgcagtgaccaatgcactgcactccattctaggggagcagaccaaggcgctggtcacccaactcaccctcttcaaccagatcctggtggagctgcgggatgatatacgagaccaggtgaaggaaatgtccctgatccgaaacaccattatggagtgtcaggtgtgcggcttccatgagcagcgttcccactgcagccccaatccctgcttccgaggtgtggactgcatggaagtgtacgagtacccaggctaccgctgtgggccctgcccccctggcctgcagggcaacggcacccactgcagtgacatcaatgagtgtgctcacgctgacccctgtttcccgggctccagctgcatcaacaccatgcccggcttccactgtgaggcctgtcctcgagggtacaagggcacacaggtgtctggtgtgggcattgactatgcccgggccagcaaacaggtctgcaatgacatcgatgaatgcaacgatggcaacaatggtggctgtgacccaaactccatctgcaccaacactgtgggctctttcaagtgtggtccctgccgcctgggtttcctgggcaaccagagccagggctgcctcccagcccggacctgccacagcccagcccacagcccctgccacatccatgctcactgtctctttgaacgcaatggtgcagtgtcctgccagtgtaacgtgggctgggctgggaatgggaacgtgtgtgggactgacacagacatcgatggctacccagaccaagcactgccctgcatggacaacaacaaacactgcaaacaggacaactgccttttgacacccaactctgggcaggaagatgctgataatgatggtgtgggggaccagtgtgatgatgatgctgatggggatgggatcaagaatgttgaggacaactgccggctgttccccaacaaagaccagcagaactcagatacagattcatttggtgatgcctgtgacaattgccccaacgttcccaacaatgaccagaaggacacagatggcaatggggaaggagatgcctgtgacaacgacgtggatggggatggcatccccaatggattggacaattgccctaaagtccccaacccactacagacagacagggatgaggacggggtgggagatgcttgcgacagctgccctgaaatgagcaatcctacccagacagatgcagacagcgacctggtgggggatgtctgtgatactaatgaagacagcgatggggatgggcatcaggacaccaaggacaactgcccacagctgccaaatagctcccagctggactctgataacgatggacttggagatgagtgtgatggggatgatgacaatgatggcatcccagattatgtgcctcctggtcccgataactgccgcctggtacccaatcccaatcagaaggactcagatggcaatggcgttggtgatgtgtgtgaggatgactttgacaatgatgctgtggtcgaccccctggatgtgtgtcctgaaagtgcagaggtaacgcttacggattttcgggcctatcagaccgtcgtcctggatcctgagggtgatgctcagattgacccaaactgggttgtgctcaaccagggcatggaaatcgttcagaccatgaacagtgaccctggcttggcagttggatacacggccttcaatggtgtggactttgaaggcaccttccatgtgaacacagtgactgatgatgactacgcaggctttctcttcagttatcaagacagtggccgcttctacgtagtcatgtggaagcagaccgagcagacctactggcaggctacacccttccgggcggttgcccagcccgggctgcagctcaaggcagtgacatcagtgtctggcccaggtgagcacctccgaaatgccctgtggcatactggccacacccctgatcaggtacgactgctgtggacagacccacgaaatgtgggctggcgggacaagacctcctatcgctggcagcttctgcaccggcctcaagttggctacattcgggtgaagctctatgagggaccccagcttgtggcggattctggggtgatcattgacacatccatgcgaggggggcgtcttggtgtattctgcttctcccaagaaaacataatttggtccaatctccagtatcgatgcaatgacacagtgcctgaggactttgagccattccggaggcagctgctccagggaagggtgtgaggaggaggccaccagattcagaattcagaattttagaccctttggccttggggtccatcctggagaccctgaggtctaagctacagcccctcagccaaccacagacccttctctggctcccaaaaggagttcagtcccagaggggtggtcaccccacccttcaggggatgagaagttttcaaggggtattactcaggcactaaccccaggaaagatgacagcacattgccataaagttttggttgttttctaa

SEQ ID NO: 170379 - DNA, 2871 bp, Artificial Sequence
  derived and/or modified sequence
atggagacccaggagctgcggggggccctggccctgctgctgctgtgcttcttcaccagcgccagccaggacctgcaggtgattgacctgctgactgtgggggagagccggcagatggtggccgtggccgagaagatcagaacagccctgctgacagctggggacatctacctgctgagcaccttccggctgccccccaagcagggcggcgtgctgtttggcctgtacagccggcaggacaacacccgctggctggaggcctctgtggtgggcaagatcaacaaggtgctggtgcgctaccagagagaagatggcaaggtgcatgctgtgaacctgcagcaggccggcctggctgatggccgcacccacacagtgctgctgcggctgcggggccccagccggcccagccctgccctgcacctgtatgtggactgcaagctgggggaccagcacgccggcctgcctgccctggcccccatccccccagctgaggtggatggcctggagatcagaacaggccagaaggcctacctgaggatgcagggctttgtggagagcatgaagatcatcctgggcggctccatggcccgggtgggcgccctgtctgaatgtcccttccagggagatgagagcatccacagcgctgtgaccaatgccctgcacagcatcctgggggagcagaccaaggccctggtgacccagctgaccctcttcaaccagatcctggtggagctgagagatgacatccgggaccaggtgaaggagatgagcctcatccggaacaccatcatggagtgccaggtgtgtggcttccacgagcagaggagccactgcagccccaacccctgcttccggggcgtggactgcatggaggtgtatgagtacccaggctaccgctgtggcccctgccccccaggcctgcagggcaatggcacccactgcagcgacatcaatgaatgtgcccatgctgacccctgcttccctggcagcagctgcatcaacaccatgcctggcttccactgtgaggcctgcccccggggctacaagggcacccaggtgtctggagtgggcatcgactatgcccgggccagcaagcaggtgtgcaatgacattgatgaatgtaatgatggcaacaatggaggctgtgaccccaacagcatctgcaccaacacagtgggcagcttcaagtgtggcccctgccgcctgggcttcctgggcaaccagagccagggctgcctgcctgcccggacctgccacagccctgcccacagcccctgccacatccacgcccactgcctgtttgaaagaaatggagctgtgtcctgccagtgcaatgtgggctgggccggaaatggaaatgtgtgtggcacagacacagacattgatggctacccagaccaggccctgccctgcatggacaacaacaagcactgcaagcaggacaactgcctgctgacccccaacagcggccaggaggatgctgacaatgatggagtgggggaccagtgtgatgatgatgctgatggagatggcatcaagaatgtggaggacaactgccgcctcttccccaacaaggaccagcagaacagcgacacagacagctttggagatgcctgtgacaactgccccaacgtgcccaacaatgaccagaaggacacagatggaaatggagaaggagatgcctgtgacaatgatgtggatggagatggcatccccaacggcctggacaactgccccaaggtgcccaaccccctgcagacagacagagatgaagatggagtgggagatgcctgtgacagctgcccagagatgagcaaccccacccagacagatgctgacagcgacctggtgggagatgtgtgtgacaccaatgaagattctgatggagatggccaccaggacaccaaggacaactgcccccagctgcccaacagcagccagctggacagcgacaatgatggcctgggagatgaatgtgatggagatgatgacaatgatggcatcccagactatgtgcccccaggccctgacaactgccgcctggtgcccaaccccaaccagaaggacagtgatggaaatggagtgggagatgtgtgtgaagatgactttgacaatgatgctgtggtggaccccctggatgtgtgcccagagagcgctgaggtgaccctgacagacttccgggcctaccagacagtggtgctggaccctgaaggagatgcccagattgaccccaactgggtggtgctgaaccagggcatggagatcgtgcagaccatgaacagcgaccccggcctggccgtgggctacacagccttcaatggagtggactttgagggcaccttccacgtgaacacagtgacagatgatgattatgccggcttcctgttctcctaccaggacagcggccgcttctacgtggtgatgtggaagcagacagagcagacctactggcaggccacccccttccgggctgtggcccagcccggcctgcagctgaaggctgtgacctctgtgtctggccctggagagcacctgagaaatgccctgtggcacacaggccacaccccagaccaggtgcggctgctgtggacagaccccagaaatgtgggctggagggacaagaccagctaccgctggcagctgctgcaccggccccaggtgggctacatccgggtgaagctgtatgagggcccccagctggtggccgacagcggggtcatcatcgacacctccatgaggggcggccgcctgggcgtcttctgcttcagccaggagaacatcatctggagcaacctgcagtaccgctgcaatgacacagtgcctgaggactttgagcccttccggcggcagctgctgcagggccgggtgtag

SEQ ID NO: 170380 - DNA, 2871 bp, Artificial Sequence
  derived and/or modified sequence
atggagacccaggagctgcggggcgccctggccctgctgctgctgtgcttctttacaagtgcgtcccaggacctgcaggtcatagacctccttacggtaggcgaaagccgccagatggtagccgtcgccgagaaaatccggacagcactgctgacggctggggacatctacttgttgtccacgttccggctgccccccaagcaggggggcgttctgtttgggctctattccagacaggacaatacccggtggctggaggcttctgttgtggggaaaataaataaagtgctcgtccggtatcaacgcgaagacggtaaagtacatgctgttaatctgcagcaagctggactcgccgatggacggacccataccgtacttctgcggctgaggggcccatccagaccatctcccgcactccacctgtacgttgattgtaagcttggggatcagcacgcaggcttgcccgcccttgctcctattccaccagcggaagtcgacggtctagaaatacgcacagggcagaaggcttacctgcggatgcagggctttgtggagtctatgaaaatcatactggggggcagcatggctcgagtcggagctcttagcgaatgtcccttccagggagacgagtctatccatagtgcagtaacgaatgctttgcacagcatcttgggcgaacagacaaaagctctggttacccagctcacactgttcaatcaaattctcgttgagcttagggatgatatcagggaccaggtcaaggagatgagtctgattagaaacacaattatggaatgccaggtctgtggcttccacgagcagcggtcacactgttccccaaacccttgcttcaggggtgttgattgtatggaagtctatgagtatcccggttataggtgtggcccctgtccgcccggcctccagggtaacggcacacattgctctgatatcaatgaatgtgctcatgcagacccttgtttcccaggatcctcctgcattaacacaatgccaggatttcattgtgaagcatgcccccggggctacaaaggaacacaggtgagcggcgtaggcatcgattacgcccgcgccagtaaacaggtatgcaacgacatcgatgaatgtaatgatgggaataacgggggctgtgaccctaattctatctgcactaataccgtggggtcctttaagtgtggaccctgtaggctgggcttccttggtaatcaatcccagggctgcctgccggcgaggacctgccactcccccgcccacagcccttgtcacatacatgcccattgcctcttcgaaagaaacggcgccgtgtcttgccaatgcaacgtcggatgggctgggaatggcaatgtatgtgggacagacaccgacatcgacggctatccagaccaggccctcccctgcatggataacaataagcattgcaagcaggataactgtttgttgacccccaactctgggcaggaggacgcagataacgatggtgtgggggaccagtgcgacgacgacgcagatggggacggcatcaagaatgtcgaagataactgtcggctgtttcctaacaaggatcagcagaactccgatacggattcattcggggatgcctgtgataattgccctaatgtcccaaacaacgatcaaaaagacacagatggaaacggggaaggtgatgcgtgcgataatgatgtcgacggcgatgggattccgaacgggctggataattgcccgaaggtgcccaatcccctccagactgacagagacgaagacggggtaggcgacgcttgcgactcatgtcccgaaatgtctaatccaactcagactgacgccgatagtgatctggttggagacgtttgcgataccaacgaggactcagatggcgacggacaccaggacactaaggataactgcccccagcttcctaattccagtcagctggatagtgacaacgatggactcggcgacgagtgcgacggtgacgatgacaacgacggaatccctgactacgtgccaccagggcccgataattgccgtctcgtccctaatcctaaccagaaggacagtgatggtaacggagtgggcgatgtgtgtgaagatgatttcgacaacgatgccgttgtagacccactggacgtatgccctgagtcagcagaggtgactcttaccgactttcgtgcataccagactgtggttcttgacccggagggagatgctcagatcgaccctaattgggtggttctcaaccagggtatggaaattgtgcagacgatgaattctgatcctggtctggcagtgggttacacggctttcaatggtgtggactttgaaggcaccttccatgtgaatacggtcacggacgatgactatgccggttttctgttctcttaccaggattctggtcggttttatgtggttatgtggaaacagacagaacagacttattggcaagccaccccatttagagccgtggcgcagcctggcctacagctgaaagccgttacctccgtgtcaggacctggcgaacatcttcgcaacgccttgtggcatacaggacacactcccgaccaggtgcggctgttgtggactgatccccgaaatgtgggctggcgcgataaaacgtcctacaggtggcagctgctccaccgaccccaggtcggttatatacgggtcaagctgtatgaaggcccccagttggtggctgactccggtgttattatcgacacatcaatgcgcggcgggcgcctgggcgtgttctgcttcagccaggagaacattatttggtccaacctgcagtaccggtgcaacgataccgtccctgaggattttgaaccatttagacggcagttgctgcaaggccgcgtatag

SEQ ID NO: 170381 - RNA, 2871 nt, Artificial Sequence
  derived and/or modified sequence
auggagacucaggaacuacggggcgcacuggcucucuugcuccucugcuuuuucaccuccgccucucaagacuugcaaguuaucgaccuucuuacagugggagaaagcaggcagaugguagccgucgccgagaaaaucagaaccgccuugcucacagccggggauauauaucuguuaagcaccuuuagacugccccccaagcagggcggcguguuauucgggcuguacucuaggcaggauaauacuaggugguuagaggcgagcguagugggcaaaaucaauaaaguucuagugcgguaucagagggaagacggaaaaguacacgcagucaaucuccagcaggcaggccuugcugacggccguacgcacacuguacuguugaggcuuagagguccaucacggccuagcccagcucuucaccuguauguggacugcaaacuaggcgaucaacacgccggucuuccugcucuggccccuaucccacccgccgaaguagauggauuagaaauuagaacgggacaaaaagcauaccuccggaugcagggcuucguggagagcaugaaaauuauucuaggcggcaguauggcucgagugggagcauugucagaguguccguuucaaggagaugagaguauucacagcgcuguuacuaacgcccugcacucaauccugggugagcagaccaaagcccuugucacacaauuaacacucuucaaccaaauacugguugagcuuagagacgacaucagggaccaagucaaggagaugucccugaucaggaacacaaucauggaaugccagguguguggguuucacgaacagaggucucauuguucucccaaucccugcuuuaggggaguggacuguauggagguguaugaguaucccggcuaccgguguggcccuugccccccaggucugcaagguaauggcacucacugcucagauauuaaugaaugcgcacacgcugacccuuguuuuccuggcucuucuugcaucaacacaaugcccggcuuccacugugaggcaugcccucggggcuacaagggcacgcaggucuccgggguaggcauugauuaugcacgcgcauccaagcaggucuguaacgacaucgacgaaugcaacgacgguaauaacggcggaugugacccaaauuccauuuguaccaauacaguggggucuuuuaagugcgggccuugucgauuaggauuucuggggaaccagucccagggcugucuccccgccagaacaugccacagcccggcccacagucccugccauauccacgcacauugccuguuugaacggaacggagcugucagcugucaauguaaugugggcugggcgggaaaugguaaugucuguggcaccgacaccgauauugacggauauccagaccaggcacugccauguauggacaacaacaagcacugcaagcaggauaauugucugcugacaccaaacaguggacaagaggaugcugauaacgacggggugggagaucagugcgaugacgacgccgacggcgaugggaucaagaauguagaagacaacuguaggcuguuccccaauaaggaccagcaaaacuccgacacagacucuuucggcgacgcaugugauaacuguccuaauguucccaacaaugaucagaaggauaccgauggaaauggggaaggugacgcuugugacaaugacguggacggagacgggaucccaaauggucuggauaacuguccuaagguccccaauccucuucagacagacagagacgaggauggagugggagacgcuugcgauagcugccccgagaugaguaacccaacccaaacagacgccgauucggaccuaguuggugacgucugcgacaccaaugaggacucugauggcgauggccaucaggauaccaaagauaacugcccgcagcucccaaauaguucccaguuagacagugauaacgacgggcucggagaugagugugacggcgaugaugacaaugauggcauacccgauuacgucccccccggcccugauaacugccggcugguucccaauccaaaucagaaggauagcgacggaaauggcgucggcgaugugugcgaagacgauuucgauaaugaugcugugguggacccacucgaugugugcccagagucagcugagguaacacuaaccgacuucagggcauaucagacaguugugcuggaucccgagggagacgcccaaaucgauccaaacuggguggugcugaaccaaggaauggagauugugcagacuaugaacagugacccagggcuagccgucggauacacagccuucaaugguguggauuuugaaggaacuuuccacgugaauaccgucacagacgacgacuacgcuggauuccuguucuccuaucaggacucuggcagauuuuaugucguuauguggaaacagacagagcagaccuauuggcaggcuacuccuuucagggccguugcccagcccggcuugcagcugaaagccgugacaagugucucagggcccggcgagcaucuccgaaacgcauuguggcauaccgggcauaccccugaucagguacguuugcuguggacagacccucgcaacgucgguuggcgagauaagaccagcuauagauggcagcuguugcauagaccacagguuggguacauucgcgucaaguuguaugagggaccgcagcuaguggcugacaguggcguuaucauugauacuagcaugcgcggcggcaggcugggcguuuucugcuuuagucaggaaaacauuauuuggagcaacuuacaguauagaugcaaugacacuguacccgaggauuuugagcccuuccgccgucagcugcuucagggaaggguauag

SEQ ID NO: 170382 - RNA, 2871 nt, Artificial Sequence
  derived and/or modified sequence
auggagacucaggaacuacggggcgcacuggcucucuugcuccucugcuuuuucaccuccgccucucaagacuugcaaguuaucgaccuucuuacagugggagaaagcaggcagaugguagccgucgccgagaaaaucagaaccgccuugcucacagccggggauauauaucuguuaagcaccuuuagacugccccccaagcagggcggcguguuauucgggcuguacucuaggcaggauaauacuaggugguuagaggcgagcguagugggcaaaaucaauaaaguucuagugcgguaucagagggaagacggaaaaguacacgcagucaaucuccagcaggcaggccuugcugacggccguacgcacacuguacuguugaggcuuagagguccaucacggccuagcccagcucuucaccuguauguggacugcaaacuaggcgaucaacacgccggucuuccugcucuggccccuaucccacccgccgaaguagauggauuagaaauuagaacgggacaaaaagcauaccuccggaugcagggcuucguggagagcaugaaaauuauucuaggcggcaguauggcucgagugggagcauuaagcgaaugcccuuuccaaggugacgaaucaauacacagcgccguuacuaacgcacuucauucaauccugggcgagcaaaccaaggcccucguaacccaguugacgcucuuuaaccaaauccucguggagcugagagacgauauccgagaucaaguuaaagagaugagcuugauacggaacacaauuauggaaugucagguuugcggguuccaugagcagaggagccacuguucaccaaauccaugcuucagagguguagauuguauggaaguuuacgaguacccaggcuacaggugcgggcccugucccccuggccuucaaggaaaugguacucacugcagugauauuaacgaaugcgcccacgccgauccaugcuuuccagguaguaguuguaucaacaccaugccugguuuccauugcgaagcuuguccgcgaggcuacaagggcacacaagucuccgggguggggauugacuacgcgagagcaucaaagcaggucugcaaugauaucgaugaguguaaugacgguaacaauggcgguugcgaucccaauagcauaugcaccaacacagucggcuccuuuaaauguggaccaugucgacugggguuucuuggcaaucagucgcaagguugccugcccgcccgcaccugucacucaccagcucacucuccuugucacauccacgcccauugucucuuugagagaaacggugccguuuccugccaauguaacgucggaugggccgggaaugggaacgugugcgguacagacacagauaucgacgguuaccccgaccaagccuuaccuugcauggacaacaauaagcauugcaaacaggauaauugucugcucacuccgaacucuggccaggaagacgccgauaaugaugguguaggugaccaaugcgacgaugacgcugacggcgaugggauaaagaacguagaagauaacugccgauuguuuccaaauaaagaccagcagaauucggacacugacagcuuuggcgaugccugcgacaacugcccuaacguuccaaacaacgaucagaaagauacugaugggaacggagaaggagaugcgugcgacaacgauguggauggugacgguauucccaauggucuggauaacugcccgaagguaccgaacccacuacagacagaccgugacgaggacggggugggcgaugcgugugauucgugccccgaaaugagcaacccgacucagacagacgccgacucggaccucgugggcgacguuugcgauacgaaugaagacagcgacggcgauggccaccaggauacuaaagacaacugcccucagcugcccaacucaagccaacucgacagugauaaugacggacugggugacgaaugugacggugaugaugauaaugauggaauuccagacuacgugccgccaggacccgauaacugucgacuaguaccaaacccuaaucagaaagauagugauggcaacggagugggagaugugugcgaagacgauuuugauaacgaugccguaguugauccacuggauguuugucccgagagugcagaaguuacucuuacagacuuccgggccuaucagacagucguauuggauccagagggggaugcacaaauugaucccaacugggucguuuugaaucagggaauggaaaucgugcagacuaugaacagugacccaggacuugcaguagguuacacugcuuuuaauggcguugacuuugagggcacauuucaugugaacaccguuacagacgaugacuacgccgguuuuuuguuuagcuaccaggauucagguagauuuuacguugugauguggaaacagacugaacagacguauuggcaggcgaccccuuucagagcaguggcccagccaggguugcaguugaaagccgugacuagcguaaguggcccuggggagcaccuaagaaaugcucuguggcauacuggacacaccccugaucagguaagacuccuguggacagacccucguaaugucggguggagggauaagaccucuuaucgauggcaacuccuucauagaccccagguaggguacauuagggugaagcuuuacgaaggaccccaacucguggcugauucggguguaaucauugauacgagcaugcgggguggccgacuuggaguuuuuugcuucucucaggaaaacaucauaugguccaaucuucaguaccgcugcaaugacaccgugccagaagauuucgagccuuucaggcgccaacuacugcagggaagaguuuag

SEQ ID NO: 170383 - protein, 1943 aa, Artificial Sequence
  derived and/or modified sequence
MSPLLRSICDITEIFNQYVSHDCDGAALTKKDLKNLLEREFGAVLRRPHDPKTVDLILELLDLDSNGRVDFNEFLLFIFKVAQACYYALGQATGLDEEKRARCDGKESLLQDRRQEEDQRRFEPRDRQLEEEPGQRRRQKRQEQERELAEGEEQSEKQERLEQRDRQRRDEELWRQRQEWQEREERRAEEEQLQSCKGHETEEFPDEEQLRRRELLELRRKGREEKQQQRRERQDRVFQEEEEKEWRKRETVLRKEEEKLQEEEPQRQRELQEEEEQLRKLERQELRRERQEEEQQQQRLRREQQLRRKQEEERREQQEERREQQERREQQEERREQQLRREQEERREQQLRREQEEERREQQLRREQEEERREQQLRREQQLRREQQLRREQQLRREQQLRREQQLRREQQLRREQQLRREQQLRREQEEERHEQKHEQERREQRLKREQEERRDWLKREEETERHEQERRKQQLKRDQEEERRERWLKLEEEERREQQERREQQLRREQEERREQRLKRQEEEERLQQRLRSEQQLRREQEERREQLLKREEEKRLEQERREQRLKREQEERRDQLLKREEERRQQRLKREQEERLEQRLKREEVERLEQEERREQRLKREEPEEERRQQLLKSEEQEERRQQQLRREQQERREQRLKREEEEERLEQRLKREHEEERREQELAEEEQEQARERIKSRIPKWQWQLESEADARQSKVYSRPRKQEGQRRRQEQEEKRRRRESELQWQEEERAHRQQQEEEQRRDFTWQWQAEEKSERGRQRLSARPPLREQRERQLRAEERQQREQRFLPEEEEKEQRRRQRREREKELQFLEEEEQLQRRERAQQLQEEEDGLQEDQERRRSQEQRRDQKWRWQLEEERKRRRHTLYAKPALQEQLRKEQQLLQEEEEELQREEREKRRRQEQERQYREEEQLQQEEEQLLREEREKRRRQERERQYRKDKKLQQKEEQLLGEEPEKRRRQEREKKYREEEELQQEEEQLLREEREKRRRQEWERQYRKKDELQQEEEQLLREEREKRRLQERERQYREEEELQQEEEQLLGEERETRRRQELERQYRKEEELQQEEEQLLREEPEKRRRQERERQCREEEELQQEEEQLLREEREKRRRQELERQYREEEEVQQEEEQLLREEPEKRRRQELERQYREEEELQQEEEQLLREEQEKRRQERERQYREEEELQRQKRKQRYRDEDQRSDLKWQWEPEKENAVRDNKVYCKGRENEQFRQLEDSQLRDRQSQQDLQHLLGEQQERDREQERRRWQQRDRHFPEEEQLEREEQKEAKRRDRKSQEEKQLLREEREEKRRRQETDRKFREEEQLLQEREEQPLRRQERDRKFREEELRHQEQGRKFLEEEQRLRRQERERKFLKEEQQLRCQEREQQLRQDRDRKFREEEQQLSRQERDRKFREEEQQVRRQERERKFLEEEQQLRQERHRKFREEEQLLQEREEQQLHRQERDRKFLEEEQQLRRQERDRKFREQELRSQEPERKFLEEEQQLHRQQRQRKFLQEEQQLRRQERGQQRRQDRDRKFREEEQLRQEREEQQLSRQERDRKFRLEEQKVRRQEQERKFMEDEQQLRRQEGQQQLRQERDRKFREDEQLLQEREEQQLHRQERDRKFLEEEPQLRRQEREQQLRHDRDRKFREEEQLLQEGEEQQLRRQERDRKFREEEQQLRRQERERKFLQEEQQLRRQELERKFREEEQLRQETEQEQLRRQERYRKILEEEQLRPEREEQQLRRQERDRKFREEEQLRQEREEQQLRSQESDRKFREEEQLRQEREEQQLRPQQRDGKYRWEEEQLQLEEQEQRLRQERDRQYRAEEQFATQEKSRREEQELWQEEEQKRRQERERKLREEHIRRQQKEEQRHRQVGEIKSQEGKGHGRLLEPGTHQFASVPVRSSPLYEYIQEQRSQYRP

SEQ ID NO: 170384 - DNA, 438 bp, Artificial Sequence
  derived and/or modified sequence
tgaagaagaggcgccggcgtgagaagcggctgcgccagcagagcctgcagcggcgccctgggcggcagaggccccggcgagagcctgttcgcccagtaccccagaagagccgagggcagaagagagaagcagcaggtgaccgagcagagaaacggctggcccagccagagctggagctgctgctgcagcacctgcagccccaacaagtgcagctacatcctgatgacccagtgcatcggcagcagagagatggagctgagcgccgagtggcccggctgcagcgtgaacatgaaggccaccaagaccgccagaggcagcgagctgatcctgagcctgggcagcttcagcggcagagccggccagagaagaagacccccccccggccaccaggacggcagcgacaccagaggcctgagaagagtgcagctggccctgtag

SEQ ID NO: 170385 - DNA, 381 bp, Artificial Sequence
  derived and/or modified sequence
atgggcatgaggctgcagctgctgcgggaccggcgcatcagcagccggggccctggcctgcaccgggccaaggctgacccccagcagcagaagaggctgaccaccggcctgatgacccaggccgagacccagaaggaggcccagcagaggcaggccgccatgaggaagacagccctgtggcacacaggccacctgcagcccaagacccacacccacacaggcatgcacacccagacccaccgggagcgggagaggaacacccagaggctgcgggaccgggagaggagagaaaatggccgccacacccacacccacacagagacccacacccagaggcacacagaggaggccctgaagcacaccccacctggcaacccctag

SEQ ID NO: 170386 - DNA, 5832 bp, Artificial Sequence
  derived and/or modified sequence
atgagccccctgctgagaagcatctgcgacatcaccgagatcttcaaccagtacgtgagccacgactgcgacggcgccgccctgaccaagaaggacctgaagaacctgctggagagagagttcggcgccgtgctgagaagaccccacgaccccaagaccgtggacctgatcctggagctgctggacctggacagcaacggcagagtggacttcaacgagttcctgctgttcatcttcaaggtggcccaggcctgctactacgccctgggccaggccaccggcctggacgaggagaagagagccagatgcgacggcaaggagagcctgctgcaggacagaagacaggaggaggaccagagaagattcgagcccagagacagacagctggaggaggagcccggccagagaagaagacagaagagacaggagcaggagagagagctggccgagggcgaggagcagagcgagaagcaggagagactggagcagagagacagacagagaagagacgaggagctgtggagacagagacaggagtggcaggagagagaggagagaagagccgaggaggagcagctgcagagctgcaagggccacgagaccgaggagttccccgacgaggagcagctgagaagaagagagctgctggagctgagaagaaagggcagagaggagaagcagcagcagagaagagagagacaggacagagtgttccaggaggaggaggagaaggagtggagaaagagagagaccgtgctgagaaaggaggaggagaagctgcaggaggaggagccccagagacagagagagctgcaggaggaggaggagcagctgagaaagctggagagacaggagctgagaagagagagacaggaggaggagcagcagcagcagagactgagaagagagcagcagctgagaagaaagcaggaggaggagagaagagagcagcaggaggagagaagagagcagcaggagagaagagagcagcaggaggagagaagagagcagcagctgagaagagagcaggaggagagaagagagcagcagctgagaagagagcaggaggaggagagaagagagcagcagctgagaagagagcaggaggaggagagaagagagcagcagctgagaagagagcagcagctgagaagagagcagcagctgagaagagagcagcagctgagaagagagcagcagctgagaagagagcagcagctgagaagagagcagcagctgagaagagagcagcagctgagaagagagcagcagctgagaagagagcaggaggaggagagacacgagcagaagcacgagcaggagagaagagagcagagactgaagagagagcaggaggagagaagagactggctgaagagagaggaggagaccgagagacacgagcaggagagaagaaagcagcagctgaagagagaccaggaggaggagagaagagagagatggctgaagctggaggaggaggagagaagagagcagcaggagagaagagagcagcagctgagaagagagcaggaggagagaagagagcagagactgaagagacaggaggaggaggagagactgcagcagagactgagaagcgagcagcagctgagaagagagcaggaggagagaagagagcagctgctgaagagagaggaggagaagagactggagcaggagagaagagagcagagactgaagagagagcaggaggagagaagagaccagctgctgaagagagaggaggagagaagacagcagagactgaagagagagcaggaggagagactggagcagagactgaagagagaggaggtggagagactggagcaggaggagagaagagagcagagactgaagagagaggagcccgaggaggagagaagacagcagctgctgaagagcgaggagcaggaggagagaagacagcagcagctgagaagagagcagcaggagagaagagagcagagactgaagagagaggaggaggaggagagactggagcagagactgaagagagagcacgaggaggagagaagagagcaggagctggccgaggaggagcaggagcaggccagagagagaatcaagagcagaatccccaagtggcagtggcagctggagagcgaggccgacgccagacagagcaaggtgtacagcagacccagaaagcaggagggccagagaagaagacaggagcaggaggagaagagaagaagaagagagagcgagctgcagtggcaggaggaggagagagcccacagacagcagcaggaggaggagcagagaagagacttcacctggcagtggcaggccgaggagaagagcgagagaggcagacagagactgagcgccagaccccccctgagagagcagagagagagacagctgagagccgaggagagacagcagagagagcagagattcctgcccgaggaggaggagaaggagcagagaagaagacagagaagagagagagagaaggagctgcagttcctggaggaggaggagcagctgcagagaagagagagagcccagcagctgcaggaggaggaggacggcctgcaggaggaccaggagagaagaagaagccaggagcagagaagagaccagaagtggagatggcagctggaggaggagagaaagagaagaagacacaccctgtacgccaagcccgccctgcaggagcagctgagaaaggagcagcagctgctgcaggaggaggaggaggagctgcagagagaggagagagagaagagaagaagacaggagcaggagagacagtacagagaggaggagcagctgcagcaggaggaggagcagctgctgagagaggagagagagaagagaagaagacaggagagagagagacagtacagaaaggacaagaagctgcagcagaaggaggagcagctgctgggcgaggagcccgagaagagaagaagacaggagagagagaagaagtacagagaggaggaggagctgcagcaggaggaggagcagctgctgagagaggagagagagaagagaagaagacaggagtgggagagacagtacagaaagaaggacgagctgcagcaggaggaggagcagctgctgagagaggagagagagaagagaagactgcaggagagagagagacagtacagagaggaggaggagctgcagcaggaggaggagcagctgctgggcgaggagagagagaccagaagaagacaggagctggagagacagtacagaaaggaggaggagctgcagcaggaggaggagcagctgctgagagaggagcccgagaagagaagaagacaggagagagagagacagtgcagagaggaggaggagctgcagcaggaggaggagcagctgctgagagaggagagagagaagagaagaagacaggagctggagagacagtacagagaggaggaggaggtgcagcaggaggaggagcagctgctgagagaggagcccgagaagagaagaagacaggagctggagagacagtacagagaggaggaggagctgcagcaggaggaggagcagctgctgagagaggagcaggagaagagaagacaggagagagagagacagtacagagaggaggaggagctgcagagacagaagagaaagcagagatacagagacgaggaccagagaagcgacctgaagtggcagtgggagcccgagaaggagaacgccgtgagagacaacaaggtgtactgcaagggcagagagaacgagcagttcagacagctggaggacagccagctgagagacagacagagccagcaggacctgcagcacctgctgggcgagcagcaggagagagacagagagcaggagagaagaagatggcagcagagagacagacacttccccgaggaggagcagctggagagagaggagcagaaggaggccaagagaagagacagaaagagccaggaggagaagcagctgctgagagaggagagagaggagaagagaagaagacaggagaccgacagaaagttcagagaggaggagcagctgctgcaggagagagaggagcagcccctgagaagacaggagagagacagaaagttcagagaggaggagctgagacaccaggagcagggcagaaagttcctggaggaggagcagagactgagaagacaggagagagagagaaagttcctgaaggaggagcagcagctgagatgccaggagagagagcagcagctgagacaggacagagacagaaagttcagagaggaggagcagcagctgagcagacaggagagagacagaaagttcagagaggaggagcagcaggtgagaagacaggagagagagagaaagttcctggaggaggagcagcagctgagacaggagagacacagaaagttcagagaggaggagcagctgctgcaggagagagaggagcagcagctgcacagacaggagagagacagaaagttcctggaggaggagcagcagctgagaagacaggagagagacagaaagttcagagagcaggagctgagaagccaggagcccgagagaaagttcctggaggaggagcagcagctgcacagacagcagagacagagaaagttcctgcaggaggagcagcagctgagaagacaggagagaggccagcagagaagacaggacagagacagaaagttcagagaggaggagcagctgagacaggagagagaggagcagcagctgagcagacaggagagagacagaaagttcagactggaggagcagaaggtgagaagacaggagcaggagagaaagttcatggaggacgagcagcagctgagaagacaggagggccagcagcagctgagacaggagagagacagaaagttcagagaggacgagcagctgctgcaggagagagaggagcagcagctgcacagacaggagagagacagaaagttcctggaggaggagccccagctgagaagacaggagagagagcagcagctgagacacgacagagacagaaagttcagagaggaggagcagctgctgcaggagggcgaggagcagcagctgagaagacaggagagagacagaaagttcagagaggaggagcagcagctgagaagacaggagagagagagaaagttcctgcaggaggagcagcagctgagaagacaggagctggagagaaagttcagagaggaggagcagctgagacaggagaccgagcaggagcagctgagaagacaggagagatacagaaagatcctggaggaggagcagctgagacccgagagagaggagcagcagctgagaagacaggagagagacagaaagttcagagaggaggagcagctgagacaggagagagaggagcagcagctgagaagccaggagagcgacagaaagttcagagaggaggagcagctgagacaggagagagaggagcagcagctgagaccccagcagagagacggcaagtacagatgggaggaggagcagctgcagctggaggagcaggagcagagactgagacaggagagagacagacagtacagagccgaggagcagttcgccacccaggagaagagcagaagagaggagcaggagctgtggcaggaggaggagcagaagagaagacaggagagagagagaaagctgagagaggagcacatcagaagacagcagaaggaggagcagagacacagacaggtgggcgagatcaagagccaggagggcaagggccacggcagactgctggagcccggcacccaccagttcgccagcgtgcccgtgagaagcagccccctgtacgagtacatccaggagcagagaagccagtacagaccctag

SEQ ID NO: 170387 - DNA, 5832 bp, Artificial Sequence
  derived and/or modified sequence
atgagccccctcttgcgcagtatttgcgacatcactgagatcttcaaccagtatgtgagtcacgattgtgatggagccgcactgactaagaaagatctcaaaaatctcctggagcgcgagttcggtgctgtattgcgaaggccacacgaccctaaaaccgtagatctgattttggaactgcttgacttagacagcaacggacgcgtcgacttcaacgagttcctcctgttcatctttaaggtggcgcaggcgtgctactatgccctgggtcaggcgaccgggttggatgaggagaaaagagctcgttgcgatggtaaagagagcctgctgcaggaccggcggcaggaagaagatcagcgtagattcgaaccaagagacagacagttagaggaggagcccggtcagaggaggcgccagaagcggcaagagcaggaaagggagctggcagagggggaggagcaatcagagaaacaggagaggctggagcagcgggataggcaacgtagggacgaagaactgtggagacagcgccaggagtggcaggaaagggaggagcgacgggccgaggaagaacaactgcagtcctgcaagggccatgagacggaggaatttccggacgaggagcagctgcggaggagagaactgctggagctgcggcgcaaaggaagggaagaaaagcagcagcagagaagggagcggcaggatagagttttccaggaggaggaggaaaaggaatggcggaagcgcgaaaccgtgctccggaaggaggaagagaagcttcaggaggaagagccacagcggcagcgtgaactccaagaggaggaggagcagctaagaaaattagaacggcaagagctgcgccgagagaggcaagaggaggaacaacagcagcagcgactccggcgagaacagcagttaagacggaagcaggaggaggaaaggagagagcagcaagaggagcggcgtgagcagcaggaacggagagaacagcaggaggagaggagagagcagcagctgcggagagagcaggaagaaaggcgggaacaacagctgaggcgggaacaggaagaggagcgcagggagcagcagctgaggagagaacaagaggaggagagaagggagcagcagctgagacgcgagcaacagctccgcagagagcagcagctacggcgcgaacagcaactgagacgtgagcagcagttgaggagggaacaacaactcagacgcgagcagcagctcagacgcgaacagcagctaagacgtgaacaacagctgaggagggaacaggaggaagagcgacacgagcagaagcatgaacaggagcgtcgcgaacaacgtttaaagagggaacaagaagaaagaagagactggctcaaaagagaagaggagacagaaaggcacgaacaagaaagacgcaaacagcaacttaagagggaccaggaagaggaacgaagggaaagatggctcaagttggaagaagaggagagaagagagcaacaagagcggcgggaacagcagctccgacgtgaacaggaagagcggagggaacagcgtctaaagcgacaggaagaagaagaacggctccagcagcgattgcgctcagaacagcaactgagaagagagcaagaggagcggcgggagcagctcctgaagcgggaggaggaaaaaagacttgaacaagagcgccgggaacagcggttaaaacgggaacaggaggaacgtagagaccagctcctgaaacgggaagaggagcggagacagcagaggttaaagcgagaacaggaggagagacttgagcagaggttaaagcgcgaggaggtcgaaaggttggaacaggaagaacgtagggagcaacggcttaaaagagaagagcctgaggaggaaagaaggcagcagctgctgaagagcgaggagcaggaggagagaaggcagcaacaattgcgcagggaacaacaagaacgccgtgagcagaggctgaaacgtgaggaggaagaggagagactagagcagaggctgaaacgcgaacatgaggaggaacgaagggagcaggagcttgcagaggaagaacaggagcaggcaagggagcgcattaagtcacgtatccccaagtggcagtggcagttggaaagcgaggctgatgctcgtcagagcaaagtttactctagaccgaggaagcaggaaggccagcgacgccgccaagaacaggaggagaagagaaggcgacgggaaagcgaattgcagtggcaggaggaggaacgggctcaccgacagcaacaggaggaagagcaaagaagggatttcacttggcagtggcaggccgaagaaaaaagcgaacgaggtcggcaaagactctccgcgagacccccactgcgcgaacagagggagcggcagctacgggctgaggagcgccagcagagagagcagcgcttcctgcccgaggaagaagagaaggaacagcggagacgacagcgaagggagagagaaaaggagctgcagtttctcgaggaggaagagcaactgcaacgtagagagagagcccagcaactacaggaggaggaggatgggctgcaggaagaccaggagagacggaggtcccaggagcagagacgcgaccagaaatggcggtggcagttggaagaagaaagaaagcggaggagacacacactttatgccaaacccgcactgcaagaacaactgcggaaggaacagcaactgctgcaggaggaggaggaggagctccagagggaagagcgtgagaaacgtaggcgacaggaacaggaacgacaatatcgggaagaagagcaattgcagcaggaggaggagcagcttctgagggaagagcgagagaaacgccgaagacaagagcgagagcgtcagtacaggaaggacaaaaagctgcagcagaaggaggagcagctactcggcgaggagcctgagaagaggcgcagacaagagagggagaagaagtacagagaggaagaagaacttcagcaggaggaagagcagttgctgcgggaagagagggaaaaacgtcggaggcaggaatgggagaggcaatacaggaaaaaagatgagttacagcaagaggaggagcagctcctacgagaggagcgtgagaaacggcggttacaggaaagagaacgtcaataccgagaagaggaagaattacagcaggaagaggagcagctgttgggtgaggagcgcgaaactcggcgtcggcaggagctggaacgccagtaccgcaaggaggaggagttgcaacaggaggaggaacagttgttaagggaggagccagagaagcgacgcaggcaggagcgcgaaagacagtgcagggaagaggaagagttgcagcaagaggaagagcagctgctcagggaagagagagaaaagcgaaggaggcaggaacttgagcgccagtacagggaggaagaggaggtacagcaggaggaggaacaactcttaagggaagagccagagaagcggcgcaggcaggaactcgaaagacaatatagggaagaggaagaactccagcaagaggaggaacagttgttgcgcgaggaacaagagaaaagacgacaagagcgcgagcgacagtacagggaagaagaggaactccagcgtcaaaagcggaaacaaagataccgggacgaagatcaaagaagtgatctgaagtggcagtgggagcccgagaaagagaatgctgtccgcgataataaggtctattgtaagggacgcgagaacgagcagttccggcagctggaggactcccagctgcgagaccgccagagtcagcaggacctgcaacacctactgggcgagcagcaggaacgtgaccgtgaacaggagcggaggcgctggcagcagagggacaggcacttccccgaggaggaacagctcgagcgtgaggagcaaaaggaagccaagcggcgcgatcggaagtctcaagaagagaagcagctgctgcgtgaggagcgtgaggaaaaacgtcgtcggcaggagacagaccgtaaatttcgcgaggaggaacaacttctgcaggaaagagaagagcagcccctgcggcgacaagaaagagaccgaaaatttagagaagaagagttgcgccaccaggaacaagggagaaagttccttgaagaggaacagcgcctgcgccggcaggagcgggagcggaagttcctcaaggaggaacaacagctgaggtgccaggaacgggaacagcagttgcggcaggaccgggaccgcaagtttcgcgaggaagagcagcaattaagccgtcaggagcgcgacagaaagttccgtgaggaggagcagcaagtgcgaaggcaggagcgggagcgtaaattcctcgaagaggagcagcaactgagacaggaaaggcaccgtaaatttcgcgaggaggagcagttgctccaggagcgggaagaacaacagctccataggcaagagcgggatagaaagttcctggaagaggagcagcagttgcgccggcaggagcgagaccgtaaattcagagaacaggagctgcggtctcaggagccagagcgcaaatttctagaagaggagcaacaattgcaccggcaacagagacagcgaaagttcctccaggaagagcagcaattgaggcgccaggagagagggcagcagcgcagacaggatcgagaccggaagtttagggaagaagagcaactgagacaggagagagaggaacagcagctgtccaggcaggaacgcgatcgaaaatttagactcgaagaacaaaaggtaagacgacaggagcaggagagaaagtttatggaagatgaacagcagctgcgacgtcaggaaggacagcaacagttgagacaggagcgggaccgcaagttccgcgaggacgagcagttactgcaggagagagaggagcagcaactccaccgccaggagcgtgaccggaaatttttggaagaggaaccccagttgagacgccaggaaagggaacaacagttgcggcacgacagagatagaaagtttcgggaggaagaacagctgctgcaggagggggaagaacagcagctgcggagacaggagcgtgaccggaagtttagagaggaggaacagcaacttcgcagacaggagagggaaaggaagtttttgcaggaggagcagcagctgaggaggcaagagctagagcgcaagttccgggaagaggaacagctgcgacaggaaacggagcaggagcagctccggaggcaagagaggtaccggaagatattagaggaagagcagctgcgacccgagcgggaggagcagcaactgaggaggcaggagcgggaccgtaagtttagggaagaggaacaattgcggcaagagagggaagaacagcagcttcgctctcaggagagtgacagaaagttcagggaggaggagcagctccgacaggagcgggaggagcagcagttgcggccccagcagagagacggtaaataccgctgggaagaggaacagttgcaacttgaggaacaggagcaacggctcagacaagaaagggatagacagtatcgagcagaggagcaattcgctacacaggaaaaatccagacgggaggagcaggagctgtggcaagaggaagaacagaagcgaagacaggaacgggaaagaaaactccgggaagagcatatcagacgccaacaaaaggaggaacagcgacacagacaggtcggagagatcaagagtcaggaaggcaaaggccacggcaggctgctcgagcctggcacccatcagtttgcgagcgtgccagtgagatcttcccccctttatgaatacatccaggagcagcggagccagtaccgaccatag

SEQ ID NO: 170388 - DNA, 5832 bp, Artificial Sequence
  derived and/or modified sequence
atgagccccctgctgcggagcatctgtgacatcacagagatcttcaaccagtatgtgtcccatgactgtgatggagctgccctgaccaagaaggacctgaagaacctgctggagcgggagtttggagctgtgctgcggcggccccatgaccccaagacagtggacctgatcctggagctgctggacctggacagcaatggccgggtggacttcaatgagttcctgctcttcatcttcaaggtggcccaggcctgctactatgccctgggccaggccaccggcctggatgaggagaagagggcccgctgtgatggcaaggagagcctgctgcaggaccggcggcaggaggaggaccagaggagatttgagccccgggaccggcagctggaggaggagcccggccagaggcggcggcagaagaggcaggagcaggagcgggagctggccgagggggaggagcagagcgagaagcaggagcggctggagcagagggaccggcagaggagagatgaggagctgtggaggcagaggcaggagtggcaggagcgggaggagcggcgggcagaggaggagcagctgcagagctgcaagggccatgaaacagaggagttcccagatgaggagcagctgcggcggcgggagctgctggagctgcggaggaagggccgggaggagaagcagcagcagaggcgggagcggcaggacagagtcttccaggaggaggaggagaaggagtggaggaagcgggagaccgtgctgaggaaggaggaggagaagctgcaggaggaggagccccagaggcagcgggagctgcaggaggaggaggagcagctgaggaagctggagcggcaggagctgcggcgggagcggcaggaggaggagcagcagcagcagaggctgcggcgggagcagcagctgcggaggaagcaggaggaggagcggcgggagcagcaggaggagcggcgggagcagcaggagcggcgggagcagcaggaggagcggcgggagcagcagctgcggcgggagcaggaggagcggcgggagcagcagctgcggcgggagcaggaggaggagcggcgggagcagcagctgcggcgggagcaggaggaggagcggcgggagcagcagctgcggcgggagcagcagctgcggcgggagcagcagctgcggcgggagcagcagctgcggcgggagcagcagctgcggcgggagcagcagctgcggcgggagcagcagctgcggcgggagcagcagctgcggcgggagcagcagctgcggcgggagcaggaggaggagagacatgagcagaagcatgagcaggagcggcgggagcagaggctgaagcgggagcaggaggagcggcgggactggctgaagcgggaggaggagacagaaagacatgagcaggagaggaggaagcagcagctgaagagggaccaggaggaggagcggcgggagcgctggctgaagctggaggaggaggagcggcgggagcagcaggagcggcgggagcagcagctgcggcgggagcaggaggagcggcgggagcagaggctgaagaggcaggaggaggaggagcggctgcagcagaggctgcggtctgagcagcagctgcggcgggagcaggaggagcggcgggagcagctgctgaagcgggaggaggagaagaggctggagcaggagcggcgggagcagaggctgaagcgggagcaggaggagcggcgggaccagctgctgaagcgggaggaggagcggcggcagcagaggctgaagcgggagcaggaggagcggctggagcagaggctgaagcgggaggaggtggagcggctggagcaggaggagcggcgggagcagaggctgaagcgggaggagcctgaggaggagcggcggcagcagctgctgaagtctgaggagcaggaggagcggcggcagcagcagctgcggcgggagcagcaggagcggcgggagcagaggctgaagcgggaggaggaggaggagcggctggagcagaggctgaagcgggagcacgaggaggagcggcgggagcaggagctggccgaggaggagcaggagcaggcccgggagcgcatcaagagccgcatccccaagtggcagtggcagctggagagcgaggctgatgcccggcagagcaaggtgtacagccggcccaggaagcaggagggccagaggcggcggcaggagcaggaggagaagagaagaagaagagagagcgagctgcagtggcaggaggaggagcgggcccaccggcagcagcaggaggaggagcagaggcgggacttcacctggcagtggcaggccgaggagaagtctgagcggggccggcagaggctgagcgcccggccccccctgcgggagcagcgggagcggcagctgcgggcagaggagcggcagcagcgggagcagcgcttcctgcctgaggaggaggagaaggagcagaggcggcggcagaggcgggagcgggagaaggagctgcagttcctggaggaggaggagcagctgcagaggcgggagcgggcccagcagctgcaggaggaggaggatggcctgcaggaggaccaggagaggagaagaagccaggagcagaggcgggaccagaagtggcgctggcagctggaggaggagaggaagagaagaagacacaccctgtatgccaagccagccctgcaggagcagctgaggaaggagcagcagctgctgcaggaggaggaggaggagctgcagcgggaggagcgggagaagagaagacggcaggagcaggagcggcagtaccgggaggaggagcagctgcagcaggaggaggagcagctgctgcgggaggagcgggagaagagaagacggcaggagcgggagcggcagtacaggaaggacaagaagctgcagcagaaggaggagcagctgctgggggaggagcctgagaagagaagacggcaggagcgggagaagaagtaccgggaggaggaggagctgcagcaggaggaggagcagctgctgcgggaggagcgggagaagagaagacggcaggagtgggagcggcagtacaggaagaaggatgagctgcagcaggaggaggagcagctgctgcgggaggagcgggagaagaggcggctgcaggagcgggagcggcagtaccgggaggaggaggagctgcagcaggaggaggagcagctgctgggggaggagcgggagacccggcggcggcaggagctggagcggcagtacaggaaggaggaggagctgcagcaggaggaggagcagctgctgcgggaggagcctgagaagagaagacggcaggagcgggagcggcagtgccgggaggaggaggagctgcagcaggaggaggagcagctgctgcgggaggagcgggagaagagaagacggcaggagctggagcggcagtaccgggaggaggaggaggtgcagcaggaggaggagcagctgctgcgggaggagcctgagaagagaagacggcaggagctggagcggcagtaccgggaggaggaggagctgcagcaggaggaggagcagctgctgcgggaggagcaggagaagaggcggcaggagcgggagcggcagtaccgggaggaggaggagctgcagaggcagaagaggaagcagcgctacagagatgaggaccagaggagtgacctgaagtggcagtgggagcctgagaaggaaaatgctgtgcgggacaacaaggtgtactgcaagggccgggagaatgagcagttccggcagctggaggacagccagctgcgggaccggcagagccagcaggacctgcagcacctgctgggggagcagcaggagcgggaccgggagcaggagcggcggcgctggcagcagagggacagacacttccctgaggaggagcagctggagcgggaggagcagaaggaggccaagagaagagacaggaagagccaggaggagaagcagctgctgcgggaggagcgggaggagaagagaagacggcaggagacagacaggaagttccgggaggaggagcagctgctgcaggagcgggaggagcagcccctgcggcggcaggagcgggacaggaagttccgggaggaggagctgcggcaccaggagcagggcaggaagttcctggaggaggagcagaggctgcggcggcaggagcgggagaggaagttcctgaaggaggagcagcagctgcgctgccaggagcgggagcagcagctgcggcaggaccgggacaggaagttccgggaggaggagcagcagctgagccggcaggagcgggacaggaagttccgggaggaggagcagcaggtgcggcggcaggagcgggagaggaagttcctggaggaggagcagcagctgcggcaggagcggcacaggaagttccgggaggaggagcagctgctgcaggagcgggaggagcagcagctgcaccggcaggagcgggacaggaagttcctggaggaggagcagcagctgcggcggcaggagcgggacaggaagttccgggagcaggagctgcggagccaggagcctgagaggaagttcctggaggaggagcagcagctgcaccggcagcagaggcagaggaagttcctgcaggaggagcagcagctgcggcggcaggagcggggccagcagaggcggcaggaccgggacaggaagttccgggaggaggagcagctgcggcaggagcgggaggagcagcagctgagccggcaggagcgggacaggaagttccggctggaggagcagaaggtgcggcggcaggagcaggagaggaagttcatggaggatgagcagcagctgcggcggcaggagggccagcagcagctgcggcaggagcgggacaggaagttcagagaagatgagcagctgctgcaggagcgggaggagcagcagctgcaccggcaggagcgggacaggaagttcctggaggaggagccccagctgcggcggcaggagcgggagcagcagctgcggcatgaccgggacaggaagttccgggaggaggagcagctgctgcaggagggggaggagcagcagctgcggcggcaggagcgggacaggaagttccgggaggaggagcagcagctgcggcggcaggagcgggagaggaagttcctgcaggaggagcagcagctgcggcggcaggagctggagaggaagttccgggaggaggagcagctgcggcaggagacagagcaggagcagctgcggcggcaggagcgctacaggaagatcctggaggaggagcagctgcggcctgagcgggaggagcagcagctgcggcggcaggagcgggacaggaagttccgggaggaggagcagctgcggcaggagcgggaggagcagcagctgcggagccaggagagtgacaggaagttccgggaggaggagcagctgcggcaggagcgggaggagcagcagctgcggccccagcagagagatggcaagtaccgctgggaggaggagcagctgcagctggaggagcaggagcagaggctgcggcaggagcgggaccggcagtacagagctgaggagcagtttgccacccaggagaagagccggcgggaggagcaggagctgtggcaggaggaggagcagaagaggcggcaggagcgggagaggaagctgcgggaggagcacatccggcggcagcagaaggaggagcagaggcaccggcaggtgggggagatcaagagccaggagggcaaaggacatggccgcctgctggagcccggcacccaccagtttgcctctgtgcctgtgcgcagcagccccctgtatgagtacatccaggagcagaggagccagtaccggccctag

SEQ ID NO: 170389 - DNA, 5832 bp, Artificial Sequence
  derived and/or modified sequence
atgagccccctgctgcggagcatctgcgacatcaccgagatcttcaatcagtacgtatctcatgactgcgatggcgctgctctgacaaagaaggacttaaagaacctccttgaaagggaatttggtgctgtactgagaaggccacacgaccctaagacagtcgaccttattctggaacttttggacctggattctaatggacgagtggacttcaatgagtttctcttatttatctttaaagtggcacaggcttgttattatgccctcggacaggctaccggcctggatgaggaaaagcgcgctaggtgcgacgggaaggagagcctgctccaagaccgcagacaagaagaggatcaacggaggttcgaacctcgcgacaggcagctcgaggaggaacccgggcagcgaaggagacagaagcgtcaagaacaggaaagagaactggccgagggagaggagcaatctgagaagcaagaaaggcttgaacagagggatagacaacgaagagatgaagagctgtggcggcagcgccaagagtggcaggagcgggaagagaggagagccgaagaggagcaacttcagtcctgtaagggtcatgaaacggaagagtttccagacgaggaacagcttcggcgtagggagctgctcgagttgcggcgcaagggccgcgaggagaagcaacagcagaggagagagcgacaggatcgcgtgttccaggaggaggaagaaaaggagtggcgcaagagagaaacggttttacggaaagaagaggaaaagctccaggaggaagagccccaacggcagagggagcttcaggaggaggaggagcagttgcggaaactggaacggcaggaacttagacgggaacggcaggaggaggagcagcagcaacagagactgagacgcgaacagcagttgagacgaaagcaggaagaagagaggcgcgagcagcaggaggaaaggagggaacagcaagaaaggcgggaacagcaagaggaaagacgggaacaacagttgagaagggagcaggaggagcggagagagcagcagctccggagagagcaggaagaggaaagaagagagcagcagctgaggagggaacaagaagaagagaggcgcgagcagcagttgagacgcgagcagcagttgaggagggagcagcaactcagaagagagcagcagcttaggcgggagcagcagctgcggcgggaacaacagctgcgcagggagcagcagctgcgacgcgaacagcagctccgaagggaacagcagctccgaagggagcaagaagaggagcggcatgaacaaaagcacgagcaggagaggcgggagcagaggttgaagcgcgagcaggaggagcgacgagactggctgaagagagaagaggagacggagaggcacgagcaagagaggcggaagcagcagttgaaacgggatcaggaggaagagcgaagagaaagatggcttaagcttgaggaggaggagcgcagggagcagcaggaacgtcgggaacagcaattgcgacgcgagcaggaggagagacgcgagcagcggctaaagcgccaggaagaagaggagagacttcagcagaggctgcggtcagagcaacaactcagaagagagcaggaggagagacgtgagcagttgctgaagcgggaggaggagaagcgcctggagcaggagcgtcgggaacaacgccttaagagggagcaagaagaaagacgcgaccagttactaaaacgagaagaggagcgccggcagcagcgcctgaaacgcgaacaagaagagcgactggagcagcgcctgaagcgtgaagaggtggagcggctcgaacaggaagaaaggagagagcaacggttgaagagggaagaacctgaagaggagcgcagacaacaattgctgaaatcggaggaacaagaggagcgtcggcaacagcagctgagacgggaacagcaagaaagacgagaacagcggcttaagcgcgaggaagaggaagagaggctcgagcagaggctcaagagggagcatgaggaagagcggcgggagcaggaactggccgaggaggaacaggagcaggctagagagcgtataaagagccggatacccaagtggcagtggcaacttgaaagtgaggcagatgccagacagtctaaagtgtattccaggcctaggaaacaggagggccaacggcgtagacaggagcaggaggagaaaaggcggcgcagggaatcagagttgcagtggcaggaagaggagcgggcacatcgccaacaacaggaggaggagcagagacgcgacttcacttggcagtggcaggctgaagagaaaagtgagcgaggtaggcaaagactgtctgcgagacctcccctgcgtgagcagagagaacgacaactgagagccgaagagcgccagcaacgagagcagcgcttcttgcctgaggaagaggagaaggaacagcgccgaagacaacgcagagagcgagagaaagagttacagttcttggaggaggaagagcagttacagaggagggaaagagcccagcagttgcaggaggaggaggacggactccaggaggaccaagagcggcggcgcagtcaagagcagcgcagagatcagaagtggaggtggcagttggaagaggagcgcaaacggcgtcgtcacacactctatgccaagccagcccttcaagagcagctgcgaaaagagcagcagctcctgcaagaggaagaggaggaactacagagagaggagcgagagaaacgccgtagacaggaacaggagcgccagtaccgggaagaagagcaactacaacaggaggaggaacagctcctgagggaggaacgggaaaagcggcgtaggcaggaacgtgaaagacagtataggaaggataaaaagctccagcagaaagaggagcaactgctgggggaggagcccgaaaagagacgtaggcaagagcgcgagaaaaaatacagagaagaggaggagttacagcaggaggaggagcagttgctgcgagaagaacgcgaaaaacggcgtagacaggagtgggagcgacagtatcggaagaaggacgagctgcagcaggaggaggaacagctgctccgggaggaacgtgagaaacgaagacttcaggagcgcgagcgtcaatacagggaagaggaggagcttcagcaagaagaggaacagttgttgggagaagagcgagagacgcgccgccgccaggagctggagaggcagtatagaaaggaggaagaactccagcaagaggaagagcaactgttgagggaggagcctgaaaagagacggcggcaggagagggagcggcaatgtcgcgaagaagaggagctgcagcaggaggaggaacagctgctgcgcgaggagcgtgagaagaggcgcagacaggagcttgagcgtcagtacagggaggaggaggaagtgcagcaagaggaagaacagctattgagagaggaaccggagaagagaaggaggcaggaactcgagcgccagtatcgcgaggaggaggagctgcaacaggaagaggaacagctgcttcgggaggaacaggaaaaacgacggcaggaacgtgagcgacagtacagagaggaggaggaactccagcgacagaaaaggaaacagaggtaccgggatgaggatcaacggagcgatctcaaatggcagtgggagccagaaaaagagaatgctgtacgcgataacaaggtgtactgcaaaggaagggaaaatgaacagtttcgacagctggaagactcccagctccgggataggcagagtcagcaggatctgcaacatctgctcggagaacagcaagagcgcgaccgggagcaggaacggcgcagatggcagcaaagggatcgacacttccccgaagaggaacagctggagagggaagaacagaaagaagcaaagcgaagggataggaagagccaggaggaaaaacagcttttgcgggaggagagagaggagaaacgacgccgccaggagacagacaggaagttcagagaggaagaacagctgttgcaggagcgtgaggagcagcctcttcgtcgccaggagcgtgataggaagtttagagaggaagaacttaggcaccaagagcaaggtcgcaagttcctggaggaggagcagcggttacgcagacaagagagggaaaggaagtttctgaaggaggagcagcagcttcgctgtcaagaacgagagcaacagttgcgccaggaccgagatagaaaattcagggaagaagaacagcagctgtctcgccaagaacgcgatcgtaagttccgagaggaggagcagcaggtgagaaggcaggagagagagagaaaattcctcgaggaggaacagcaactgcgccaagagcggcaccgaaagttccgagaagaagaacaattactacaggaaagagaagagcagcagctgcacaggcaggaaagagatcgtaagttcctagaagaggagcagcagcttcgtaggcaagagcgggacaggaagttccgagagcaggagcttaggtctcaggaacccgaacggaaattcttggaggaggagcagcaactccatagacaacagcgccagcgcaaatttctacaggaggaacagcaactccgccggcaagaacgagggcagcagcggcgccaagaccgcgatcgaaaatttcgagaagaggaacaactgaggcaagaacgggaagagcaacaactgtcccgacaggaacgggaccgcaaattcaggttagaagaacagaaggtcaggcggcaggaacaggagagaaaattcatggaagacgaacagcaactcagaaggcaggaagggcagcagcagctccgccaagagagggacagaaagtttcgagaagatgagcaattactgcaagagcgggaggagcagcaactgcataggcaagagagggatcgcaaattcttggaagaagaacctcagctcaggaggcaagaacgcgagcagcagctaaggcacgacagggataggaaatttcgggaggaagagcagctgctccaagaaggtgaagagcaacagctgagacgacaggagcgtgacagaaaatttcgggaagaagaacagcagttacgacggcaggagcgggagcgaaagtttctgcaagaggaacagcaattgcggaggcaggagctcgagagaaagttcagagaggaggaacagcttcggcaggagactgaacaagaacagctacgccgacaagagaggtaccggaagatcctggaggaagaacagctgcggcccgaaagagaggagcagcagctgcggaggcaggagcgcgaccgtaaattcagagaggaagagcagctccggcaggaacgggaggagcagcagctgcgaagtcaagagtctgacaggaagttcagggaggaggaacagttgcgtcaagagcgcgaggagcagcagttgaggccgcagcagagggatggaaagtatcgctgggaggaggaacagcttcaacttgaagaacaggagcagcgcctgagacaagagagagatagacagtaccgtgcagaagagcagtttgctactcaggagaagagcaggagagaggaacaggagctatggcaagaggaggaacagaagagaagacaggagcgcgaacggaaattgcgggaggagcacattagaaggcagcagaaggaagagcagcgtcatcgccaagtcggtgagatcaaatcacaggagggcaaagggcacgggaggctcttagaacctggcacgcaccaattcgctagcgtccccgtcaggagttcgccgctttatgaatacattcaagagcagcgaagccagtacagaccctag

SEQ ID NO: 170390 - DNA, 5831 bp, Artificial Sequence
  derived and/or modified sequence
atgtctcctcttttacgaagcatctgcgacattaccgagatcttcaatcagtatgtgtcacacgactgcgatggggcagcgctcacaaagaaagacctgaaaaacttgttagagcgcgagtttggggctgtgctgagaagacctcacgacccaaaaactgttgacctcattctggagctgctcgacttggacagcaacggccgagtcgacttcaatgaattcctgctgttcatattcaaggtcgctcaggcatgctattatgccctgggccaggccactggccttgacgaagagaaacgcgcaaggtgtgacgggaaagagtctctgctacaggatcgcaggcaggaggaagaccagcgtcgattcgagccacgagaccggcagctggaggaggagccaggccagcggcgtagacagaagaggcaagagcaggaacgcgagctggcagagggggaggagcagagtgagaaacaggaaaggctcgagcaaagagatagacagcgcagagatgaggaattgtggaggcagcgacaggaatggcaggagagagaagagaggcgcgctgaggaagaacagctgcaaagctgtaagggacacgagactgaagagtttcccgatgaagagcaattgcggaggcgggaactgcttgaattgcggaggaaaggccgtgaagaaaaacagcagcagagaagagaacgacaggaccgcgtttttcaggaggaagaggagaaagagtggcgtaagagggagactgtcctccgtaaagaggaggaaaaactgcaggaagaagagccacagagacagcgagagctacaggaggaggaggaacagcttcgcaagcttgagcgacaggagctcaggcgcgagcggcaagaagaagagcagcaacaacaacgtcttagacgcgagcagcaactccggcgaaagcaggaagaggagaggcgtgagcagcaagaggagaggcgagagcaacaggagcgtcgggaacagcaggaggagcgcagggagcagcagctgcgccgagaacaggaggaacggagggagcaacagcttcggcgagagcaggaagaagagcgcagagagcagcagttgaggcgcgagcaagaggaggagcgacgggagcagcagctgcgccgagagcaacaactcaggcgcgaacaacagctgcggagggaacaacagctgagacgtgagcagcagctccgcagggagcagcagctgagacgggagcagcagctgaggcgcgaacaacaactacgaagggaacagcagctgaggcgcgaacaggaggaggagcgccatgagcagaaacatgaacaggagagacgcgaacagcgcctaaagcgtgaacaggaagagcggcgagactggctcaaaagagaagaggagaccgagagacatgaacaggagcggaggaagcaacagctaaagagggatcaggaagaagagcgcagggagagatggctaaaattagaagaggaagaacggcgtgagcagcaggaaaggagggagcagcagctgaggagagagcaagaagagcggagggagcaaaggctcaagaggcaggaagaggaagagcgactgcaacagaggctccgaagcgaacaacagctgaggcgggaacaggaagaaaggagggaacagctcttgaagagggaagaggagaagcgtctggaacaggagagaagagagcaacgcctgaagcgagagcaggaggagaggcgcgaccagctccttaagcgtgaggaggaacgcaggcagcaacggctgaaacgcgagcaggaggagcggctagaacaaagactgaaacgagaagaggttgaaaggctcgagcaggaagagagaagagagcagagactcaagcgggaggagcctgaagaggagagacggcagcagctgcttaagagcgaagagcaggaggagagaaggcagcaacaattaagacgggagcagcaggagaggcgcgagcagagattgaaacgcgaggaagaggaggagaggctggaacagcgactaaaacgggagcacgaggaagagcgacgcgagcaggagttagccgaagaggagcaggagcaagcaagagaacgtattaagagccgcatccctaaatggcagtggcagctcgaatctgaagcagacgctaggcagtccaaggtttattcacggccacgcaaacaggagggacaaagacgccgacaggaacaggaggaaaaaagaagacgtagagaatctgaactccagtggcaggaagaggagcgcgctcatcgacagcagcaggaggaggaacaaaggcgtgacttcacatggcagtggcaggctgaggaaaagagcgagcgtggccgtcagaggctgtcagcaagacctcctctgcgagagcagagggagcggcagctccgcgcagaagagcgacagcagagagagcagcgcttcttacctgaagaagaagaaaaagaacaaaggcgcaggcagcggcgagagagggagaaagaattacagtttctggaggaggaagaacagctccagaggagggagagggcccagcagttgcaggaagaggaagatggcttgcaggaagaccaagagcggaggcgctcgcaggagcagcgcagagaccagaaatggcggtggcagctggaggaggagagaaaacgacggagacataccctgtatgccaaacccgctttgcaggaacagctcaggaaagaacaacaacttctgcaagaagaggaagaagagcttcagagagaggagcgggagaaaagaagaaggcaggagcaggagagacaatacagggaggaggagcagctgcagcaagaggaagaacagttactccgcgaggaacgcgaaaaacgtcgtagacaagaacgggaacggcagtatagaaaagacaagaaactgcagcagaaggaggagcagctgctgggcgaagagcctgagaagcggagacgtcaagagagagaaaaaaaatatagagaagaggaagagctgcagcaggaagaggagcaactcctccgcgaggaacgagaaaagcggagacgacaagagtgggagcgccagtacaggaagaaggacgaactgcagcaggaggaggagcagcttctaagagaggaaagagagaagaggcgattgcaggaacgggaacggcagtatcgcgaggaagaagagctgcaacaggaggaggagcaattgctgggcgaggaacgtgagaccaggcgacggcaggaactggagaggcagtataggaaagaggaggaattgcaacaggaggaggaacagctgctgcgggaggagccggagaagcggagaagacaggaacgggaacgtcagtgtcgcgaagaggaagagctgcagcaggaagaagaacagctgctcagggaggaaagagagaaaaggagaagacaggagcttgaacggcagtacagagaagaggaagaggttcaacaggaagaggagcagcttctgcgcgaggagcccgaaaagcggagaaggcaagagctggaaagacagtatagggaggaagaagagctgcagcaggaagaggagcagctccttagagaggagcaagaaaaacgtcgtcaagagagggagcggcagtatcgagaagaggaagaattacagcgccagaagaggaagcagaggtaccgggatgaagaccaacgttccgatctgaagtggcaatgggaacctgagaaggagaatgcggttcgggacaataaggtatactgcaaaggcagagagaatgagcagttcaggcagctggaggattcacagcttagagaccgtcagtctcagcaggacctgcaacatctgcttggggagcagcaagaacgagaccgagaacaagagaggcgacgatggcagcagcgcgatcgccacttcccagaagaagaacagctggagagagaggaacagaaggaagctaaaaggcgggaccgaaagagtcaggaagaaaaacagctcctacgtgaggagcgggaggaaaagaggaggagacaggagaccgatcgtaagtttagagaggaagaacagcttctccaggagagagaggagcagccgttgaggcgacaggagcgcgaccgaaagttcagggaagaagagctgcgccaccaggagcaagggcgtaaatttttagaggaagagcagcggcttaggaggcaggagcgcgaaagaaaattcctcaaggaagagcagcagctgcgctgccaggagcgcgagcagcaactccggcaggacagagatcggaagtttcgtgaggaggaacagcaattaagtagacaagaaagggacaggaaatttagagaagaagagcagcaggtcagacggcaggagagggagcgaaaattcctggaagaggagcagcaactccgccaggagcggcacaggaaattccgcgaggaggaacagctcctacaggaacgggaggagcaacagctccaccggcaggagagagaccgcaagttcttggaggaagaacagcagctgagaagacaggaaagagatcgcaagtttcgagagcaggaattaaggtcacaggaacctgagagaaaatttctcgaagaagagcagcagctccaccgccagcagagacagaggaagttcctacaagaggagcagcaactgcgccgacaggagagggggcagcaacgtaggcaagatagggaccggaagttccgggaagaggagcagctgcgtcaggagagggaagagcagcaattgtcaaggcaggagcgcgatcgcaaattccggctggaagagcagaaggtccgcaggcaagaacaggagaggaagttcatggaggacgaacagcaactccgcagacaggaggggcaacaacagctgaggcaggagcgcgataggaaattcagggaagatgaacaactactgcaggagcgcgaagagcaacagctacataggcaagagagagaccgcaagtttctggaagaagagccccagttgcgtaggcaggaacgagagcaacagctcagacatgaccgcgatagaaagtttagagaggaggagcagctactgcaggaaggagaggaacagcaactgcgccgacaggagcgggataggaagtttcgggaagaggagcagcagcttcggcgacaggagagagaaagaaaatttctgcaagaggaacaacagttaaggcggcaggagctggaaaggaagttccgtgaggaagaacaactgaggcaggagacggaacaagaacaactaagaagacaagagagatacagaaaaattctggaggaagagcagctgcgacccgagcgtgaggagcagcagctgcgccgacaagagcgtgatcgtaagtttcgcgaggaagagcaattaaggcaggagagagaggaacagcaactgaggtctcaggaatccgatcgcaaatttagggaagaggaacagctccggcaggagagggaagagcagcagctgcgtccccagcagagagatgggaagtataggtgggaagaggagcaactgcagttggaggagcaggagcagaggctccggcaggagcgcgacagacagtacagggccgaggagcagttcgccacacaagaaaagagccgtcgggaggaacaggagttgtggcaagaagaggaacagaaacggagacaagaaagggagcggaagttacgggaagaacatatcagaagacaacaaaaggaggagcagcgccaccggcaagtgggagagataaagtcccaggaggggaaaggacatggcaggctgctcgaacctggaacccaccaattcgcatccgtacccgtgagatctagccctttgtatgaatatattcaagaacagagatctcagtacagaccata

SEQ ID NO: 170391 - DNA, 6900 bp, Artificial Sequence
  derived and/or modified sequence
atgtctccacttctgagaagcatctgtgacatcactgaaattttcaatcagtatgtctctcatgattgtgatggagcagcattaactaagaaagacctgaagaacctccttgaaagggaatttggagctgtgcttcggagaccacatgaccctaagacggtagatctgatcctggaacttctggatcttgacagtaatgggcgtgtcgatttcaacgaattcctcctatttattttcaaagtggctcaagcttgttactatgctctcggccaggccacgggactggatgaggagaagcgagcccggtgtgacggaaaggagagcctgttacaagatcgcaggcaagaagaagaccaaaggagattcgagccccgggacagacaactggaagaagaacctgggcaacgacgcaggcagaagaggcaggaacaggagagggagctagctgagggagaggagcaaagtgagaaacaagagcgacttgaacagcgcgacaggcagcgccgcgacgaggagctgtggcggcaaaggcaagaatggcaagaacgggaagagcgccgtgcagaggaagagcagctgcagagttgcaaaggtcacgaaactgaggagtttccagacgaagagcaactgcgaaggcgggagctgctggagctgaggaggaagggccgcgaggagaaacagcagcaaaggcgagagcggcaagacagagtgttccaggaggaagaagagaaagagtggaggaagcgcgagacagtgctccggaaggaagaagagaagttgcaggaagaggagccgcagcggcaaagagagctccaggaggaagaagagcagctacggaagctggagcggcaagagctgaggagggagcgccaggaggaagagcagcagcagcaaaggctgaggcgcgagcagcaactaaggcgcaagcaggaggaggagaggcgcgagcagcaggaggagaggcgcgagcagcaggagaggcgcgagcagcaggaggagaggcgcgagcagcagctgaggcgcgagcaggaggagaggcgcgagcagcagctgaggcgcgagcaggaggaggagaggcgcgagcagcagctgaggcgcgagcaggaggaggagaggcgcgagcagcagctgaggcgcgagcagcagctgaggcgcgagcagcagctgaggcgcgagcagcagctgaggcgcgagcagcagctgaggcgcgagcagcagctgaggcgcgagcagcagctgaggcgcgagcagcagctgaggcgcgagcagcagctgaggcgcgagcaggaggaggagaggcacgagcagaagcacgagcaggagaggcgcgagcagcggctgaagcgcgagcaggaggagaggcgcgattggctgaagcgcgaggaggagacggagaggcacgagcaggagaggcgcaagcagcagctgaagcgcgaccaggaggaggagaggcgcgaacgttggctgaagctcgaggaggaggagaggcgcgagcagcaggagaggcgcgagcagcaactaaggcgggagcaagaggagaggcgcgagcagcggctgaagcgccaggaggaggaagagaggctccagcagcggttgaggagcgagcaacaactaagacgcgagcaggaggagaggcgcgagcagctgctgaagcgcgaggaggagaagaggctcgagcaggagaggcgagagcagcggctgaagcgcgagcaggaggagaggcgcgatcagctgctgaagcgcgaggaggagaggcgccagcagcggctgaagcgcgagcaggaagagaggctcgagcagcgactgaagcgcgaggaggtggagagactcgagcaggaggagaggcgcgagcagcggctgaagcgcgaggagccggaggaagagaggcgccagcagctgctgaagagcgaggagcaggaggagaggcgccagcagcaactaaggcgcgagcagcaggaaaggcgcgagcagcggctgaagcgcgaggaggaggaagagaggctcgagcagcggctgaagcgcgagcatgaggaagagaggcgcgagcaggagctagctgaggaggagcaggaacaggcccgggagcggattaagagccgcatcccgaagtggcagtggcagctagaaagcgaggccgacgcacggcaaagcaaagtctactcgaggccccgcaagcaggaagggcagaggcgccgccaagagcaggaggaaaagaggcggcgccgggagagtgagctgcaatggcaggaggaggaacgggctcaccggcagcagcaggaagaggagcagcgccgggacttcacatggcagtggcaggcggaggaaaagagcgagaggggccgtcagaggctgtcggccaggcccccattgcgggagcagcgggagaggcagctgagggccgaggagcgccagcagcgggaacaacggtttctcccggaggaggaggagaaggagcagcggcgccgccagcgacgcgagagggagaaagagctgcagttcctggaggaagaggagcagctccagcggcgggagcgtgcccaacagctccaggaggaggaggacggcctccaggaggatcaggagaggaggcgaagccaggagcagcgccgcgaccaaaaatggaggtggcaactagaagaagaaaggaagagacgccgccacacgctgtacgccaagccagccctacaagagcagctgaggaaggaacagcagctgctgcaggaggaggaggaggagctacagagagaggagcgcgagaagagaaggcgccaagaacaggagagacaataccgcgaggaagagcagctgcagcaggaggaagagcagctgctgagagaggaacgggagaaaagaagacgccaggagcgggaaaggcaatatcggaaggataagaagctgcagcagaaggaagagcagctgctgggagaggaaccggagaagagaaggcgccaggagcgggagaaaaaataccgcgaggaagaggagttgcagcaggaggaagagcagctgctgagagaggaacgggagaagagaaggcgccaggagtgggagaggcagtaccgcaaaaaagacgagctgcagcaggaagaagagcagctgctgagagaggaacgggagaaaagaagactccaggagcgggagaggcaatatcgggaggaagaggagctgcagcaggaggaagagcagctgctgggagaggaacgggagacgagaaggcgccaggagctggagaggcaatatcggaaggaagaggagctgcagcaggaggaagagcagctgctgagagaggaaccggagaagagaaggcgccaggagcgggagaggcaatgtcgggaggaagaggagctgcagcaggaggaagagcagctgctgagagaggaacgggagaagagaaggcgccaggagctggagaggcaatatcgggaggaagaggaggtgcagcaggaggaagagcagctgctgagagaggaaccggagaagagaaggcgccaggagctggagaggcaataccgcgaggaagaggagctgcagcaggaggaagagcagctgctgagagaggaacaggagaaaaggcgccaggagcgggagaggcagtatcgggaggaggaagagcttcagcgccagaaaaggaagcagcgataccgggatgaggatcagcgcagtgatctgaaatggcagtgggaaccagaaaaagaaaatgcagttcgtgataacaaggtttactgcaaaggcagagagaatgaacagttccggcagttggaagattcccagctgcgcgacagacaatcccagcaagatctgcagcacctgctgggtgaacagcaagagcgagatcgtgagcaagagaggaggcgctggcagcagcgcgacaggcatttcccagaggaagaacagctggagcgagaagagcaaaaggaagccaaaaggcgcgacaggaagtcccaagaggaaaagcagttgctgagagaggaaagagaagagaagagacgccgtcaagagacagacagaaaattccgcgaggaggaacagctgctccaggaaagggaggaacagccgctgcgccgccaagagcgtgacagaaaattccgcgaagaggaactgcgccatcaggaacaagggagaaaattcctcgaggaggaacagcggctgcgccgccaggaacgggagagaaaattccttaaggaggaacagcagctgcgctgccaggagcgcgagcaacagctgcgtcaggaccgcgacagaaaattccgcgaggaggaacagcagctgagccgccaagagcgtgacagaaaattccgtgaagaggaacagcaggtgcgccgccaggaacgagagagaaaattcctggaggaggaacagcagctgcgccaggagcgtcacagaaaattccgcgaagaggaacagctgctccaggaaagggaagaacagcagctgcaccgccaagagcgtgacagaaaattcctggaggaggaacaacagctgcgccgccaagagcgtgacagaaaattccgcgaacaggaactgcgcagtcaggaaccagagagaaaattcctcgaggaggaacagcagctgcaccgccagcaacggcagagaaaattcctccaggaggaacagcagctgcgccgccaggagcgcgggcaacagcggcgtcaggaccgtgacagaaaattccgcgaggaggaacagctgcgccaggagagggaggaacagcagctgagccgccaagagcgtgacagaaaattccgtttagaggaacagaaagtgcgccgccaggaacaagagagaaaattcatggaggacgaacagcagctgcgccgccaggagggccaacaacagctgcgccaggagcgcgacagaaaattccgcgaagacgaacagctgctccaggaaagggaagaacagcagctgcaccgccaagagcgtgacagaaaattcctcgaggaggaaccgcagctgcgccgccaggagcgcgaacaacagctgcgtcacgaccgcgacagaaaattccgtgaagaggaacagctgctccaggaaggggaggaacagcagctgcgccgccaagagcgtgacagaaaattccgcgaagaggaacagcagctccgccgtcaggaacgagagagaaaattcctccaggaggaacagcagctgcgccgccaggaactggagagaaaattccgtgaggaggaacagctgcgccaagaaacggagcaagagcagctgcgccgccaagaacgctacagaaaaatcctagaggaagagcagctccgtccggaaagggaagaacagcagctgcgccgccaggagcgcgacagaaaattccgcgaggaggaacagctccgccaggagagggaggaacagcagctgcgcagccaagagtctgacagaaaattccgcgaggaggaacagctacgccaggagagggaagaacagcagctgcgcccccaacagcgtgacggaaagtatcgctgggaagaagagcagctccaacttgaggaacaagagcagaggctgcggcaggagcgagaccggcagtaccgggcggaggagcagtttgccacgcaggagaagagtcgtcgtgaggaacaagaactatggcaagaagaggagcagaaacgtcgccaggaacgggaaaggaaattacgggaagaacacatccgccgccagcagaaggaggaacagaggcaccgccaagtcggggagataaaatcccaagaagggaagggccatgggcggcttctggagcccggcactcatcagtttgccagtgtcccagtgcgctccagccctctctatgagtacatccaagagcagagatctcaataccgcccttaagtgatgttgccaatatcttgacacctgccaaagcttcgagcacgggaaaatgagaaacactgggtaccaagtgataactcagatgtttctggttgtgggaaaactctctgatattagaatgtcttttcttccaaaatcttaaactacgctcattttacgcactttgtacttctgctttttattcttcctcaagtagttctttactgcaagatgtctttcttttgctctttgatgcagatgtggtgtgcatttaaaaaaaatataaatcatttaatttgtttaagaaattttgtttgaggaacatgttcatttattgctttcagaagtaacaagagtaataggatgatttgagattctaaacaatgggtcggtttgtttaatgactgacccatcttgtggaaagtgcagatacttttaatgttcaagttgctatttcttcttgaacctaaattgatcattgcctccaaacagcatttcatcttttgtggcatagttagcacaaattccaggtaactaaatttttataacccttgaatagtgcagggggagtgacctctgcataaaaacttcctgtaaaatcagcccattactggaagaaatatctgttaagaataggtttagctttgaagatttagaatttaaattagattttttttaaactcaactccacttaaacacataatctcatgaagaaataatgaggtgtttctcaacttcagagttcaaattttaaaactgtgtctgttgtagtctatagtgttcattctacttccccaagttttgatgagtttcagaatattatgaacctttgttaattttagcttgttagaaggaagctgctcagaatcccataaacatctgtcttactctagggccaataagagatcacatagagcatgttgggggtgtaaaagggaaaaatgtgtgaacataggggcaaatttctagaggccctttgacaagacccatttgcccacaatcatttgaggcctattgataataccttagatatattcttgttgaaataattggactgtgaaaaattaataataaatgtttggcaagtaa

SEQ ID NO: 170392 - protein, 1093 aa, Artificial Sequence
  derived and/or modified sequence
MSWFNASQLSSFAKQALSQAQKSIDRVLDIQEEEPSIWAETIPYGEPGISSPVSGGWDTSTWGLKSNTEPQSPPIASPKAITKPVRRTVVDESENFFSAFLSPTDVQTIQKSPVVSKPPAKSQRPEEEVKSSLHESLHIGQSRTPETTESQVKDSSLCVSGETLAAGTSSPKTEGKHEETVNKESDMKVPTVSLKVSESVIDVKTTMESISNTSTQSLTAETKDIALEPKEQKHEDRQSNTPSPPVSTFSSGTSTTSDIEVLDHESVISESSASSRQETTDSKSSLHLMQTSFQLLSASACPEYNRLDDFQKLTESCCSSDAFERIDSFSVQSLDSRSVSEINSDDELSGKGYALVPIIVNSSTPKSKTVESAEGKSEEVNETLVIPTEEAEMEESGRSATPVNCEQPDILVSSTPINEGQTVLDKVAEQCEPAESQPEALSEKEDVCKTVEFLNEKLEKREAQLLSLSKEKALLEEAFDNLKDEMFRVKEESSSISSLKDEFTQRIAEAEKKVQLACKERDAAKKEIKNIKEELATRLNSSETADLLKEKDEQIRGLMEEGEKLSKQQLHNSNIIKKLRAKDKENENMVAKLNKKVKELEEELQHLKQVLDGKEEVEKQHRENIKKLNSMVERQEKDLGRLQVDMDELEEKNRSIQAALDSAYKELTDLHKANAAKDSEAQEAALSREMKAKEELSAALEKAQEEARQQQETLAIQVGDLRLALQRTEQAAARKEDYLRHEIGELQQRLQEAENRNQELSQSVSSTTRPLLRQIENLQATLGSQTSSWEKLEKNLSDRLGESQTLLAAAVERERAATEELLANKIQMSSMESQNSLLRQENSRFQAQLESEKNRLCKLEDENNRYQVELENLKDEYVRTLEETRKEKTLLNSQLEMERMKVEQERKKAIFTQETIKEKERKPFSVSSTPTMSRSSSISGVDMAGLQTSFLSQDESHDHSFGPMPISANGSNLYDAVRMGAGSSIIENLQSQLKLREGEITHLQLEIGNLEKTRSIMAEELVKLTNQNDELEEKVKEIPKLRTQLRDLDQRYNTILQMYGEKAEEAEELRLDLEDVKNMYKTQIDELLRQSLS

SEQ ID NO: 170393 - protein, 533 aa, Artificial Sequence
  derived and/or modified sequence
MSWFNASQLSSFAKQALSQAQKSIDRVLDIQEEEPSIWAETIPYGEPGISSPVSGGWDTSTWGLKSNTEPQSPPIASPKAITKPVRRTVVDESENFFSAFLSPTDVQTIQKSPVVSKPPAKSQRPEEEVKSSLHESLHIGQSRTPETTESQVKDSSLCVSGETLAAGTSSPKTEGKHEETVNKESDMKVPTVSLKVSESVIDVKTTMESISNTSTQSLTAETKDIALEPKEQKHEDRQSNTPSPPVSTFSSGTSTTSDIEVLDHESVISESSASSRQETTDSKSSLHLMQTSFQLLSASACPEYNRLDDFQKLTESCCSSDAFERIDSFSVQSLDSRSVSEINSDDELSGKGYALVPIIVNSSTPKSKTVESAEGKSEEVNETLVIPTEEAEMEESGRSATPVNCEQPDILVSSTPINEGQTVLDKVAEQCEPAESQPEALSEKEDVCKTVEFLNEKLEKREAQLLSLSKEKALLEEAFDNLKDEMFRVKEESSSISSLKDEFTQRIAEAEKKVQLACKERDAAKKEVKRKKR

SEQ ID NO: 170394 - DNA, 6895 bp, Artificial Sequence
  derived and/or modified sequence
gtagatttggttgctgtgtacgtggaagaagcaagcgcatgcgcacatgggcccccttcgtctcagctgtgcgggaacggccgagggtaacatcccgggctcgcgggaggctgtcggggtaatggccacacgctgacagaaccagccgagtggaaaaggggagcgaagccgttcctctgcacccttccccaggcctgaggccttcccgcttggtgctgccgccgccactgccggctgaggaggggcgatgagttggttcaacgcctcccagctctccagcttcgctaagcaggccctgtcccaggcccagaagtctattgacagggttctggacatccaggaagaggagccgagcatctgggccgagaccattccgtatggagagccgggaataagttcccctgtcagtggaggatgggatacttcaacctgggggttgaaatcaaacactgaacctcagagtccaccaatagcctctcctaaagcaatcacaaagccagttcggaggactgtggtcgatgaatctgaaaatttcttcagtgcctttctctcgccaactgatgtccagaccattcagaagagtccagtggtatcaaaacctccagcaaaatcacaacgaccagaagaagaagtgaaaagcagcttacatgaatccttgcacattggccagtcaagaactcctgaaacaactgaatcacaagtaaaagactcttctttgtgtgtttcaggggaaactctggcagcaggtacttcatcacctaaaactgaaggcaagcacgaagaaactgttaataaagaatcggatatgaaggtgccaactgtaagtttgaaagtatctgaaagtgtaattgatgtgaaaacaactatggaaagtatatctaatacgtctacgcagtctctcacagcagaaacaaaggacatagctttggaacctaaggaacaaaaacatgaagacaggcagagcaatacaccttctcctcctgttagtaccttttcatcaggtacttctaccaccagtgatattgaagttttagatcatgaaagtgtaataagtgagagctcagcgagctcgagacaagagactacagattcaaaatcaagtcttcacttgatgcagacatcttttcagcttctctctgcatctgcttgtcctgaatataatcgtttagatgatttccaaaaactcactgagagttgctgttcatctgatgcttttgaaagaatagactcatttagtgtacagtcattagatagccggagtgtaagtgaaatcaattcagatgatgaattgtcaggcaagggatatgctttagtgcctattatagttaattcttcaactccaaagtctaaaacagttgaatctgctgaaggaaaatctgaagaagtaaatgaaacattagttatacccactgaggaagcagaaatggaagaaagtggacgaagtgcaactcctgttaactgtgaacagcctgatatcttggtttcttccacaccaataaatgaaggacagactgtgttagacaaggtggctgagcagtgtgaacctgctgaaagtcagccagaagcactttctgagaaggaagatgtttgcaagacagttgaatttctgaatgaaaagctggaaaaaagggaggctcagttattatctcttagtaaggaaaaagcacttctagaagaagcttttgataacctgaaagatgaaatgttcagagtgaaagaagaaagcagtagcatttcttccttgaaagatgagtttactcaaagaattgcagaagcagaaaagaaagttcaactagcctgcaaagagagagatgctgctaaaaaggaaatcaaaaacataaaagaagaacttgccactagattaaatagtagtgaaactgcagaccttttgaaagagaaagatgagcagatccgagggttaatggaagaaggagaaaaactttcaaaacagcagctgcacaattctaacatcatcaagaaattaagagctaaagacaaggagaatgaaaatatggttgcaaagctgaacaaaaaagttaaagagctagaagaggagttgcagcatttgaaacaggtccttgatggcaaagaagaggttgagaaacaacatagagaaaatattaaaaaactaaattccatggtagaacgccaagagaaagatcttggccgtcttcaggtagacatggatgaacttgaagaaaagaaccgaagtattcaggctgccctggatagtgcatacaaagaacttactgatcttcacaaagccaatgctgcaaaggatagtgaggcacaggaagctgctctgagccgtgaaatgaaagctaaagaagaactttctgcagcattagagaaggcccaagaagaagcccgtcagcagcaagaaacattagccattcaagtgggggaccttaggcttgcattgcagcgtacagaacaagcggctgccagaaaggaggattatttacgccatgagatcggtgaacttcagcagagactccaggaagcagagaatcgaaaccaggaactgagtcaaagtgtttcatcaacaacaagaccattgcttcgacaaatagaaaatttgcaagcaaccctgggatcccagacatcgtcgtgggagaaattagagaagaatctttctgataggcttggtgaatcccagaccttgctggcagcagcagttgagagagaacgtgcagctacagaagaactccttgctaacaaaattcagatgtcttccatggagtcacagaattctcttttaagacaggaaaacagtagatttcaagcccagctagaatcagagaaaaataggctgtgtaaactggaggatgagaacaataggtaccaggttgaattggaaaacctaaaagatgaatatgtaagaacacttgaagagacgaggaaagaaaagacattgttgaatagtcagttagaaatggaaagaatgaaagttgaacaagaaaggaagaaagccatttttactcaagaaacaataaaagaaaaggaacgcaagccattttctgtttctagcactcccaccatgtcacgctcaagttcaataagtggtgttgatatggcaggactacagacatcttttctgtctcaggatgagtctcatgatcactcatttggaccaatgcctatatcagcaaatggaagcaatctttatgatgctgtaaggatgggagcaggatcaagcataattgaaaacctacagtctcagctaaagctaagggaaggggaaatcactcatttacagctagaaattggcaatctagaaaaaactcgatcaataatggctgaagaactagttaaattaacaaatcaaaatgatgaacttgaagagaaggtgaaggagatacccaaacttagaactcagctaagagatttggatcaaaggtacaacactattctgcagatgtatggagaaaaagcagaagaggcagaagaacttcgattagatctcgaagatgtaaaaaatatgtacaaaactcaaatagatgaacttttaagacaaagtctcagttaacttgtgaaaattgaattcccatcaaactgaatgtaagcatttaatatctaaacatttaatgtggacttccaataaattcttttatagaattagaaagtgggatttactgtagagtgtaaaaatttttttaaaattgttttacactatgtagtaatatttacagttaaattattttgtgcaatatttgaactttatttttgaaactattctttaaagatttattttttaaagcattcattttttttccttgaatagcacagagatttattactttatcctcatataaatatggctagagaagaagaatggtgttcatatatgtattgtagatatacaactagttgtatctataatttgtaagtgtttatatatatattaagaacatttgaagagtaatgttaacatactgaaactttgaaatctttcacatttaaaatttcaacatatcttaattactgctcatgaaaatgtacattaagtgttaaagtaaaaaattattaaatctgtggctattaaattttaaactaatttttttcctttaaaagtaagagtcacactgacactgtctgaaatttaaagagtgaatgatttaaacttaaaaaaaattttgatctgaaaatttatttcacccagctttcacaattaagtctgtataaaatgtggtaccttttggtacctatccagagaaacctgtacatattcaatgttatctagatgtgattggataatggagaaaatttatttataatgattttgcaatggcatcaataacatttaaatgattttgaagaagtattattttactaccctataaaatgaatcgaaaataataaagttcttaacataatttactctttaaaaattacctgttcatattttgtaaacccatatttttagcacattaaaaatgaatgtttgatattacagaatattcataacaaaatggaagaattataggaattaacttgaatttggcatttttaattttgtgatttatcattttattttttcttgaaatttcaaacacaaggaaagcatagaatagcttttaaaagtagctatgccttcttccaaatgttattttattcaaaaaggtaaccaggttgtgttttaaacctgtgaaatattgtgatgcattttattactgaaagttatttaactgcctttacttgcacataaaaactctcatttacggccaggtgctgtggctcatgcctgtaatcccagcactttgggaggccaaggcgggcatatcacctgatgtcaggagttcaagaccagcatggccagcagtttggtgaaaccccatctctactaaaaatacaaaaattagcctggcgtggtggtgtgcgcctgtaatcctagctactcgggaggctgaggcaggagcattgcttgaacctgggaggtggaggttacaatgagccaagattgtgccactgcactccagcatgggtgacagagaaagactccgtctcaaaaaaaaaaaaacaaactcttatttaatttttagttaaaattaaaacactagtacttcagaatatagatacaagtacaccatcttgaagaatttggagtttttcagggcaattcaaatgacctcattttttgttctttttgtattccagacagtgtttctgtcattggatctctgattggtagtgttaataaatattctttcagtgtgagccagattcataaaattaattttcttcattttagtagtaaaaagtagtctaatagctttttgtcagcttgatttttttgtgtgtgtaatattcaagggcagaatgacaggacagataagcaataagaaatgtatagaattagaaaatatagtagttccctcttacccatgggacatacgttccaagacccccagtgaacgtctgaaaccatggatagtatagacacctctatacactgttttttcctatacatatatacctatgataaagttctatttataaatcagggacagcaagagataaacaataactgcaaatagaacaattataacagtgcactgtaataaaagtgatgtaaatgtgatatgtctgtctctttctctcaaaatatcttattgtactgtactcacctgtaatcagactgtggttgaccgtgagtaaccgaaaccacagaaagcaaaatcgtggataaggggagactactctatatgaaacttaagttacaaaattctctgaagcatttgaaactagacgttttggaattataaaatagtccctttaaaatatccactagtagaaaaaaacttcatttgcagagaaaagattgcaataaaactcattcctaaacttttcaattttataaaattaaacattctttttttatccgtattaacaatttctagttacatagtttctagttacatattaccatatattactctttatctacaaataaatagctgatactcaaactgatcatattttgattgttaaacacttggatctctcaatacttctgtaagttaaagtgaacttaaacagtttcttgaaaaactccagtaggtggcagaatacctattgaatattcgttgctatactttgctgtttgtcattaaaacatctctacccatattcttgcaaaataatatttatattttaatggataggaaaatgatttgcaattagatgtttccattcttgaaagaaaaaagctgcaaataacattttcaagaatataaaaaaatgagtaaacaaagggaaggttgtttggtcatttatagacaattaagcacagactgtagatgtccttccaattcttgggaggctaaactgagtctaccatttcttacatttcttttacctattttttgagaattgccagttgtacagtgtttagcatgtggaatgtaccaaatatatctatgttgtgacttaagatattctaaatgtggataacttctgacctaggaaacatgaagtttgtagtgaagtaagtgaaaagaatgttcaggaaattttttttctccatctcttcagttggcatttattgagagttttatttgaatgcttattaaaagtatatgatttataatatttagaaaatagaagaaaaaagaaaactgtagatgttttatcttgttttaatactgtatgtttagtacgtatacatttatgttctagtgtatcaaaatttttcattttcattaaagtgaatccaattttccatattctaggtccattttaaaccatgaaaactttaatcacatattttgtaaagggctgaaagtatgatttaaactacagattgatatattttaattctaaatgaaaggtaatgtaaataagcatggatctgattgaataaagattttaaaatagtaaaaaaaaaaaaaaaaaa

SEQ ID NO: 170395 - DNA, 3282 bp, Artificial Sequence
  derived and/or modified sequence
atgagctggttcaacgccagccagctgagcagcttcgccaagcaggccctgagccaggcccagaagagcatcgacagagtgctggacatccaggaggaggagcccagcatctgggccgagaccatcccctacggcgagcccggcatcagcagccccgtgagcggcggctgggacaccagcacctggggcctgaagagcaacaccgagccccagagcccccccatcgccagccccaaggccatcaccaagcccgtgagaagaaccgtggtggacgagagcgagaacttcttcagcgccttcctgagccccaccgacgtgcagaccatccagaagagccccgtggtgagcaagccccccgccaagagccagagacccgaggaggaggtgaagagcagcctgcacgagagcctgcacatcggccagagcagaacccccgagaccaccgagagccaggtgaaggacagcagcctgtgcgtgagcggcgagaccctggccgccggcaccagcagccccaagaccgagggcaagcacgaggagaccgtgaacaaggagagcgacatgaaggtgcccaccgtgagcctgaaggtgagcgagagcgtgatcgacgtgaagaccaccatggagagcatcagcaacaccagcacccagagcctgaccgccgagaccaaggacatcgccctggagcccaaggagcagaagcacgaggacagacagagcaacacccccagcccccccgtgagcaccttcagcagcggcaccagcaccaccagcgacatcgaggtgctggaccacgagagcgtgatcagcgagagcagcgccagcagcagacaggagaccaccgacagcaagagcagcctgcacctgatgcagaccagcttccagctgctgagcgccagcgcctgccccgagtacaacagactggacgacttccagaagctgaccgagagctgctgcagcagcgacgccttcgagagaatcgacagcttcagcgtgcagagcctggacagcagaagcgtgagcgagatcaacagcgacgacgagctgagcggcaagggctacgccctggtgcccatcatcgtgaacagcagcacccccaagagcaagaccgtggagagcgccgagggcaagagcgaggaggtgaacgagaccctggtgatccccaccgaggaggccgagatggaggagagcggcagaagcgccacccccgtgaactgcgagcagcccgacatcctggtgagcagcacccccatcaacgagggccagaccgtgctggacaaggtggccgagcagtgcgagcccgccgagagccagcccgaggccctgagcgagaaggaggacgtgtgcaagaccgtggagttcctgaacgagaagctggagaagagagaggcccagctgctgagcctgagcaaggagaaggccctgctggaggaggccttcgacaacctgaaggacgagatgttcagagtgaaggaggagagcagcagcatcagcagcctgaaggacgagttcacccagagaatcgccgaggccgagaagaaggtgcagctggcctgcaaggagagagacgccgccaagaaggagatcaagaacatcaaggaggagctggccaccagactgaacagcagcgagaccgccgacctgctgaaggagaaggacgagcagatcagaggcctgatggaggagggcgagaagctgagcaagcagcagctgcacaacagcaacatcatcaagaagctgagagccaaggacaaggagaacgagaacatggtggccaagctgaacaagaaggtgaaggagctggaggaggagctgcagcacctgaagcaggtgctggacggcaaggaggaggtggagaagcagcacagagagaacatcaagaagctgaacagcatggtggagagacaggagaaggacctgggcagactgcaggtggacatggacgagctggaggagaagaacagaagcatccaggccgccctggacagcgcctacaaggagctgaccgacctgcacaaggccaacgccgccaaggacagcgaggcccaggaggccgccctgagcagagagatgaaggccaaggaggagctgagcgccgccctggagaaggcccaggaggaggccagacagcagcaggagaccctggccatccaggtgggcgacctgagactggccctgcagagaaccgagcaggccgccgccagaaaggaggactacctgagacacgagatcggcgagctgcagcagagactgcaggaggccgagaacagaaaccaggagctgagccagagcgtgagcagcaccaccagacccctgctgagacagatcgagaacctgcaggccaccctgggcagccagaccagcagctgggagaagctggagaagaacctgagcgacagactgggcgagagccagaccctgctggccgccgccgtggagagagagagagccgccaccgaggagctgctggccaacaagatccagatgagcagcatggagagccagaacagcctgctgagacaggagaacagcagattccaggcccagctggagagcgagaagaacagactgtgcaagctggaggacgagaacaacagataccaggtggagctggagaacctgaaggacgagtacgtgagaaccctggaggagaccagaaaggagaagaccctgctgaacagccagctggagatggagagaatgaaggtggagcaggagagaaagaaggccatcttcacccaggagaccatcaaggagaaggagagaaagcccttcagcgtgagcagcacccccaccatgagcagaagcagcagcatcagcggcgtggacatggccggcctgcagaccagcttcctgagccaggacgagagccacgaccacagcttcggccccatgcccatcagcgccaacggcagcaacctgtacgacgccgtgagaatgggcgccggcagcagcatcatcgagaacctgcagagccagctgaagctgagagagggcgagatcacccacctgcagctggagatcggcaacctggagaagaccagaagcatcatggccgaggagctggtgaagctgaccaaccagaacgacgagctggaggagaaggtgaaggagatccccaagctgagaacccagctgagagacctggaccagagatacaacaccatcctgcagatgtacggcgagaaggccgaggaggccgaggagctgagactggacctggaggacgtgaagaacatgtacaagacccagatcgacgagctgctgagacagagcctgagctag

SEQ ID NO: 170396 - DNA, 1602 bp, Artificial Sequence
  derived and/or modified sequence
atgagctggttcaacgccagccagctgagcagcttcgccaagcaggccctgagccaggcccagaagagcatcgacagagtgctggacatccaggaggaggagcccagcatctgggccgagaccatcccctacggcgagcccggcatcagcagccccgtgagcggcggctgggacaccagcacctggggcctgaagagcaacaccgagccccagagcccccccatcgccagccccaaggccatcaccaagcccgtgagaagaaccgtggtggacgagagcgagaacttcttcagcgccttcctgagccccaccgacgtgcagaccatccagaagagccccgtggtgagcaagccccccgccaagagccagagacccgaggaggaggtgaagagcagcctgcacgagagcctgcacatcggccagagcagaacccccgagaccaccgagagccaggtgaaggacagcagcctgtgcgtgagcggcgagaccctggccgccggcaccagcagccccaagaccgagggcaagcacgaggagaccgtgaacaaggagagcgacatgaaggtgcccaccgtgagcctgaaggtgagcgagagcgtgatcgacgtgaagaccaccatggagagcatcagcaacaccagcacccagagcctgaccgccgagaccaaggacatcgccctggagcccaaggagcagaagcacgaggacagacagagcaacacccccagcccccccgtgagcaccttcagcagcggcaccagcaccaccagcgacatcgaggtgctggaccacgagagcgtgatcagcgagagcagcgccagcagcagacaggagaccaccgacagcaagagcagcctgcacctgatgcagaccagcttccagctgctgagcgccagcgcctgccccgagtacaacagactggacgacttccagaagctgaccgagagctgctgcagcagcgacgccttcgagagaatcgacagcttcagcgtgcagagcctggacagcagaagcgtgagcgagatcaacagcgacgacgagctgagcggcaagggctacgccctggtgcccatcatcgtgaacagcagcacccccaagagcaagaccgtggagagcgccgagggcaagagcgaggaggtgaacgagaccctggtgatccccaccgaggaggccgagatggaggagagcggcagaagcgccacccccgtgaactgcgagcagcccgacatcctggtgagcagcacccccatcaacgagggccagaccgtgctggacaaggtggccgagcagtgcgagcccgccgagagccagcccgaggccctgagcgagaaggaggacgtgtgcaagaccgtggagttcctgaacgagaagctggagaagagagaggcccagctgctgagcctgagcaaggagaaggccctgctggaggaggccttcgacaacctgaaggacgagatgttcagagtgaaggaggagagcagcagcatcagcagcctgaaggacgagttcacccagagaatcgccgaggccgagaagaaggtgcagctggcctgcaaggagagagacgccgccaagaaggaggtgaagagaaagaagagatag

SEQ ID NO: 170397 - DNA, 3282 bp, Artificial Sequence
  derived and/or modified sequence
atgtcatggtttaacgctagccaactgtcttctttcgccaagcaggcgctgtctcaggcgcagaagtcaatcgaccgcgttttagacatccaagaagaagagccctccatatgggccgagactataccctatggcgaacctggcatttcatcccccgtttctgggggctgggacacgtccacctggggccttaagagcaatacagaaccacagagcccacctatcgcatcacctaaagcaatcaccaaaccggtgaggcgaactgttgtcgatgagtctgaaaattttttctccgcattcttgtcgcccactgatgtccagacaatccaaaagtcccctgtcgtttccaaaccccctgcgaaaagtcagcggcctgaagaggaggtaaaatcatccttacacgagagcttgcatattgggcagagccggacacccgaaaccaccgagtctcaagtgaaggatagcagtctgtgtgtcagcggcgagaccttggccgccggaactagctctccaaagacagaaggaaagcatgaggagacagtgaataaagagtctgacatgaaggttccaacagtgagccttaaagtttcagaaagtgtgatcgatgtgaaaaccaccatggagagcatttctaatacctccacgcagagccttacagctgagactaaagacatagccctggagcctaaagagcagaaacatgaagatcggcagtcaaacacaccctcacctcctgtgtctaccttcagttccggtacgtctacaacgtcagatattgaagttctggatcacgagtccgtgatctccgaaagtagtgcaagctccagacaggagacgactgatagtaagtcctccttgcatctgatgcagacatcctttcagctgctgtcggcctccgcttgtcctgaatacaacagactggatgactttcagaagctaacagaatcatgctgtagcagcgacgcattcgagagaatcgattcctttagcgtgcaatctctggacagcaggtctgtgtcggaaattaactcagacgatgaactctcaggaaaaggttacgcgctagtgccaattatcgtaaattcctcaacgccaaaaagcaaaaccgtggaaagcgctgaaggcaaaagcgaagaggtgaacgaaacactggttatccccacagaagaggcggagatggaagaaagtggtaggtccgctactccagttaactgtgaacagcctgatatcctggtgagctctactcccattaatgagggccagaccgtcctggataaggtagccgagcagtgcgagcccgcagagagccagccagaggcgttgtctgaaaaggaagatgtgtgcaagaccgtggaatttctcaacgagaagttagaaaaaagagaggcccagttgctctctctatccaaagaaaaagcactgcttgaagaggccttcgacaatctgaaagacgagatgtttcgagtaaaagaggagagttcctccatctccagtctgaaggatgaattcacccagcgcatcgcagaggcagagaagaaggtccagctggcatgtaaggaaagagacgccgccaaaaaagaaatcaagaacattaaagaggagctcgcaaccaggctcaatagcagcgaaacagctgacctcctgaaggaaaaggatgaacaaatcagggggctgatggaggaaggcgaaaagttgtccaagcaacaattacacaactccaacattataaaaaaactgcgggcaaaagacaaggagaacgagaacatggttgcaaagctgaacaaaaaggtgaaagaattagaagaagagctgcagcacctcaagcaagtcctggatggaaaggaagaggtcgaaaagcagcacagagaaaacatcaagaagttgaactcaatggttgaacgccaggaaaaggacctggggaggctgcaggtcgatatggatgagctggaggagaagaaccgttccatccaggccgcgctggactccgcctacaaagaactcaccgatctccacaaggccaacgctgccaaggatagcgaagcccaggaagcagctctgagtcgggaaatgaaggcgaaggaagagctgtctgccgccctggagaaggcccaggaagaggctaggcagcagcaggagactctggcaatccaggttggggatctgcggttggccctccagagaactgagcaggctgccgccaggaaggaggattatctccgtcatgagataggggagctccaacagagactgcaggaggctgaaaataggaatcaagaactgagccagtctgtgagtagcactaccaggcccttactccggcagatcgaaaacttacaggccacactcggttcccagacatcgtcatgggagaaacttgagaaaaatctttccgatcggctaggagaatcacagactttgcttgcagcagcagtggagcgagaaagagctgcgacagaggaactgctcgccaataaaattcagatgagctctatggaatcgcagaactctctactacgtcaagagaattcacgcttccaagctcagcttgaatccgaaaagaataggctttgcaaattggaagacgagaataataggtaccaggtggaattggagaacctgaaagatgaatatgtccggactctcgaggagacgcggaaggagaagacactattgaacagccagttggagatggagcgcatgaaagttgaacaagagcggaagaaagccatttttacccaggagacgataaaagaaaaggagaggaagccattctctgtaagtagcacacccactatgtccagaagctcttctatatctggggtggatatggccggcctccagacaagtttcctgagccaggacgagagccacgaccacagttttggcccaatgcctatttctgccaacggatccaatttatacgatgctgtgaggatgggtgcgggaagttcaatcattgagaatcttcagagtcaactgaagctcagagaaggggagataacccaccttcagctcgagattggcaatctcgaaaagactaggtcgattatggccgaagagctggtgaagctcacaaatcagaatgatgaactggaagaaaaagtgaaagagattccaaaattgcggacgcaactcagggacctggatcagcgttataatacgattttacaaatgtatggggaaaaagctgaagaagccgaggaactgagactggatctggaggacgtgaagaacatgtataaaacccagatcgacgagcttctacgacagtccctgtcttag

SEQ ID NO: 170398 - DNA, 1602 bp, Artificial Sequence
  derived and/or modified sequence
atgtcttggtttaatgcatctcaactctcaagtttcgccaagcaggcgctttctcaagctcaaaagtccattgatagggtgctcgacattcaagaagaagagccatctatctgggccgaaaccataccctatggggaaccaggaatcagctcccctgttagtgggggatgggataccagcacctgggggctgaagagcaacacagagcctcagtctccaccaatcgcatccccgaaggcgatcaccaagccggtgaggcggaccgtcgtcgatgagagtgaaaacttcttttcggcttttcttagtcccaccgacgttcaaacgatccagaaaagtccagtggtgtctaagcctcccgccaaatcccagcgtccggaagaagaggtcaagagctccctccatgagagtctgcatatcggacagagcaggacacccgagaccacagagagtcaagtgaaagactctagcctgtgtgtctccggggagaccttagccgctggaaccagcagtcctaagaccgaagggaaacacgaagaaaccgtgaataaggaaagcgacatgaaggtgcccaccgtctccctaaaggtttccgagtccgttatcgacgtgaagactactatggagtccatttctaacacgtcaacacagagtctaactgcagagaccaaggatattgccctggagcctaaggagcagaagcacgaggaccggcagagtaatactccaagtccacctgtaagtaccttctctagcggcacgagtaccacctctgatatcgaggtgctggaccacgaatccgttatctcagagagtagcgcctctagcaggcaagagacaacggacagcaagtctagtctccacctgatgcaaacaagtttccagctgttatcagctagcgcgtgccctgagtataacaggctggatgactttcaaaaacttacagagagctgttgcagtagtgatgctttcgaacgcatcgatagcttctcagtgcaatctctggattcccgatccgtatccgaaatcaactccgatgacgaactatccgggaaagggtacgccctcgtgcccatcatcgtcaattcatccacccccaagtctaagaccgtcgagagcgcggaggggaaatcagaagaagtgaatgagaccctggtgatcccaaccgaggaagccgagatggaggagagcggtcgaagcgccactcccgtcaactgtgagcagccagatattctggtgagcagtacccccatcaatgagggacagacagtcttggataaggttgcagagcagtgtgaaccggccgaatctcagcccgaagccttaagcgaaaaagaagacgtctgcaagacagtggagtttctcaatgaaaagctggagaagagagaggcccagctattaagcctcagcaaggaaaaggccttgctcgaagaggcctttgacaacctcaaggacgaaatgttccgagtgaaggaggagagctctagtatatcgtcattgaaggacgagtttacacaacgtatagcagaggccgagaagaaagtacagcttgcctgcaaagagcgcgacgcagccaaaaaggaagtaaaaaggaagaaaaggtag

SEQ ID NO: 170399 - DNA, 3282 bp, Artificial Sequence
  derived and/or modified sequence
atgtcctggttcaatgccagccagctgagcagctttgccaagcaggccctgagccaggcccagaagagcattgacagagtgctggacatccaggaggaggagcccagcatctgggccgagaccatcccctacggggagcccggcatcagcagccctgtgtctgggggctgggacaccagcacctggggcctgaagagcaacacagagccccagagcccccccatcgccagccccaaggccatcaccaagcctgtgcggaggacagtggtggatgaaagtgagaacttcttcagcgccttcctgagccccacagatgtgcagaccatccagaagagccctgtggtgtccaagcccccagccaagagccagaggcctgaggaggaggtgaagagcagcctgcacgagagcctgcacatcggccagagcaggaccccagagaccacagagagccaggtgaaggacagcagcctgtgtgtgtctggagagaccctggccgccggcaccagcagccccaagacagagggcaagcatgaggagaccgtgaacaaggagagtgacatgaaggtgcccaccgtgtccctgaaggtgtctgagagcgtgattgatgtgaagaccaccatggagagcatcagcaacaccagcacccagagcctgacagctgagaccaaggacatcgccctggagcccaaggagcagaagcatgaagatcggcagagcaacacccccagcccccctgtgtccaccttcagcagcggcaccagcaccaccagtgacatcgaggtgctggaccacgagagcgtcatcagcgagagcagcgccagcagccggcaggagaccacagacagcaagagcagcctgcacctgatgcagaccagcttccagctgctgagcgccagcgcctgcccagagtacaaccggctggatgacttccagaagctgacagagagctgctgcagcagtgatgcctttgaaagaattgacagcttctctgtgcagagcctggacagccgctctgtgtctgagatcaacagtgatgatgagctgagcggcaagggctacgccctggtgcccatcatcgtgaacagcagcacccccaagagcaagacagtggagagcgctgagggcaagtctgaggaggtgaatgagaccctggtgatccccacagaggaggccgagatggaggagagcggccgcagcgccacccctgtgaactgtgagcagcctgacatcctggtgagcagcacccccatcaatgaaggccagacagtgctggacaaggtggccgagcagtgtgagcctgctgagagccagcctgaggccctgtctgagaaggaggatgtgtgcaagacagtggagttcctgaatgagaagctggagaagcgggaggcccagctgctgagcctgagcaaggagaaggccctgctggaggaggcctttgacaacctgaaggatgagatgttccgggtgaaggaggagagcagcagcatcagcagcctgaaggatgagttcacccagagaattgctgaggccgagaagaaggtgcagctggcctgcaaggagagagatgctgccaagaaggagatcaagaacatcaaggaggagctggccacccggctgaacagcagcgagacagctgacctgctgaaggagaaggatgagcagatccggggcctgatggaggagggggagaagctgagcaagcagcagctgcacaacagcaacatcatcaagaagctgcgggccaaggacaaggaaaatgaaaacatggtggccaagctgaacaagaaggtgaaggagctggaggaggagctgcagcacctgaagcaggtgctggatggcaaggaggaggtggagaagcagcaccgggagaacatcaagaagctgaacagcatggtggagcggcaggagaaggacctgggccgcctgcaggtggacatggatgagctggaggagaagaacagaagcatccaggccgccctggacagcgcctacaaggagctgacagacctgcacaaggccaatgctgccaaggacagcgaggcccaggaggccgccctgagccgggagatgaaggccaaggaggagctgtctgctgccctggagaaggcccaggaggaggcccggcagcagcaggagaccctggccatccaggtgggggacctgcggctggccctgcagaggacagagcaggccgccgccaggaaggaggactacctgcggcatgaaattggagagctgcagcagaggctgcaggaggccgagaacagaaaccaggagctgagccagagcgtgagcagcaccacccggcccctgctgcggcagatcgagaacctgcaggccaccctgggcagccagaccagctcctgggagaagctggagaagaacctgagtgaccggctgggggagagccagaccctgctggccgctgctgtggagcgggagcgggccgccacagaggagctgctggccaacaagatccagatgagctccatggagagccagaacagcctgctgcggcaggagaacagccgcttccaggcccagctggagagcgagaagaaccggctgtgcaagctggaggatgagaacaaccgctaccaggtggagctggagaacctgaaggatgaatatgtgaggaccctggaggagaccaggaaggagaagaccctgctgaacagccagctggagatggagaggatgaaggtggagcaggagaggaagaaggccatcttcacccaggagaccatcaaggagaaggagaggaagcccttctctgtgagcagcacccccaccatgagccgcagcagcagcatctctggagtggacatggccggcctgcagaccagcttcctgagccaggatgagagccatgaccacagctttggccccatgcccatcagcgccaacggcagcaacctgtatgatgctgtgaggatgggcgccggcagcagcatcatcgagaacctgcagagccagctgaagctgcgggagggggagatcacccacctgcagctggagatcggcaacctggagaagaccaggagcatcatggccgaggagctggtgaagctgaccaaccagaatgatgagctggaggagaaggtgaaggagatccccaagctgcggacccagctgcgggacctggaccagcgctacaacaccatcctgcagatgtatggagagaaggccgaggaggccgaggagctgcggctggacctggaggatgtgaagaacatgtacaagacccagattgatgagctgctgcggcagagcctgtcctag

SEQ ID NO: 170400 - DNA, 1602 bp, Artificial Sequence
  derived and/or modified sequence
atgtcctggttcaatgccagccagctgagcagctttgccaagcaggccctgagccaggcccagaagagcattgacagagtgctggacatccaggaggaggagcccagcatctgggccgagaccatcccctacggggagcccggcatcagcagccctgtgtctgggggctgggacaccagcacctggggcctgaagagcaacacagagccccagagcccccccatcgccagccccaaggccatcaccaagcctgtgcggaggacagtggtggatgaaagtgagaacttcttcagcgccttcctgagccccacagatgtgcagaccatccagaagagccctgtggtgtccaagcccccagccaagagccagaggcctgaggaggaggtgaagagcagcctgcacgagagcctgcacatcggccagagcaggaccccagagaccacagagagccaggtgaaggacagcagcctgtgtgtgtctggagagaccctggccgccggcaccagcagccccaagacagagggcaagcatgaggagaccgtgaacaaggagagtgacatgaaggtgcccaccgtgtccctgaaggtgtctgagagcgtgattgatgtgaagaccaccatggagagcatcagcaacaccagcacccagagcctgacagctgagaccaaggacatcgccctggagcccaaggagcagaagcatgaagatcggcagagcaacacccccagcccccctgtgtccaccttcagcagcggcaccagcaccaccagtgacatcgaggtgctggaccacgagagcgtcatcagcgagagcagcgccagcagccggcaggagaccacagacagcaagagcagcctgcacctgatgcagaccagcttccagctgctgagcgccagcgcctgcccagagtacaaccggctggatgacttccagaagctgacagagagctgctgcagcagtgatgcctttgaaagaattgacagcttctctgtgcagagcctggacagccgctctgtgtctgagatcaacagtgatgatgagctgagcggcaagggctacgccctggtgcccatcatcgtgaacagcagcacccccaagagcaagacagtggagagcgctgagggcaagtctgaggaggtgaatgagaccctggtgatccccacagaggaggccgagatggaggagagcggccgcagcgccacccctgtgaactgtgagcagcctgacatcctggtgagcagcacccccatcaatgaaggccagacagtgctggacaaggtggccgagcagtgtgagcctgctgagagccagcctgaggccctgtctgagaaggaggatgtgtgcaagacagtggagttcctgaatgagaagctggagaagcgggaggcccagctgctgagcctgagcaaggagaaggccctgctggaggaggcctttgacaacctgaaggatgagatgttccgggtgaaggaggagagcagcagcatcagcagcctgaaggatgagttcacccagagaattgctgaggccgagaagaaggtgcagctggcctgcaaggagagagatgctgccaagaaggaggtgaagaggaagaagaggtag

SEQ ID NO: 170401 - DNA, 3282 bp, Artificial Sequence
  derived and/or modified sequence
atgagctggttcaacgccagccagctgagcagcttcgccaagcaggccctatcgcaagcacagaagtccatagaccgcgtcttagacatccaagaagaggagccctctatatgggcagagactattccgtatggagagcccggcataagcagccctgtgagcggtggctgggacacctccacatggggtttgaaaagcaatactgaaccccaatcccccccgattgcatctcctaaagcgatcaccaaacccgtgaggaggaccgtagtggatgaaagcgagaatttcttttctgccttcctgtcccccactgacgtccagaccattcagaaaagccccgtggtcagcaaacctccggcgaagtcccaacgtccagaagaggaggtgaagtcctctctgcacgaaagcctgcacattggacagtcacgaacccccgagactacagaaagccaagttaaggattcttcattatgtgtgtcaggcgaaacgctggccgccggaacatcctcccctaagaccgaagggaagcacgaggagactgttaataaggagagcgatatgaaggtaccaacagtgtcactgaaggtgtccgagagcgtcattgacgtcaagacaaccatggagtccatttccaacactagtactcaatcacttaccgcagagacgaaggacattgcgctggaacccaaggaacagaaacacgaggaccggcagtccaatacacctagccccccagtgtcaactttttcatccggcactagtacaacatctgacatagaggtgctggatcatgagtccgttattagcgagtctagcgcttcctctcgacaggagacaacagacagcaaatccagcttgcacctcatgcagacaagctttcagctcctatcggcgagcgcctgtcccgaatataatcggttggacgattttcagaagctgacagagagttgctgttcctcagatgcgtttgaaaggatagatagcttctccgtacagagcctcgattcccgaagcgtgtctgagatcaattccgacgacgaactttccgggaagggctacgctctggtgcctataatcgtcaacagtagcactcccaagtcaaaaactgtggaatcggctgagggcaaatcggaagaggttaacgagacgctggtgatcccgactgaggaagcagaaatggaggagtccgggagatcggcaacacctgtcaactgcgaacaacctgacatcctggtttcgagcacccccattaacgaaggtcagaccgtacttgataaagtggccgaacagtgtgagcccgctgagagccagcccgaggcactatccgagaaggaggacgtgtgcaagacagtcgagttcttaaacgaaaaactggaaaaaagagaagcccagctgttgtcactctccaaggagaaggcactgctggaagaagcatttgacaacctcaaagatgagatgtttcgtgtgaaagaggaaagctccagcatctctagcctcaaagacgagtttacacaacggatcgccgaggccgaaaagaaagtgcagcttgcctgtaaagaaagggacgccgccaaaaaggagatcaagaatattaaagaggagctcgcaactagactgaactcgagtgagacagcagacttacttaaagagaaagacgagcagatacgcgggcttatggaggaaggggagaagctctccaagcagcagcttcacaactcaaacatcattaagaagttgcgcgccaaggataaagagaatgagaatatggtagcaaagctgaacaagaaagtgaaggagctcgaggaggaactgcaacacctgaagcaggtcctggatgggaaagaggaggtagagaaacagcatcgtgagaacatcaaaaagctcaattcaatggtggagaggcaagagaaagacttggggcgtctgcaagtcgatatggatgaactggaagagaagaataggagtattcaggccgcacttgatagtgcatacaaggagctgaccgatctgcacaaggctaatgccgcaaaagattcggaggcgcaggaagctgctttatctagggagatgaaggcaaaagaagagctctctgcagcactggaaaaagcccaagaggaggcgagacaacagcaagaaacccttgctatacaagtgggagatttgaggctggccttacaaagaacggagcaggccgccgccagaaaggaggactatcttcggcacgagattggcgaactgcaacagcgcctgcaagaagctgaaaatcggaatcaggaactctctcagtcagttagcagcacgacacgacctcttcttaggcagatagagaacctgcaagctacactcggatcccagacgtcttcctgggaaaagctcgaaaagaacttaagcgaccgccttggcgaatcacagacccttctcgctgcagccgtggagagggaaagagctgcgactgaagagttactggcaaataaaatacaaatgagctccatggaatcacaaaacagtttactgcgccaggagaactcccggtttcaggctcaactcgagagcgagaaaaatcgattatgtaaattggaagacgagaataatcgttatcaggtggaactcgagaacctgaaagacgagtatgtcaggactttggaggaaacacgcaaggagaagaccttactaaatagccagctggaaatggaacgcatgaaagtcgaacaagagaggaagaaggccatcttcacccaggagacgattaaggaaaaagagagaaagccctttagtgtatccagcactccaactatgtcccgaagttcttcaatctcaggcgtggacatggccggtctacagacgtctttcctcagccaggatgagtcccacgaccattctttcggtcctatgcctatcagcgccaacggcagcaacctgtatgatgcggtccggatgggcgccggctcatccatcattgagaacctccaaagccagctcaagctgcgggaaggcgagatcacccacttacagctggaaatcggtaatctggagaagacaaggagcattatggctgaagagttggtaaagttgacgaatcagaacgatgaattagaagagaaggtcaaagagatccctaagctaagaacccagctgcgggacctagaccaacgctacaatactattctacagatgtatggggagaaagcagaagaggccgaggaactacggttggacctggaggatgttaaaaacatgtataagacacagatcgacgagctccttcgacagagcctaagctag

SEQ ID NO: 170402 - DNA, 1602 bp, Artificial Sequence
  derived and/or modified sequence
atgagctggttcaacgccagccagctgagcagcttcgccaagcaggccttaagccaagcacaaaagagtattgacagagtgctggatattcaggaggaggaaccctcgatttgggccgagactatcccctatggtgagcctggcatttcaagtcctgtttcggggggctgggacacctctacctgggggcttaagagcaacactgagccacagtccccgcccattgccagcccgaaggcaatcactaaacctgtcaggagaaccgtggttgatgagagtgagaacttcttttctgccttcctgtcccctactgacgttcagacaatccaaaagagtccagtggtgagcaaaccccccgccaaaagccagaggcctgaagaagaggtgaagtcttctctccatgagtctctacacattgggcagagtcgcacgcctgagaccaccgaaagccaagtaaaggacagcagcctgtgcgtatctggagagactttggccgctggtaccagttctcctaaaactgaggggaagcacgaagaaactgtgaataaagaatccgacatgaaggttccaacagtgtcactgaaggtgtctgaatcagtcattgacgtcaagaccaccatggaatctatatcgaatacaagtacccagagtctaacagccgaaaccaaagacatagcacttgagcctaaggagcagaagcacgaggatagacagtccaacacacctagcccccccgtaagcaccttcagttccgggacaagcactacatctgacatcgaagtgttggaccacgaatcagtcataagcgagtcctctgccagctctcgtcaggaaacgaccgattctaaatcttccttacacttaatgcaaacttcttttcagctgctgtccgccagcgcatgcccagagtacaaccgtctggatgacttccagaagctgacagagtcgtgctgcagttccgatgcatttgagcgaatcgacagcttttctgtgcagagcctggactcaaggtcagtcagtgagataaatagtgatgacgagttaagtggcaaagggtacgcactggtgcctataattgttaatagtagtactcccaagtctaagacagttgagagtgctgagggcaaaagtgaggaggtcaatgagaccttggtgatcccaacagaagaagcagaaatggaggagagtggtcgctcagcaaccccagtgaattgtgagcagcctgatatcttggtgtctagcacaccaataaatgaaggacagacggtattggacaaggtggctgagcagtgtgaaccagccgaaagccaaccagaagcgctcagcgaaaaagaggacgtgtgtaaaactgtcgaatttttaaatgaaaaattagagaaacgcgaggcccagctcctgtcactgtcaaaggagaaggccctcctggaggaagccttcgataacttgaaggatgagatgtttcgagttaaagaagagtcatcctccatctcttccctgaaggatgagtttacacagagaattgccgaggcagaaaaaaaggtccagctggcctgcaaggagagagatgctgcaaagaaagaagtgaaaagaaaaaaacggtag

SEQ ID NO: 170403 - DNA, 3282 bp, Artificial Sequence
  derived and/or modified sequence
atgagctggttcaatgcttcccaacttagcagtttcgccaaacaggccctgagccaggcccaaaagtccattgacagggtcctggacatccaggaggaggagccttccatctgggccgagactatcccatatggcgagcccggaataagttctcctgtctctggcggttgggacacctccacttgggggctgaaatccaacacagagccccagtccccccctattgctagccccaaggcaataacgaagccagtgcgaagaacggtggttgacgagtccgagaattttttcagcgcttttttatcacccaccgatgttcaaactatccagaaatccccagtggtcagcaaacctccagcaaagtcacagagacctgaggaggaggtgaaaagtagtttgcatgagtctttgcatattggccaaagtcgcaccccagagaccacagaatcccaggtgaaagattcctctctgtgcgtgtcaggcgagaccctggctgctggcacatcctctcccaaaaccgagggcaagcatgaggagacggtgaataaagagagcgacatgaaggttcctacagtgtcccttaaagtcagcgagagcgtgattgatgtcaaaaccaccatggagtccatctcaaatacatccacccaatctctcaccgctgagacaaaggacattgccttggaacctaaagagcaaaagcatgaggatagacaatccaatactccctcacctccggtatctacttttagcagtggtacctcaactacatctgatatagaggtgctcgaccacgagtccgtaatttccgaaagcagtgctagctcccgccaagagacgactgattctaagtcatcacttcacctcatgcaaactagtttccaactcttatcggcttctgcgtgtccggaatacaatcgcctcgatgatttccaaaaactgactgagagttgttgttccagcgatgcattcgaacgtattgattccttttctgtacaaagcctggattcaagatccgtgtctgagatcaattctgacgacgaactgagcggtaagggatacgctcttgtccctattatcgtaaattctagtactcccaagagtaaaaccgtggaatcagcggaaggtaagtccgaggaggttaatgaaacactagtgatccctacagaggaagcagaaatggaagagagtggcaggtctgctacgcctgtcaattgcgaacagccagacattctggtgagcagcacaccaataaacgaaggccagacagtcctagataaggttgctgaacagtgtgaacccgcagaatcccagcccgaagccctgtcagagaaagaggatgtctgtaaaaccgtagaatttctcaatgagaaattggagaaacgagaagcccagctgttgagcctgtccaaagagaaagcccttctcgaggaagcatttgacaatctcaaagatgagatgttccgcgttaaggaggaaagtagttcgatcagttcattaaaggatgaattcacccagcggatcgcagaagcagagaaaaaggtgcagctggcatgtaaggagagagacgccgctaaaaaggaaattaaaaatataaaggaggagctcgcgaccagactcaactcctctgaaacagccgacctcctcaaagagaaggatgagcagatcaggggcctgatggaggagggcgagaaactctccaagcagcagctgcataattccaatattatcaaaaaactgagagcaaaggacaaagagaatgaaaacatggtggcgaaactgaacaagaaggttaaagaactagaagaagaactccagcatcttaaacaggtacttgacgggaaggaggaggtggaaaagcagcacagggaaaatatcaaaaaattgaatagcatggttgagaggcaagaaaaggacctcggcagactgcaagtggacatggatgaactggaggagaagaaccgcagcattcaagcagcattggactccgcctataaggagctgaccgatttgcataaagctaacgccgctaaagattcagaggcccaggaggcagccttaagccgggagatgaaagctaaagaggagctgtctgccgcactggaaaaagcgcaggaagaagcaagacagcagcaggaaacactcgccatccaggttggcgacctgaggctggccttacagcgaactgaacaggcagccgctaggaaagaagactaccttcgacacgagataggggagttgcagcagagattgcaggaggctgaaaatcgcaaccaggaattatctcaatcagtctccagtaccacccgccctctcttgcgccagatcgaaaacctacaggccacgctcgggtcgcagacttcctcctgggagaagctggaaaagaacctgagtgaccgacttggtgagtctcagacccttttagcagccgcagttgagcgagaaagagccgctacagaagagcttctggctaacaagatacagatgtcttccatggagagccaaaatagtctgttaagacaagagaacagcagattccaggctcagcttgaaagcgagaaaaatcgactatgtaagctggaggatgagaacaacagataccaagttgagttggaaaatctgaaagacgaatacgtaagaacactagaagagactaggaaggagaaaaccttactgaatagtcaactggagatggagcggatgaaggtggagcaggaacgaaagaaagccatctttacccaggagaccattaaagaaaaagagagaaaaccattcagcgtctcatctactcctacgatgtctaggagctcaagtatctcaggcgtggatatggccggacttcagacgtcctttctgtcccaggacgagtcccacgaccactcctttggacctatgcccatcagtgccaatgggagcaatctgtacgatgccgtcagaatgggcgcaggttccagtattatagaaaaccttcagtcacagctcaaactgcgagagggcgaaattacccacctccagctggagattggaaacctggagaagactagatccatcatggccgaagaactggttaagctgacaaatcagaatgatgaactggaagagaaggtgaaagagatccctaaacttaggacgcagcttcgagaccttgatcagcggtacaacaccattctccaaatgtacggcgaaaaagctgaggaagcagaagaattacgtcttgacttggaagacgtgaaaaatatgtataaaactcagatagacgagctgttgcgccaaagtctttcatag

SEQ ID NO: 170404 - DNA, 1602 bp, Artificial Sequence
  derived and/or modified sequence
atgagctggttcaacgcgtctcagttgtcatctttcgcaaagcaggctttatcacaagcccagaaatcaatcgatcgggtcttagacatccaggaggaggaacctagcatatgggccgaaaccataccctatggggagcctggaatcagtagcccagtgtcagggggatgggacacaagtacatggggactgaaaagcaatacagagccccagtcccccccaatcgcctcaccgaaggcaatcaccaaacccgttcggcgaaccgtcgtggacgaatcagagaattttttctctgccttcctttcccctacggatgtgcagacaatccagaagagtcctgtggtctcaaagccgccagccaaatcacaacgtccagaggaggaggtgaaaagctccctgcatgaatctctgcatatcggacagtcacgtacaccagagaccactgaatcacaggttaaagattctagcctctgtgtctccggggaaacacttgccgctggcacctccagcccgaaaacagaagggaagcatgaggagacggtcaataaagagtcagacatgaaggtgcctactgttagcctgaaggttagcgagagtgtcatcgatgttaagacaactatggagtcaattagcaacacctctactcagagcctcactgctgagaccaaggatattgcgctcgagcctaaggagcagaaacacgaagaccggcaatctaacacaccttcaccacccgtcagtaccttcagttccggcacatcaactacctcagacattgaggtgctggatcacgagtctgtgatcagcgagtccagcgcttcttcccgccaggagactacggactcaaagtcttcacttcacttgatgcagacttcattccagttattgagcgcttccgcttgtcccgagtataaccgactcgatgacttccagaaactcaccgaatcttgctgtagctccgacgcctttgagcgcatagactcattctcagtgcaaagcttggattctaggtccgtcagcgagataaatagtgacgacgagctgtctggcaaaggctacgcactggtgcctataatcgtgaacagcagcacccccaagagcaagactgtcgagagtgctgagggtaagtcagaagaggtgaacgaaaccctggtgatccctaccgaagaggctgaaatggaggaaagtggacggtccgcaacccccgtgaactgcgagcagccggacatcctcgtgtcctctacccccattaacgagggacagaccgtattggacaaggtggccgaacagtgtgagccagccgagagccagcctgaggctctttctgagaaggaagacgtgtgtaagactgtggaattcctaaatgaaaagcttgaaaaaagggaagcacagctgctttccctgtcaaaagagaaggctttgctggaagaagcattcgacaacctcaaggacgagatgttcagggttaaagaggaatccagctccatctcttctcttaaggatgagttcacccagcgcatcgccgaggctgaaaaaaaggtccaactagcctgcaaggagcgggacgccgctaaaaaggaggtgaagagaaaaaagaggtag

SEQ ID NO: 170405 - DNA, 6849 bp, Artificial Sequence
  derived and/or modified sequence
gcaagcgcatgcgcacatgggcccccttcgtctcagctgtgcgggaacggccgagggtaacatcccgggctcgcgggaggctgtcggggtaatggccacacgctgacagaaccagccgagtggaaaaggggagcgaagccgttcctctgcacccttccccaggcctgaggccttcccgcttggtgctgccgccgccactgccggctgaggaggggcgatgagttggttcaacgcctcccagctctccagcttcgctaagcaggccctgtcccaggcccagaagtctattgacagggttctggacatccaggaagaggagccgagcatctgggccgagaccattccgtatggagagccgggaataagttcccctgtcagtggaggatgggatacttcaacctgggggttgaaatcaaacactgaacctcagagtccaccaatagcctctcctaaagcaatcacaaagccagttcggaggactgtggtcgatgaatctgaaaatttcttcagtgcctttctctcgccaactgatgtccagaccattcagaagagtccagtggtatcaaaacctccagcaaaatcacaacgaccagaagaagaagtgaaaagcagcttacatgaatccttgcacattggccagtcaagaactcctgaaacaactgaatcacaagtaaaagactcttctttgtgtgtttcaggggaaactctggcagcaggtacttcatcacctaaaactgaaggcaagcacgaagaaactgttaataaagaatcggatatgaaggtgccaactgtaagtttgaaagtatctgaaagtgtaattgatgtgaaaacaactatggaaagtatatctaatacgtctacgcagtctctcacagcagaaacaaaggacatagctttggaacctaaggaacaaaaacatgaagacaggcagagcaatacaccttctcctcctgttagtaccttttcatcaggtacttctaccaccagtgatattgaagttttagatcatgaaagtgtaataagtgagagctcagcgagctcgagacaagagactacagattcaaaatcaagtcttcacttgatgcagacatcttttcagcttctctctgcatctgcttgtcctgaatataatcgtttagatgatttccaaaaactcactgagagttgctgttcatctgatgcttttgaaagaatagactcatttagtgtacagtcattagatagccggagtgtaagtgaaatcaattcagatgatgaattgtcaggcaagggatatgctttagtgcctattatagttaattcttcaactccaaagtctaaaacagttgaatctgctgaaggaaaatctgaagaagtaaatgaaacattagttatacccactgaggaagcagaaatggaagaaagtggacgaagtgcaactcctgttaactgtgaacagcctgatatcttggtttcttccacaccaataaatgaaggacagactgtgttagacaaggtggctgagcagtgtgaacctgctgaaagtcagccagaagcactttctgagaaggaagatgtttgcaagacagttgaatttctgaatgaaaagctggaaaaaagggaggctcagttattatctcttagtaaggaaaaagcacttctagaagaagcttttgataacctgaaagatgaaatgttcagagtgaaagaagaaagcagtagcatttcttccttgaaagatgagtttactcaaagaattgcagaagcagaaaagaaagttcaactagcctgcaaagagagagatgctgctaaaaaggaaatcaaaaacataaaagaagaacttgccactagattaaatagtagtgaaactgcagaccttttgaaagagaaagatgagcagatccgagggttaatggaagaaggagaaaaactttcaaaacagcagctgcacaattctaacatcatcaagaaattaagagctaaagacaaggagaatgaaaatatggttgcaaagctgaacaaaaaagttaaagagctagaagaggagttgcagcatttgaaacaggtccttgatggcaaagaagaggttgagaaacaacatagagaaaatattaaaaaactaaattccatggtagaacgccaagagaaagatcttggccgtcttcaggtagacatggatgaacttgaagaaaagaaccgaagtattcaggctgccctggatagtgcatacaaagaacttactgatcttcacaaagccaatgctgcaaaggatagtgaggcacaggaagctgctctgagccgtgaaatgaaagctaaagaagaactttctgcagcattagagaaggcccaagaagaagcccgtcagcagcaagaaacattagccattcaagtgggggaccttaggcttgcattgcagcgtacagaacaagcggctgccagaaaggaggattatttacgccatgagatcggtgaacttcagcagagactccaggaagcagagaatcgaaaccaggaactgagtcaaagtgtttcatcaacaacaagaccattgcttcgacaaatagaaaatttgcaagcaaccctgggatcccagacatcgtcgtgggagaaattagagaagaatctttctgataggcttggtgaatcccagaccttgctggcagcagcagttgagagagaacgtgcagctacagaagaactccttgctaacaaaattcagatgtcttccatggagtcacagaattctcttttaagacaggaaaacagtagatttcaagcccagctagaatcagagaaaaataggctgtgtaaactggaggatgagaacaataggtaccaggttgaattggaaaacctaaaagatgaatatgtaagaacacttgaagagacgaggaaagaaaagacattgttgaatagtcagttagaaatggaaagaatgaaagttgaacaagaaaggaagaaagccatttttactcaagaaacaataaaagaaaaggaacgcaagccattttctgtttctagcactcccaccatgtcacgctcaagttcaataagtggtgttgatatggcaggactacagacatcttttctgtctcaggatgagtctcatgatcactcatttggaccaatgcctatatcagcaaatggaagcaatctttatgatgctgtaaggatgggagcaggatcaagcataattgaaaacctacagtctcagctaaagctaagggaaggggaaatcactcatttacagctagaaattggcaatctagaaaaaactcgatcaataatggctgaagaactagttaaattaacaaatcaaaatgatgaacttgaagagaaggtgaaggagatacccaaacttagaactcagctaagagatttggatcaaaggtacaacactattctgcagatgtatggagaaaaagcagaagaggcagaagaacttcgattagatctcgaagatgtaaaaaatatgtacaaaactcaaatagatgaacttttaagacaaagtctcagttaacttgtgaaaattgaattcccatcaaactgaatgtaagcatttaatatctaaacatttaatgtggacttccaataaattcttttatagaattagaaagtgggatttactgtagagtgtaaaaatttttttaaaattgttttacactatgtagtaatatttacagttaaattattttgtgcaatatttgaactttatttttgaaactattctttaaagatttattttttaaagcattcattttttttccttgaatagcacagagatttattactttatcctcatataaatatggctagagaagaagaatggtgttcatatatgtattgtagatatacaactagttgtatctataatttgtaagtgtttatatatatattaagaacatttgaagagtaatgttaacatactgaaactttgaaatctttcacatttaaaatttcaacatatcttaattactgctcatgaaaatgtacattaagtgttaaagtaaaaaattattaaatctgtggctattaaattttaaactaatttttttcctttaaaagtaagagtcacactgacactgtctgaaatttaaagagtgaatgatttaaacttaaaaaaaattttgatctgaaaatttatttcacccagctttcacaattaagtctgtataaaatgtggtaccttttggtacctatccagagaaacctgtacatattcaatgttatctagatgtgattggataatggagaaaatttatttataatgattttgcaatggcatcaataacatttaaatgattttgaagaagtattattttactaccctataaaatgaatcgaaaataataaagttcttaacataatttactctttaaaaattacctgttcatattttgtaaacccatatttttagcacattaaaaatgaatgtttgatattacagaatattcataacaaaatggaagaattataggaattaacttgaatttggcatttttaattttgtgatttatcattttattttttcttgaaatttcaaacacaaggaaagcatagaatagcttttaaaagtagctatgccttcttccaaatgttattttattcaaaaaggtaaccaggttgtgttttaaacctgtgaaatattgtgatgcattttattactgaaagttatttaactgcctttacttgcacataaaaactctcatttacggccaggtgctgtggctcatgcctgtaatcccagcactttgggaggccaaggcgggcatatcacctgatgtcaggagttcaagaccagcatggccagcagtttggtgaaaccccatctctactaaaaatacaaaaattagcctggcgtggtggtgtgcgcctgtaatcctagctactcgggaggctgaggcaggagcattgcttgaacctgggaggtggaggttacaatgagccaagattgtgccactgcactccagcatgggtgacagagaaagactccgtctcaaaaaaaaaaaaacaaactcttatttaatttttagttaaaattaaaacactagtacttcagaatatagatacaagtacaccatcttgaagaatttggagtttttcagggcaattcaaatgacctcattttttgttctttttgtattccagacagtgtttctgtcattggatctctgattggtagtgttaataaatattctttcagtgtgagccagattcataaaattaattttcttcattttagtagtaaaaagtagtctaatagctttttgtcagcttgatttttttgtgtgtgtaatattcaagggcagaatgacaggacagataagcaataagaaatgtatagaattagaaaatatagtagttccctcttacccatgggacatacgttccaagacccccagtgaacgtctgaaaccatggatagtatagacacctctatacactgttttttcctatacatatatacctatgataaagttctatttataaatcagggacagcaagagataaacaataactgcaaatagaacaattataacagtgcactgtaataaaagtgatgtaaatgtgatatgtctgtctctttctctcaaaatatcttattgtactgtactcacctgtaatcagactgtggttgaccgtgagtaaccgaaaccacagaaagcaaaatcgtggataaggggagactactctatatgaaacttaagttacaaaattctctgaagcatttgaaactagacgttttggaattataaaatagtccctttaaaatatccactagtagaaaaaaacttcatttgcagagaaaagattgcaataaaactcattcctaaacttttcaattttataaaattaaacattctttttttatccgtattaacaatttctagttacatagtttctagttacatattaccatatattactctttatctacaaataaatagctgatactcaaactgatcatattttgattgttaaacacttggatctctcaatacttctgtaagttaaagtgaacttaaacagtttcttgaaaaactccagtaggtggcagaatacctattgaatattcgttgctatactttgctgtttgtcattaaaacatctctacccatattcttgcaaaataatatttatattttaatggataggaaaatgatttgcaattagatgtttccattcttgaaagaaaaaagctgcaaataacattttcaagaatataaaaaaatgagtaaacaaagggaaggttgtttggtcatttatagacaattaagcacagactgtagatgtccttccaattcttgggaggctaaactgagtctaccatttcttacatttcttttacctattttttgagaattgccagttgtacagtgtttagcatgtggaatgtaccaaatatatctatgttgtgacttaagatattctaaatgtggataacttctgacctaggaaacatgaagtttgtagtgaagtaagtgaaaagaatgttcaggaaattttttttctccatctcttcagttggcatttattgagagttttatttgaatgcttattaaaagtatatgatttataatatttagaaaatagaagaaaaaagaaaactgtagatgttttatcttgttttaatactgtatgtttagtacgtatacatttatgttctagtgtatcaaaatttttcattttcattaaagtgaatccaattttccatattctaggtccattttaaaccatgaaaactttaatcacatattttgtaaagggctgaaagtatgatttaaactacagattgatatattttaattctaaatgaaaggtaatgtaaataagcatggatctgattgaataaagattttaaaatagtaa

SEQ ID NO: 170406 - DNA, 1846 bp, Artificial Sequence
  derived and/or modified sequence
gtagatttggttgctgtgtacgtggaagaagcaagcgcatgcgcacatgggcccccttcgtctcagctgtgcgggaacggccgagggtaacatcccgggctcgcgggaggctgtcggggtaatggccacacgctgacagaaccagccgagtggaaaaggggagcgaagccgttcctctgcacccttccccaggcctgaggccttcccgcttggtgctgccgccgccactgccggctgaggaggggcgatgagttggttcaacgcctcccagctctccagcttcgctaagcaggccctgtcccaggcccagaagtctattgacagggttctggacatccaggaagaggagccgagcatctgggccgagaccattccgtatggagagccgggaataagttcccctgtcagtggaggatgggatacttcaacctgggggttgaaatcaaacactgaacctcagagtccaccaatagcctctcctaaagcaatcacaaagccagttcggaggactgtggtcgatgaatctgaaaatttcttcagtgcctttctctcgccaactgatgtccagaccattcagaagagtccagtggtatcaaaacctccagcaaaatcacaacgaccagaagaagaagtgaaaagcagcttacatgaatccttgcacattggccagtcaagaactcctgaaacaactgaatcacaagtaaaagactcttctttgtgtgtttcaggggaaactctggcagcaggtacttcatcacctaaaactgaaggcaagcacgaagaaactgttaataaagaatcggatatgaaggtgccaactgtaagtttgaaagtatctgaaagtgtaattgatgtgaaaacaactatggaaagtatatctaatacgtctacgcagtctctcacagcagaaacaaaggacatagctttggaacctaaggaacaaaaacatgaagacaggcagagcaatacaccttctcctcctgttagtaccttttcatcaggtacttctaccaccagtgatattgaagttttagatcatgaaagtgtaataagtgagagctcagcgagctcgagacaagagactacagattcaaaatcaagtcttcacttgatgcagacatcttttcagcttctctctgcatctgcttgtcctgaatataatcgtttagatgatttccaaaaactcactgagagttgctgttcatctgatgcttttgaaagaatagactcatttagtgtacagtcattagatagccggagtgtaagtgaaatcaattcagatgatgaattgtcaggcaagggatatgctttagtgcctattatagttaattcttcaactccaaagtctaaaacagttgaatctgctgaaggaaaatctgaagaagtaaatgaaacattagttatacccactgaggaagcagaaatggaagaaagtggacgaagtgcaactcctgttaactgtgaacagcctgatatcttggtttcttccacaccaataaatgaaggacagactgtgttagacaaggtggctgagcagtgtgaacctgctgaaagtcagccagaagcactttctgagaaggaagatgtttgcaagacagttgaatttctgaatgaaaagctggaaaaaagggaggctcagttattatctcttagtaaggaaaaagcacttctagaagaagcttttgataacctgaaagatgaaatgttcagagtgaaagaagaaagcagtagcatttcttccttgaaagatgagtttactcaaagaattgcagaagcagaaaagaaagttcaactagcctgcaaagagagagatgctgctaaaaaggaagtaaaaagaaaaaaaaga

SEQ ID NO: 170407 - protein, 277 aa, Artificial Sequence
  derived and/or modified sequence
MIILIYLFLLLWEDTQGWGFKDGIFHNSIWLERAAGVYHREARSGKYKLTYAEAKAVCEFEGGHLATYKQLEAARKIGFHVCAAGWMAKGRVGYPIVKPGPNCGFGKTGIIDYGIRLNRSERWDAYCYNPHAKECGGVFTDPKQIFKSPGFPNEYEDNQICYWHIRLKYGQRIHLSFLDFDLEDDPGCLADYVEIYDSYDDVHGFVGRYCGDELPDDIISTGNVMTLKFLSDASVTAGGFQIKYVAMDPVSKSSQGKNTSTTSTGNKNFLAGRFSHL

SEQ ID NO: 170408 - DNA, 834 bp, Artificial Sequence
  derived and/or modified sequence
atgatcatcctgatctacctgttcctgctgctgtgggaggacacccagggctggggcttcaaggacggcatcttccacaacagcatctggctggagagagccgccggcgtgtaccacagagaggccagaagcggcaagtacaagctgacctacgccgaggccaaggccgtgtgcgagttcgagggcggccacctggccacctacaagcagctggaggccgccagaaagatcggcttccacgtgtgcgccgccggctggatggccaagggcagagtgggctaccccatcgtgaagcccggccccaactgcggcttcggcaagaccggcatcatcgactacggcatcagactgaacagaagcgagagatgggacgcctactgctacaacccccacgccaaggagtgcggcggcgtgttcaccgaccccaagcagatcttcaagagccccggcttccccaacgagtacgaggacaaccagatctgctactggcacatcagactgaagtacggccagagaatccacctgagcttcctggacttcgacctggaggacgaccccggctgcctggccgactacgtggagatctacgacagctacgacgacgtgcacggcttcgtgggcagatactgcggcgacgagctgcccgacgacatcatcagcaccggcaacgtgatgaccctgaagttcctgagcgacgccagcgtgaccgccggcggcttccagatcaagtacgtggccatggaccccgtgagcaagagcagccagggcaagaacaccagcaccaccagcaccggcaacaagaacttcctggccggcagattcagccacctgtag

SEQ ID NO: 170409 - DNA, 834 bp, Artificial Sequence
  derived and/or modified sequence
atgattatcctgatatacctcttcctgctgctctgggaagacacccagggatggggttttaaggacggaatattccacaacagcatatggctggaaagagctgccggcgtgtatcaccgcgaagctaggtctggaaaatacaagctgacatacgccgaggcaaaagccgtctgtgaattcgaggggggtcacctggccacctacaaacagttggaggccgcacgaaagatcgggttccatgtgtgtgctgccggttggatggccaagggcagagtgggatatcctatcgtcaaaccggggcccaactgtggcttcggcaaaaccggtataatcgattacggaatcaggcttaataggagcgagcgctgggatgcatattgctacaatcctcacgcaaaggagtgcggcggggttttcaccgatcctaagcaaatctttaagagccctgggttcccaaacgagtacgaagataaccagatttgttattggcacatcaggttgaagtacggccaaagaatccacctaagcttcttggacttcgatttagaggatgatcccggatgtcttgccgactatgtggagatttacgactcatacgatgacgtccatggattcgtggggaggtattgcggggacgaattacccgatgacattatctccacaggtaacgtgatgaccctgaaattcttgtcagacgcgtccgtaaccgcgggtggctttcagatcaagtacgttgctatggatcccgtgtcgaaaagctcccaggggaagaacacctctactacttcgaccggtaataaaaactttcttgctggccgcttttcccacctttag

SEQ ID NO: 170410 - DNA, 834 bp, Artificial Sequence
  derived and/or modified sequence
atgatcatcctgatctacctgttcctgctgctgtgggaggacacccagggctggggcttcaaggatggcatcttccacaacagcatctggctggagagagctgctggggtgtaccaccgggaggcccggagcggcaagtacaagctgacctacgccgaggccaaggctgtgtgtgaatttgagggcggccacctggccacctacaagcagctggaggccgccaggaagattggcttccacgtgtgtgccgccggctggatggccaagggccgggtgggctaccccatcgtgaagccaggccccaactgtggctttgggaagacaggcatcattgattatggcatccggctgaacagaagtgagcgctgggatgcctactgctacaacccccacgccaaggaatgtggcggcgtcttcacagaccccaagcagatcttcaagagccctggcttccccaatgaatatgaggacaaccagatctgctactggcacatccggctgaagtatggccagaggatccacctgtccttcctggactttgacctggaggatgaccccggctgcctggccgactatgtggagatctatgacagctatgatgatgtgcacggctttgtgggccgctactgtggagatgagctgcctgatgacatcatcagcactggaaatgtgatgaccctgaagttcctgagtgatgcctctgtgacagctgggggcttccagatcaagtatgtggccatggaccctgtgtccaagagcagccagggcaagaacaccagcaccaccagcacaggcaacaagaacttcctggccggccgcttcagccacctgtag

SEQ ID NO: 170411 - DNA, 834 bp, Artificial Sequence
  derived and/or modified sequence
atgatcatcctgatctacctgttcctgctgctgtgggaggacacccagggttggggcttcaaggatggaatctttcataatagcatatggctggaaagagccgccggcgtctatcatcgcgaagctcggagtgggaagtacaagctcacatacgctgaggccaaagccgtttgcgagtttgaggggggccatctggctacatacaagcagctggaggccgctcgcaaaataggatttcacgtgtgcgccgccggttggatggccaagggtagggtagggtaccccatcgtgaaacctgggcctaactgtggatttggaaaaacaggcattatagattatgggattcgtctaaaccgatcagagcggtgggacgcatactgctacaacccacatgccaaagagtgcggaggtgtgttcacagatcccaaacaaatctttaaaagccccggattccctaacgaatacgaggacaaccaaatttgctactggcacattcgactcaagtatgggcagaggattcacctgagctttctagatttcgacttggaagacgatcccgggtgcctggccgattatgtggagatctatgattcatatgatgacgtccacggattcgtggggcggtactgcggggatgagctccctgatgatataatcagcacaggcaacgtaatgacattaaagtttctttctgatgccagtgttacagccggcgggttccagattaagtacgtggccatggaccccgtgagtaagtcaagccaggggaagaataccagcacaaccagcaccgggaacaaaaattttcttgctgggaggttctcgcacctgtag

SEQ ID NO: 170412 - DNA, 834 bp, Artificial Sequence
  derived and/or modified sequence
atgatcatattgatttatctattcctgctactgtgggaggatactcagggatggggcttcaaggatggtatatttcacaattcaatttggctcgaaagagccgctggtgtttaccacagagaagcaagatcaggcaagtacaaactgacatacgcagaggcaaaggccgtgtgtgagttcgaggggggtcacctggcgacatacaaacagctggaagccgctcggaagatagggtttcatgtgtgcgccgcaggctggatggcaaagggacgcgtcggctacccaatcgtgaaaccaggccctaattgcggtttcggcaagaccgggattatcgactatggaatcagactgaatagatctgagcgctgggatgcctactgctacaacccccacgcaaaggaatgcggaggggtcttcacagatccaaagcagattttcaagagcccaggctttccgaatgagtacgaggacaatcaaatttgttactggcacatcaggctcaaatacggccagcggatccatctgtcatttctcgacttcgacttggaggatgatcccggttgccttgccgattacgtggagatatatgactcctacgatgacgtacatggcttcgtaggaaggtattgtggcgacgaactccccgatgacattatctcaactggaaacgttatgactcttaagttcctatctgatgcttctgtgaccgcaggcggattccagataaagtacgtcgccatggaccctgtgtccaagtcatctcaggggaagaatacatctacaacttcaacaggtaacaaaaatttcctggcagggagattcagtcacctctag

SEQ ID NO: 170413 - DNA, 1422 bp, Artificial Sequence
  derived and/or modified sequence
agtcacatttcagccactgctctgagaatttgtgagcagcccctaacaggctgttacttcactacaactgacgatatgatcatcttaatttacttatttctcttgctatgggaagacactcaaggatggggattcaaggatggaatttttcataactccatatggcttgaacgagcagccggtgtgtaccacagagaagcacggtctggcaaatacaagctcacctacgcagaagctaaggcggtgtgtgaatttgaaggcggccatctcgcaacttacaagcagctagaggcagccagaaaaattggatttcatgtctgtgctgctggatggatggctaagggcagagttggataccccattgtgaagccagggcccaactgtggatttggaaaaactggcattattgattatggaatccgtctcaataggagtgaaagatgggatgcctattgctacaacccacacgcaaaggagtgtggtggcgtctttacagatccaaagcaaatttttaaatctccaggcttcccaaatgagtacgaagataaccaaatctgctactggcacattagactcaagtatggtcagcgtattcacctgagttttttagattttgaccttgaagatgacccaggttgcttggctgattatgttgaaatatatgacagttacgatgatgtccatggctttgtgggaagatactgtggagatgagcttccagatgacatcatcagtacaggaaatgtcatgaccttgaagtttctaagtgatgcttcagtgacagctggaggtttccaaatcaaatatgttgcaatggatcctgtatccaaatccagtcaaggaaaaaatacaagtactacttctactggaaataaaaactttttagctggaagatttagccacttataaaaaaaaaaaaaaggatgatcaaaacacacagtgtttatgttggaatcttttggaactcctttgatctcactgttattattaacatttatttattatttttctaaatgtgaaagcaatacataatttagggaaaattggaaaatataggaaactttaaacgagaaaatgaaacctctcataatcccactgcatagaaataacaagcgttaacattttcatatttttttctttcagtcatttttctatttgtggtatatgtatatatgtacctatatgtatttgcatttgaaattttggaatcctgctctatgtacagttttgtattatactttttaaatcttgaactttataaacattttctgaaatcattgattattctacaaaaacatgattttaaacagctgtaaaatattctatgatatgaatgttttatgcattatttaagcctgtctctattgttggaatttcaggtcattttcataaatattgttgcaataaatatccttgaacaca

SEQ ID NO: 170414 - protein, 242 aa, Artificial Sequence
  derived and/or modified sequence
MPGPWLLLALALTLNLTGVPGGRAQPEAAQQEAVTAAEHPGLDDFLRQVERLLFLRENIQRLQGDQGEHSASQIFQSDWLSKRQHPGKREEEEEEGVEEEEEEEGGAVGPHKRQHPGRREDEASWSVDVTQHKRQHPGRRSPWLAYAVPKRQHPGRRLADPKAQRSWEEEEEEEEREEDLMPEKRQHPGKRALGGPCGPQGAYGQAGLLLGLLDDLSRSQGAEEKRQHPGRRAAWVREPLEE

SEQ ID NO: 170415 - DNA, 729 bp, Artificial Sequence
  derived and/or modified sequence
atgcccggcccctggctgctgctggccctggccctgaccctgaacctgaccggcgtgcccggcggcagagcccagcccgaggccgcccagcaggaggccgtgaccgccgccgagcaccccggcctggacgacttcctgagacaggtggagagactgctgttcctgagagagaacatccagagactgcagggcgaccagggcgagcacagcgccagccagatcttccagagcgactggctgagcaagagacagcaccccggcaagagagaggaggaggaggaggagggcgtggaggaggaggaggaggaggagggcggcgccgtgggcccccacaagagacagcaccccggcagaagagaggacgaggccagctggagcgtggacgtgacccagcacaagagacagcaccccggcagaagaagcccctggctggcctacgccgtgcccaagagacagcaccccggcagaagactggccgaccccaaggcccagagaagctgggaggaggaggaggaggaggaggagagagaggaggacctgatgcccgagaagagacagcaccccggcaagagagccctgggcggcccctgcggcccccagggcgcctacggccaggccggcctgctgctgggcctgctggacgacctgagcagaagccagggcgccgaggagaagagacagcaccccggcagaagagccgcctgggtgagagagcccctggaggagtag

SEQ ID NO: 170416 - DNA, 729 bp, Artificial Sequence
  derived and/or modified sequence
atgcccggtccttggttgttactcgccctggcccttaccttaaatctgaccggagtaccgggggggagagctcagccagaggcagcacaacaagaggcggttactgccgctgagcaccctgggctggacgattttttacgccaggtagaaagactgttgttcctgagagagaacatccagagactacaaggcgatcagggcgaacacagtgcctcacagatcttccagtccgattggctgtccaagcgtcagcatcccggtaaaagggaagaagaggaagaagaaggcgtggaagaagaggaagaagaggaaggcggggctgtggggccccacaagcgacagcaccctggtaggagggaagatgaggcaagttggagcgtcgacgtcacccagcacaagagacagcaccctggtcggagatccccatggctggcctatgccgtaccaaaaagacagcacccgggaagaaggttagccgatccaaaggcccagagatcctgggaggaggaagaggaagaggaagagcgagaagaggacttgatgcccgagaaacgccagcacccgggcaaaagagccttaggtgggccttgtggacctcagggcgcttatggccaggccggcctgctccttggcctcctggacgatctgtctcgcagccagggtgcagaagaaaagcgccagcatcccggtcggagagctgcttgggtgcgtgagccacttgaagagtag

SEQ ID NO: 170417 - DNA, 729 bp, Artificial Sequence
  derived and/or modified sequence
atgcctggcccctggctgctgctggccctggccctgaccctgaacctgactggagtgcctgggggccgggcccagcctgaggccgcccagcaggaggccgtgacagctgctgagcaccctggcctggatgacttcctgcggcaggtggagcggctgctcttcctgcgggagaacatccagaggctgcagggcgaccagggcgagcacagcgccagccagatcttccagagcgactggctgagcaagaggcagcaccctgggaagcgggaggaggaggaggaggagggcgtggaggaggaggaggaggaggagggcggcgctgtgggcccccacaagaggcagcaccctggccggcgggaggatgaggcctcctggagcgtggatgtgacccagcacaagaggcagcaccctggaagaagaagcccctggctggcctatgctgtgcccaagaggcagcaccctggccggcggctggccgaccccaaggcccagaggtcctgggaggaggaggaggaggaggaggagcgggaggaggacctgatgcctgagaagaggcagcaccctgggaagagggccctgggcggcccctgtggcccccagggcgcctacggccaggccggcctgctgctgggcctgctggatgacctgagccgcagccagggcgctgaggagaagaggcagcaccctggaagaagagctgcctgggtgcgggagcccctggaggagtag

SEQ ID NO: 170418 - DNA, 729 bp, Artificial Sequence
  derived and/or modified sequence
atgcccggcccctggctgctgctggccctggccctgaccctgaacctcaccggcgtccctggcggcagagcacagcctgaagccgcgcaacaggaggctgtgactgctgccgaacatcccgggctggatgatttcctacgccaggttgaaaggctcctttttctgcgggaaaacattcagagattgcagggcgaccaaggggagcattccgcttctcagatattccagagcgactggctatcaaagaggcaacaccctggcaagagggaagaggaggaggaggaaggcgtggaagaagaagaagaggaggaagggggcgcagtaggacctcacaaacgacagcaccctggccgccgggaggacgaggccagctggtccgtggatgtgacgcagcacaaaaggcaacatcctggacgaagaagcccttggctcgcttacgccgtgccaaaaagacagcacccgggccgcagactcgcggatccgaaagcacaacggtcctgggaggaggaggaggaggaggaggagcgggaagaagatctgatgcccgaaaagcgacagcatcccggtaaacgcgcgttaggaggcccttgtggccctcaaggggcctatgggcaggcaggtctcctgctgggactgttagacgacttgtcacgttcccaaggtgctgaggagaagaggcagcacccaggtcggcgggccgcgtgggtgagggaaccgctcgaagagtag

SEQ ID NO: 170419 - DNA, 729 bp, Artificial Sequence
  derived and/or modified sequence
atgccaggcccatggctcctccttgctctggcactcactcttaatttgaccggcgtgcctggcggacgcgctcaacctgaagcagcccagcaagaagcagtcacggccgcagagcaccctggtttggatgacttcttgagacaagtggaaaggttactcttcttgagggagaatatacagaggctccaaggggaccagggggagcacagcgcatcccagatttttcagagtgattggctgagcaagaggcagcatcccggtaagagagaggaagaggaggaagaaggcgtggaagaggaggaggaagaggagggaggcgctgtgggacctcacaaacggcagcatcccggtagacgagaagacgaggcttcatggagtgtggatgtgacccaacataagcgacagcacccgggtagacgatcaccttggctggcctatgcagtgcccaaacgccaacacccaggtaggaggcttgctgatcccaaagctcagaggtcctgggaagaagaagaggaggaggaggagcgcgaagaggaccttatgcctgaaaaaaggcagcacccaggtaaacgcgctctcggagggccatgcggccctcagggagcgtatgggcaggccggacttctgctgggactcctcgatgacctgagccgatctcagggggctgaggagaaaaggcagcaccctggcagacgggctgcatgggtccgtgaaccgctcgaggagtag

SEQ ID NO: 170420 - DNA, 1978 bp, Artificial Sequence
  derived and/or modified sequence
tctgcggccgtgtccctttcgtgtgtgtctgccctgtgtttctccgtcgtctccgtgtggatctcggtctttgtctcgccctctagctctctcgtgcgcctgtgtttaatcgtgcgcttctctcaatctctctgtccctccctttgccccctacacgcgtgttctcgtcaacagatctccagaggtggtgcagaaacgaccccgcgccggcgccccatcctgcggccagtgcctccgcgccccggctccggtccccaccgtccccgccccagatttccggaggagcaggcgggcggggtcccgcggggccggctgccgtcagcgccccttcccggcggccgcgacccctccccgctgacctcactcgagccgccgcctggcgcagatataagcggcggcccatctgaagagggctcggcaggcgcccggggtcctcagcgctgcagactcctgacctgccgactgcggatcccgagtccccggatcccggacccatcctgtggagcccactcctggcagacgccgcgatgcccggcccttggttgctgctcgctctggctttgaccctgaacctgaccggtgtccccggcggccgtgctcagccagaggcggcccagcaggaggcagtgacggccgcggagcatccgggcctggatgacttcctgcgccaggtggagcgcctcctcttcctccgggaaaacatccagcggctgcaaggggaccagggtgagcactccgcgtcccagatctttcaatctgactggctctccaaacgtcagcatccaggcaaaagagaggaggaggaggaagagggagttgaagaagaggaagaggaagaagggggggctgtgggaccccacaaacggcagcaccctggccgacgagaagatgaggcttcatggtcagtcgatgtaacccagcacaagcggcagcatcctggccggcgctccccctggcttgcatatgctgtcccgaagcggcagcacccaggcagaaggctggcagatcccaaggctcaaaggagctgggaagaagaggaggaggaggaagagagagaggaagacctgatgcctgaaaaacgccagcatccgggcaagagggccctgggaggcccctgtgggccccagggagcctatggtcaagcgggccttctgctggggctcctggatgacctgagtaggagccagggagctgaggaaaagcggcagcaccctggtcggcgggcagcctgggtcagagagcccctggaggagtgaacccagttttccctgaagtcgagtttgtggtctaaggatgtcttgagccctgtgtgccccaccattcatgacctctgtattctctagttagatccctgaccataagcctgagcccctccctcccagccccatattcacacacatcccagcccctggccttgccctcttcctttaggcatgtgagaaaatcagcctagcagtttaaaccccactttcctccacttagcaccataggcaagggggcagatcccagagcccctctcaccccccccaccacaggcctgctccttccttagccttggctaagatggtccttctgtgtcttgcaaagactccccaagtgggacagggagcccctgggagggcagccagtgagggtggggtgggactgaagcgttgtgtgcaaatccagcttccatcccctccccaacctggcaggattctccatgtgtaaacttcacccccaggacccaggatcttctcctttctgggcatccctttgtgggtgggcagagccctgacccacagctgtgttactgcttggagaagcatatgtaggggcataccctgtggtgttgtgctgtgtctggctgtgggataaatgtgtgtgggaatattgaaacatcgcctaggaattgtggtttgtatataaccctctaagcccctatcccttgtcgatgacagtcatcctaatgataataaaacctgcatccagataatca

SEQ ID NO: 170421 - protein, 3097 aa, Artificial Sequence
  derived and/or modified sequence
MSGSSGGAAAPAASSGPAAAASAAGSGCGGGAGEGAEEAAKDLADIAAFFRSGFRKNDEMKAMDVLPILKEKVAYLSGGRDKRGGPILTFPARSNHDRIRQEDLRRLISYLACIPSEEVCKRGFTVIVDMRGSKWDSIKPLLKILQESFPCCIHVALIIKPDNFWQKQRTNFGSSKFEFETNMVSLEGLTKVVDPSQLTPEFDGCLEYNHEEWIEIRVAFEDYISNATHMLSRLEELQDILAKKELPQDLEGARNMIEEHSQLKKKVIKAPIEDLDLEGQKLLQRIQSSESFPKKNSGSGNADLQNLLPKVSTMLDRLHSTRQHLHQMWHVRKLKLDQCFQLRLFEQDAEKMFDWITHNKGLFLNSYTEIGTSHPHAMELQTQHNHFAMNCMNVYVNINRIMSVANRLVESGHYASQQIRQIASQLEQEWKAFAAALDERSTLLDMSSIFHQKAEKYMSNVDSWCKACGEVDLPSELQDLEDAIHHHQGIYEHITLAYSEVSQDGKSLLDKLQRPLTPGSSDSLTASANYSKAVHHVLDVIHEVLHHQRQLENIWQHRKVRLHQRLQLCVFQQDVQQVLDWIENHGEAFLSKHTGVGKSLHRARALQKRHEDFEEVAQNTYTNADKLLEAAEQLAQTGECDPEEIYQAAHQLEDRIQDFVRRVEQRKILLDMSVSFHTHVKELWTWLEELQKELLDDVYAESVEAVQDLIKRFGQQQQTTLQVTVNVIKEGEDLIQQLRDSAISSNKTPHNSSINHIETVLQQLDEAQSQMEELFQERKIKLELFLQLRIFERDAIDIISDLESWNDELSQQMNDFDTEDLTIAEQRLQHHADKALTMNNLTFDVIHQGQDLLQYVNEVQASGVELLCDRDVDMATRVQDLLEFLHEKQQELDLAAEQHRKHLEQCVQLRHLQAEVKQVLGWIRNGESMLNAGLITASSLQEAEQLQREHEQFQHAIEKTHQSALQVQQKAEAMLQANHYDMDMIRDCAEKVASHWQQLMLKMEDRLKLVNASVAFYKTSEQVCSVLESLEQEYKREEDWCGGADKLGPNSETDHVTPMISKHLEQKEAFLKACTLARRNADVFLKYLHRNSVNMPGMVTHIKAPEQQVKNILNELFQRENRVLHYWTMRKRRLDQCQQYVVFERSAKQALEWIHDNGEFYLSTHTSTGSSIQHTQELLKEHEEFQITAKQTKERVKLLIQLADGFCEKGHAHAAEIKKCVTAVDKRYRDFSLRMEKYRTSLEKALGISSDSNKSSKSLQLDIIPASIPGSEVKLRDAAHELNEEKRKSARRKEFIMAELIQTEKAYVRDLRECMDTYLWEMTSGVEEIPPGIVNKELIIFGNMQEIYEFHNNIFLKELEKYEQLPEDVGHCFVTWADKFQMYVTYCKNKPDSTQLILEHAGSYFDEIQQRHGLANSISSYLIKPVQRITKYQLLLKELLTCCEEGKGEIKDGLEVMLSVPKRANDAMHLSMLEGFDENIESQGELILQESFQVWDPKTLIRKGRERHLFLFEMSLVFSKEVKDSSGRSKYLYKSKLFTSELGVTEHVEGDPCKFALWVGRTPTSDNKIVLKASSIENKQDWIKHIREVIQERTIHLKGALKEPIHIPKTAPATRQKGRRDGEDLDSQGDGSSQPDTISIASRTSQNTLDSDKLSGGCELTVVIHDFTACNSNELTIRRGQTVEVLERPHDKPDWCLVRTTDRSPAAEGLVPCGSLCIAHSRSSMEMEGIFNHKDSLSVSSNDASPPASVASLQPHMIGAQSSPGPKRPGNTLRKWLTSPVRRLSSGKADGHVKKLAHKHKKSREVRKSADAGSQKDSDDSAATPQDETVEERGRNEGLSSGTLSKSSSSGMQSCGEEEGEEGADAVPLPPPMAIQQHSLLQPDSQDDKASSRLLVRPTSSETPSAAELVSAIEELVKSKMALEDRPSSLLVDQGDSSSPSFNPSDNSLLSSSSPIDEMEERKSSSLKRRHYVLQELVETERDYVRDLGYVVEGYMALMKEDGVPDDMKGKDKIVFGNIHQIYDWHRDFFLGELEKCLEDPEKLGSLFVKHERRLHMYIAYCQNKPKSEHIVSEYIDTFFEDLKQRLGHRLQLTDLLIKPVQRIMKYQLLLKDFLKYSKKASLDTSELERAVEVMCIVPRRCNDMMNVGRLQGFDGKIVAQGKLLLQDTFLVTDQDAGLLPRCRERRIFLFEQIVIFSEPLDKKKGFSMPGFLFKNSIKVSCLCLEENVENDPCKFALTSRTGDVVETFILHSSSPSVRQTWIHEINQILENQRNFLNALTSPIEYQRNHSGGGGGGGSGGSGGGGGSGGGGAPSGGSGHSGGPSSCGGAPSTSRSRPSRIPQPVRHHPPVLVSSAASSQAEADKMSGTSTPGPSLPPPGAAPEAGPSAPSRRPPGADAEGSEREAEPIPKMKVLESPRKGAANASGSSPDAPAKDARASLGTLPLGKPRAGAASPLNSPLSSAVPSLGKEPFPPSSPLQKGGSFWSSIPASPASRPGSFTFPGDSDSLQRQTPRHAAPGKDTDRMSTCSSASEQSVQSTQSNGSESSSSSNISTMLVTHDYTAVKEDEINVYQGEVVQILASNQQNMFLVFRAATDQCPAAEGWIPGFVLGHTSAVIVENPDGTLKKSTSWHTALRLRKKSEKKDKDGKREGKLENGYRKSREGLSNKVSVKLLNPNYIYDVPPEFVIPLSEVTCETGETVVLRCRVCGRPKASITWKGPEHNTLNNDGHYSISYSDLGEATLKIVGVTTEDDGIYTCIAVNDMGSASSSASLRVLGPGMDGIMVTWKDNFDSFYSEVAELGRGRFSVVKKCDQKGTKRAVATKFVNKKLMKRDQVTHELGILQSLQHPLLVGLLDTFETPTSYILVLEMADQGRLLDCVVRWGSLTEGKIRAHLGEVLEAVRYLHNCRIAHLDLKPENILVDESLAKPTIKLADFGDAVQLNTTYYIHQLLGNPEFAAPEIILGNPVSLTSDTWSVGVLTYVLLSGVSPFLDDSVEETCLNICRLDFSFPDDYFKGVSQKAKEFVCFLLQEDPAKRPSAALALQEQWLQAGNGRSTGVLDTSRLTSFIERRKHQNDVRPIRSIKNFLQSRLLPRV

SEQ ID NO: 170422 - protein, 2921 aa, Artificial Sequence
  derived and/or modified sequence
MSGSSGGAAAPAASSGPAAAASAAGSGCGGGAGEGAEEAAKDLADIAAFFRSGFRKNDEMKAMDVLPILKEKVAYLSGGRDKRGGPILTFPARSNHDRIRQEDLRRLISYLACIPSEEVCKRGFTVIVDMRGSKWDSIKPLLKILQESFPCCIHVALIIKPDNFWQKQRTNFGSSKFEFETNMVSLEGLTKVVDPSQLTPEFDGCLEYNHEEWIEIRVAFEDYISNATHMLSRLEELQDILAKKELPQDLEGARNMIEEHSQLKKKVIKAPIEDLDLEGQKLLQRIQSSESFPKKNSGSGNADLQNLLPKVSTMLDRLHSTRQHLHQMWHVRKLKLDQCFQLRLFEQDAEKMFDWITHNKGLFLNSYTEIGTSHPHAMELQTQHNHFAMNCMNVYVNINRIMSVANRLVESGHYASQQIRQIASQLEQEWKAFAAALDERSTLLDMSSIFHQKAEKYMSNVDSWCKACGEVDLPSELQDLEDAIHHHQGIYEHITLAYSEVSQDGKSLLDKLQRPLTPGSSDSLTASANYSKAVHHVLDVIHEVLHHQRQLENIWQHRKVRLHQRLQLCVFQQDVQQVLDWIENHGEAFLSKHTGVGKSLHRARALQKRHEDFEEVAQNTYTNADKLLEAAEQLAQTGECDPEEIYQAAHQLEDRIQDFVRRVEQRKILLDMSVSFHTHVKELWTWLEELQKELLDDVYAESVEAVQDLIKRFGQQQQTTLQVTVNVIKEGEDLIQQLRDSAISSNKTPHNSSINHIETVLQQLDEAQSQMEELFQERKIKLELFLQLRIFERDAIDIISDLESWNDELSQQMNDFDTEDLTIAEQRLQHHADKALTMNNLTFDVIHQGQDLLQYVNEVQASGVELLCDRDVDMATRVQDLLEFLHEKQQELDLAAEQHRKHLEQCVQLRHLQAEVKQVLGWIRNGESMLNAGLITASSLQEAEQLQREHEQFQHAIEKTHQSALQVQQKAEAMLQANHYDMDMIRDCAEKVASHWQQLMLKMEDRLKLVNASVAFYKTSEQVCSVLESLEQEYKREEDWCGGADKLGPNSETDHVTPMISKHLEQKEAFLKACTLARRNADVFLKYLHRNSVNMPGMVTHIKAPEQQVKNILNELFQRENRVLHYWTMRKRRLDQCQQYVVFERSAKQALEWIHDNGEFYLSTHTSTGSSIQHTQELLKEHEEFQITAKQTKERVKLLIQLADGFCEKGHAHAAEIKKCVTAVDKRYRDFSLRMEKYRTSLEKALGISSDSNKSSKSLQLDIIPASIPGSEVKLRDAAHELNEEKRKSARRKEFIMAELIQTEKAYVRDLRECMDTYLWEMTSGVEEIPPGIVNKELIIFGNMQEIYEFHNNIFLKELEKYEQLPEDVGHCFVTWADKFQMYVTYCKNKPDSTQLILEHAGSYFDEIQQRHGLANSISSYLIKPVQRITKYQLLLKELLTCCEEGKGEIKDGLEVMLSVPKRANDAMHLSMLEGFDENIESQGELILQESFQVWDPKTLIRKGRERHLFLFEMSLVFSKEVKDSSGRSKYLYKSKLFTSELGVTEHVEGDPCKFALWVGRTPTSDNKIVLKASSIENKQDWIKHIREVIQERTIHLKGALKEPIHIPKTAPATRQKGRRDGEDLDSQGDGSSQPDTISIASRTSQNTLDSDKLSGGCELTVVIHDFTACNSNELTIRRGQTVEVLERPHDKPDWCLVRTTDRSPAAEGLVPCGSLCIAHSRSSMEMEGIFNHKDSLSVSSNDASPPASVASLQPHMIGAQSSPGPKRPGNTLRKWLTSPVRRLSSGKADGHVKKLAHKHKKSREVRKSADAGSQKDSDDSAATPQDETVEERGRNEGLSSGTLSKSSSSGMQSCGEEEGEEGADAVPLPPPMAIQQHSLLQPDSQDDKASSRLLVRPTSSETPSAAELVSAIEELVKSKMALEDRPSSLLVDQGDSSSPSFNPSDNSLLSSSSPIDEMEERKSSSLKRRHYVLQELVETERDYVRDLGYVVEGYMALMKEDGVPDDMKGKDKIVFGNIHQIYDWHRDFFLGELEKCLEDPEKLGSLFVKHERRLHMYIAYCQNKPKSEHIVSEYIDTFFEDLKQRLGHRLQLTDLLIKPVQRIMKYQLLLKDFLKYSKKASLDTSELERAVEVMCIVPRRCNDMMNVGRLQGFDGKIVAQGKLLLQDTFLVTDQDAGLLPRCRERRIFLFEQIVIFSEPLDKKKGFSMPGFLFKNSIKVSCLCLEENVENDPCKFALTSRTGDVVETFILHSSSPSVRQTWIHEINQILENQRNFLNALTSPIEYQRNHSGGGGGGGSGGSGGGGGSGGGGAPSGGSGHSGGPSSCGGAPSTSRSRPSRIPQPVRHHPPVLVSSAASSQAEADKMSESESSSSSNISTMLVTHDYTAVKEDEINVYQGEVVQILASNQQNMFLVFRAATDQCPAAEGWIPGFVLGHTSAVIVENPDGTLKKSTSWHTALRLRKKSEKKDKDGKREGKLENGYRKSREGLSNKVSVKLLNPNYIYDVPPEFVIPLSEVTCETGETVVLRCRVCGRPKASITWKGPEHNTLNNDGHYSISYSDLGEATLKIVGVTTEDDGIYTCIAVNDMGSASSSASLRVLGPGMDGIMVTWKDNFDSFYSEVAELGRGRFSVVKKCDQKGTKRAVATKFVNKKLMKRDQVTHELGILQSLQHPLLVGLLDTFETPTSYILVLEMADQGRLLDCVVRWGSLTEGKIRAHLGEVLEAVRYLHNCRIAHLDLKPENILVDESLAKPTIKLADFGDAVQLNTTYYIHQLLGNPEFAAPEIILGNPVSLTSDTWSVGVLTYVLLSGVSPFLDDSVEETCLNICRLDFSFPDDYFKGVSQKAKEFVCFLLQEDPAKRPSAALALQEQWLQAGNGRSTGVLDTSRLTSFIERRKHQNDVRPIRSIKNFLQSRLLPRV

SEQ ID NO: 170423 - DNA, 1791 bp, Artificial Sequence
  derived and/or modified sequence
atgctgcccagccaggcccagggcctgctgtggtgggtgttccccctgttccccgccagcagcctgagctacccccccgtgagctacagagccgacggcctggccagaaacaccttcctgaaggcctgcagcgagagcagcagcagcagcaacatcagcaccatgctggtgacccacgactacaccgccgtgaaggaggacgagatcaacgtgtaccagggcgaggtggtgcagatcctggccagcaaccagcagaacatgttcctggtgttcagagccgccaccgaccagtgccccgccgccgagggctggatccccggcttcgtgctgggccacaccagcgccgtgatcgtggagaaccccgacggcaccctgaagaagagcaccagctggcacaccgccctgagactgagaaagaagagcgagaagaaggacaaggacggcaagagagagggcaagctggagaacggctacagaaagagcagagagggcctgagcaacaaggtgagcgtgaagctgctgaaccccaactacatctacgacgtgccccccgagttcgtgatccccctgagcgaggtgacctgcgagaccggcgagaccgtggtgctgagatgcagagtgtgcggcagacccaaggccagcatcacctggaagggccccgagcacaacaccctgaacaacgacggccactacagcatcagctacagcgacctgggcgaggccaccctgaagatcgtgggcgtgaccaccgaggacgacggcatctacacctgcatcgccgtgaacgacatgggcagcgccagcagcagcgccagcctgagagtgctgggccccggcatggacggcatcatggtgacctggaaggacaacttcgacagcttctacagcgaggtggccgagctgggcagaggcagattcagcgtggtgaagaagtgcgaccagaagggcaccaagagagccgtggccaccaagttcgtgaacaagaagctgatgaagagagaccaggtgacccacgagctgggcatcctgcagagcctgcagcaccccctgctggtgggcctgctggacaccttcgagacccccaccagctacatcctggtgctggagatggccgaccagggcagactgctggactgcgtggtgagatggggcagcctgaccgagggcaagatcagagcccacctgggcgaggtgctggaggccgtgagatacctgcacaactgcagaatcgcccacctggacctgaagcccgagaacatcctggtggacgagagcctggccaagcccaccatcaagctggccgacttcggcgacgccgtgcagctgaacaccacctactacatccaccagctgctgggcaaccccgagttcgccgcccccgagatcatcctgggcaaccccgtgagcctgaccagcgacacctggagcgtgggcgtgctgacctacgtgctgctgagcggcgtgagccccttcctggacgacagcgtggaggagacctgcctgaacatctgcagactggacttcagcttccccgacgactacttcaagggcgtgagccagaaggccaaggagttcgtgtgcttcctgctgcaggaggaccccgccaagagacccagcgccgccctggccctgcaggagcagtggctgcaggccggcaacggcagaagcaccggcgtgctggacaccagcagactgaccagcttcatcgagagaagaaagcaccagaacgacgtgagacccatcagaagcatcaagaacttcctgcagagcagactgctgcccagagtgtag

SEQ ID NO: 170424 - DNA, 9294 bp, Artificial Sequence
  derived and/or modified sequence
atgagcggcagcagcggcggcgccgccgcccccgccgccagcagcggccccgccgccgccgccagcgccgccggcagcggctgcggcggcggcgccggcgagggcgccgaggaggccgccaaggacctggccgacatcgccgccttcttcagaagcggcttcagaaagaacgacgagatgaaggccatggacgtgctgcccatcctgaaggagaaggtggcctacctgagcggcggcagagacaagagaggcggccccatcctgaccttccccgccagaagcaaccacgacagaatcagacaggaggacctgagaagactgatcagctacctggcctgcatccccagcgaggaggtgtgcaagagaggcttcaccgtgatcgtggacatgagaggcagcaagtgggacagcatcaagcccctgctgaagatcctgcaggagagcttcccctgctgcatccacgtggccctgatcatcaagcccgacaacttctggcagaagcagagaaccaacttcggcagcagcaagttcgagttcgagaccaacatggtgagcctggagggcctgaccaaggtggtggaccccagccagctgacccccgagttcgacggctgcctggagtacaaccacgaggagtggatcgagatcagagtggccttcgaggactacatcagcaacgccacccacatgctgagcagactggaggagctgcaggacatcctggccaagaaggagctgccccaggacctggagggcgccagaaacatgatcgaggagcacagccagctgaagaagaaggtgatcaaggcccccatcgaggacctggacctggagggccagaagctgctgcagagaatccagagcagcgagagcttccccaagaagaacagcggcagcggcaacgccgacctgcagaacctgctgcccaaggtgagcaccatgctggacagactgcacagcaccagacagcacctgcaccagatgtggcacgtgagaaagctgaagctggaccagtgcttccagctgagactgttcgagcaggacgccgagaagatgttcgactggatcacccacaacaagggcctgttcctgaacagctacaccgagatcggcaccagccacccccacgccatggagctgcagacccagcacaaccacttcgccatgaactgcatgaacgtgtacgtgaacatcaacagaatcatgagcgtggccaacagactggtggagagcggccactacgccagccagcagatcagacagatcgccagccagctggagcaggagtggaaggccttcgccgccgccctggacgagagaagcaccctgctggacatgagcagcatcttccaccagaaggccgagaagtacatgagcaacgtggacagctggtgcaaggcctgcggcgaggtggacctgcccagcgagctgcaggacctggaggacgccatccaccaccaccagggcatctacgagcacatcaccctggcctacagcgaggtgagccaggacggcaagagcctgctggacaagctgcagagacccctgacccccggcagcagcgacagcctgaccgccagcgccaactacagcaaggccgtgcaccacgtgctggacgtgatccacgaggtgctgcaccaccagagacagctggagaacatctggcagcacagaaaggtgagactgcaccagagactgcagctgtgcgtgttccagcaggacgtgcagcaggtgctggactggatcgagaaccacggcgaggccttcctgagcaagcacaccggcgtgggcaagagcctgcacagagccagagccctgcagaagagacacgaggacttcgaggaggtggcccagaacacctacaccaacgccgacaagctgctggaggccgccgagcagctggcccagaccggcgagtgcgaccccgaggagatctaccaggccgcccaccagctggaggacagaatccaggacttcgtgagaagagtggagcagagaaagatcctgctggacatgagcgtgagcttccacacccacgtgaaggagctgtggacctggctggaggagctgcagaaggagctgctggacgacgtgtacgccgagagcgtggaggccgtgcaggacctgatcaagagattcggccagcagcagcagaccaccctgcaggtgaccgtgaacgtgatcaaggagggcgaggacctgatccagcagctgagagacagcgccatcagcagcaacaagaccccccacaacagcagcatcaaccacatcgagaccgtgctgcagcagctggacgaggcccagagccagatggaggagctgttccaggagagaaagatcaagctggagctgttcctgcagctgagaatcttcgagagagacgccatcgacatcatcagcgacctggagagctggaacgacgagctgagccagcagatgaacgacttcgacaccgaggacctgaccatcgccgagcagagactgcagcaccacgccgacaaggccctgaccatgaacaacctgaccttcgacgtgatccaccagggccaggacctgctgcagtacgtgaacgaggtgcaggccagcggcgtggagctgctgtgcgacagagacgtggacatggccaccagagtgcaggacctgctggagttcctgcacgagaagcagcaggagctggacctggccgccgagcagcacagaaagcacctggagcagtgcgtgcagctgagacacctgcaggccgaggtgaagcaggtgctgggctggatcagaaacggcgagagcatgctgaacgccggcctgatcaccgccagcagcctgcaggaggccgagcagctgcagagagagcacgagcagttccagcacgccatcgagaagacccaccagagcgccctgcaggtgcagcagaaggccgaggccatgctgcaggccaaccactacgacatggacatgatcagagactgcgccgagaaggtggccagccactggcagcagctgatgctgaagatggaggacagactgaagctggtgaacgccagcgtggccttctacaagaccagcgagcaggtgtgcagcgtgctggagagcctggagcaggagtacaagagagaggaggactggtgcggcggcgccgacaagctgggccccaacagcgagaccgaccacgtgacccccatgatcagcaagcacctggagcagaaggaggccttcctgaaggcctgcaccctggccagaagaaacgccgacgtgttcctgaagtacctgcacagaaacagcgtgaacatgcccggcatggtgacccacatcaaggcccccgagcagcaggtgaagaacatcctgaacgagctgttccagagagagaacagagtgctgcactactggaccatgagaaagagaagactggaccagtgccagcagtacgtggtgttcgagagaagcgccaagcaggccctggagtggatccacgacaacggcgagttctacctgagcacccacaccagcaccggcagcagcatccagcacacccaggagctgctgaaggagcacgaggagttccagatcaccgccaagcagaccaaggagagagtgaagctgctgatccagctggccgacggcttctgcgagaagggccacgcccacgccgccgagatcaagaagtgcgtgaccgccgtggacaagagatacagagacttcagcctgagaatggagaagtacagaaccagcctggagaaggccctgggcatcagcagcgacagcaacaagagcagcaagagcctgcagctggacatcatccccgccagcatccccggcagcgaggtgaagctgagagacgccgcccacgagctgaacgaggagaagagaaagagcgccagaagaaaggagttcatcatggccgagctgatccagaccgagaaggcctacgtgagagacctgagagagtgcatggacacctacctgtgggagatgaccagcggcgtggaggagatcccccccggcatcgtgaacaaggagctgatcatcttcggcaacatgcaggagatctacgagttccacaacaacatcttcctgaaggagctggagaagtacgagcagctgcccgaggacgtgggccactgcttcgtgacctgggccgacaagttccagatgtacgtgacctactgcaagaacaagcccgacagcacccagctgatcctggagcacgccggcagctacttcgacgagatccagcagagacacggcctggccaacagcatcagcagctacctgatcaagcccgtgcagagaatcaccaagtaccagctgctgctgaaggagctgctgacctgctgcgaggagggcaagggcgagatcaaggacggcctggaggtgatgctgagcgtgcccaagagagccaacgacgccatgcacctgagcatgctggagggcttcgacgagaacatcgagagccagggcgagctgatcctgcaggagagcttccaggtgtgggaccccaagaccctgatcagaaagggcagagagagacacctgttcctgttcgagatgagcctggtgttcagcaaggaggtgaaggacagcagcggcagaagcaagtacctgtacaagagcaagctgttcaccagcgagctgggcgtgaccgagcacgtggagggcgacccctgcaagttcgccctgtgggtgggcagaacccccaccagcgacaacaagatcgtgctgaaggccagcagcatcgagaacaagcaggactggatcaagcacatcagagaggtgatccaggagagaaccatccacctgaagggcgccctgaaggagcccatccacatccccaagaccgcccccgccaccagacagaagggcagaagagacggcgaggacctggacagccagggcgacggcagcagccagcccgacaccatcagcatcgccagcagaaccagccagaacaccctggacagcgacaagctgagcggcggctgcgagctgaccgtggtgatccacgacttcaccgcctgcaacagcaacgagctgaccatcagaagaggccagaccgtggaggtgctggagagaccccacgacaagcccgactggtgcctggtgagaaccaccgacagaagccccgccgccgagggcctggtgccctgcggcagcctgtgcatcgcccacagcagaagcagcatggagatggagggcatcttcaaccacaaggacagcctgagcgtgagcagcaacgacgccagcccccccgccagcgtggccagcctgcagccccacatgatcggcgcccagagcagccccggccccaagagacccggcaacaccctgagaaagtggctgaccagccccgtgagaagactgagcagcggcaaggccgacggccacgtgaagaagctggcccacaagcacaagaagagcagagaggtgagaaagagcgccgacgccggcagccagaaggacagcgacgacagcgccgccaccccccaggacgagaccgtggaggagagaggcagaaacgagggcctgagcagcggcaccctgagcaagagcagcagcagcggcatgcagagctgcggcgaggaggagggcgaggagggcgccgacgccgtgcccctgcccccccccatggccatccagcagcacagcctgctgcagcccgacagccaggacgacaaggccagcagcagactgctggtgagacccaccagcagcgagacccccagcgccgccgagctggtgagcgccatcgaggagctggtgaagagcaagatggccctggaggacagacccagcagcctgctggtggaccagggcgacagcagcagccccagcttcaaccccagcgacaacagcctgctgagcagcagcagccccatcgacgagatggaggagagaaagagcagcagcctgaagagaagacactacgtgctgcaggagctggtggagaccgagagagactacgtgagagacctgggctacgtggtggagggctacatggccctgatgaaggaggacggcgtgcccgacgacatgaagggcaaggacaagatcgtgttcggcaacatccaccagatctacgactggcacagagacttcttcctgggcgagctggagaagtgcctggaggaccccgagaagctgggcagcctgttcgtgaagcacgagagaagactgcacatgtacatcgcctactgccagaacaagcccaagagcgagcacatcgtgagcgagtacatcgacaccttcttcgaggacctgaagcagagactgggccacagactgcagctgaccgacctgctgatcaagcccgtgcagagaatcatgaagtaccagctgctgctgaaggacttcctgaagtacagcaagaaggccagcctggacaccagcgagctggagagagccgtggaggtgatgtgcatcgtgcccagaagatgcaacgacatgatgaacgtgggcagactgcagggcttcgacggcaagatcgtggcccagggcaagctgctgctgcaggacaccttcctggtgaccgaccaggacgccggcctgctgcccagatgcagagagagaagaatcttcctgttcgagcagatcgtgatcttcagcgagcccctggacaagaagaagggcttcagcatgcccggcttcctgttcaagaacagcatcaaggtgagctgcctgtgcctggaggagaacgtggagaacgacccctgcaagttcgccctgaccagcagaaccggcgacgtggtggagaccttcatcctgcacagcagcagccccagcgtgagacagacctggatccacgagatcaaccagatcctggagaaccagagaaacttcctgaacgccctgaccagccccatcgagtaccagagaaaccacagcggcggcggcggcggcggcggcagcggcggcagcggcggcggcggcggcagcggcggcggcggcgcccccagcggcggcagcggccacagcggcggccccagcagctgcggcggcgcccccagcaccagcagaagcagacccagcagaatcccccagcccgtgagacaccacccccccgtgctggtgagcagcgccgccagcagccaggccgaggccgacaagatgagcggcaccagcacccccggccccagcctgcccccccccggcgccgcccccgaggccggccccagcgcccccagcagaagaccccccggcgccgacgccgagggcagcgagagagaggccgagcccatccccaagatgaaggtgctggagagccccagaaagggcgccgccaacgccagcggcagcagccccgacgcccccgccaaggacgccagagccagcctgggcaccctgcccctgggcaagcccagagccggcgccgccagccccctgaacagccccctgagcagcgccgtgcccagcctgggcaaggagcccttcccccccagcagccccctgcagaagggcggcagcttctggagcagcatccccgccagccccgccagcagacccggcagcttcaccttccccggcgacagcgacagcctgcagagacagacccccagacacgccgcccccggcaaggacaccgacagaatgagcacctgcagcagcgccagcgagcagagcgtgcagagcacccagagcaacggcagcgagagcagcagcagcagcaacatcagcaccatgctggtgacccacgactacaccgccgtgaaggaggacgagatcaacgtgtaccagggcgaggtggtgcagatcctggccagcaaccagcagaacatgttcctggtgttcagagccgccaccgaccagtgccccgccgccgagggctggatccccggcttcgtgctgggccacaccagcgccgtgatcgtggagaaccccgacggcaccctgaagaagagcaccagctggcacaccgccctgagactgagaaagaagagcgagaagaaggacaaggacggcaagagagagggcaagctggagaacggctacagaaagagcagagagggcctgagcaacaaggtgagcgtgaagctgctgaaccccaactacatctacgacgtgccccccgagttcgtgatccccctgagcgaggtgacctgcgagaccggcgagaccgtggtgctgagatgcagagtgtgcggcagacccaaggccagcatcacctggaagggccccgagcacaacaccctgaacaacgacggccactacagcatcagctacagcgacctgggcgaggccaccctgaagatcgtgggcgtgaccaccgaggacgacggcatctacacctgcatcgccgtgaacgacatgggcagcgccagcagcagcgccagcctgagagtgctgggccccggcatggacggcatcatggtgacctggaaggacaacttcgacagcttctacagcgaggtggccgagctgggcagaggcagattcagcgtggtgaagaagtgcgaccagaagggcaccaagagagccgtggccaccaagttcgtgaacaagaagctgatgaagagagaccaggtgacccacgagctgggcatcctgcagagcctgcagcaccccctgctggtgggcctgctggacaccttcgagacccccaccagctacatcctggtgctggagatggccgaccagggcagactgctggactgcgtggtgagatggggcagcctgaccgagggcaagatcagagcccacctgggcgaggtgctggaggccgtgagatacctgcacaactgcagaatcgcccacctggacctgaagcccgagaacatcctggtggacgagagcctggccaagcccaccatcaagctggccgacttcggcgacgccgtgcagctgaacaccacctactacatccaccagctgctgggcaaccccgagttcgccgcccccgagatcatcctgggcaaccccgtgagcctgaccagcgacacctggagcgtgggcgtgctgacctacgtgctgctgagcggcgtgagccccttcctggacgacagcgtggaggagacctgcctgaacatctgcagactggacttcagcttccccgacgactacttcaagggcgtgagccagaaggccaaggagttcgtgtgcttcctgctgcaggaggaccccgccaagagacccagcgccgccctggccctgcaggagcagtggctgcaggccggcaacggcagaagcaccggcgtgctggacaccagcagactgaccagcttcatcgagagaagaaagcaccagaacgacgtgagacccatcagaagcatcaagaacttcctgcagagcagactgctgcccagagtgtag

SEQ ID NO: 170425 - DNA, 7503 bp, Artificial Sequence
  derived and/or modified sequence
atgctggacagactgcacagcaccagacagcacctgcaccagatgtggcacgtgagaaagctgaagctggaccagtgcttccagctgagactgttcgagcaggacgccgagaagatgttcgactggatcacccacaacaagggcctgttcctgaacagctacaccgagatcggcaccagccacccccacgccatggagctgcagacccagcacaaccacttcgccatgaactgcatgaacgtgtacgtgaacatcaacagaatcatgagcgtggccaacagactggtggagagcggccactacgccagccagcagatcagacagatcgccagccagctggagcaggagtggaaggccttcgccgccgccctggacgagagaagcaccctgctggacatgagcagcatcttccaccagaaggccgagaagtacatgagcaacgtggacagctggtgcaaggcctgcggcgaggtggacctgcccagcgagctgcaggacctggaggacgccatccaccaccaccagggcatctacgagcacatcaccctggcctacagcgaggtgagccaggacggcaagagcctgctggacaagctgcagagacccctgacccccggcagcagcgacagcctgaccgccagcgccaactacagcaaggccgtgcaccacgtgctggacgtgatccacgaggtgctgcaccaccagagacagctggagaacatctggcagcacagaaaggtgagactgcaccagagactgcagctgtgcgtgttccagcaggacgtgcagcaggtgctggactggatcgagaaccacggcgaggccttcctgagcaagcacaccggcgtgggcaagagcctgcacagagccagagccctgcagaagagacacgaggacttcgaggaggtggcccagaacacctacaccaacgccgacaagctgctggaggccgccgagcagctggcccagaccggcgagtgcgaccccgaggagatctaccaggccgcccaccagctggaggacagaatccaggacttcgtgagaagagtggagcagagaaagatcctgctggacatgagcgtgagcttccacacccacgtgaaggagctgtggacctggctggaggagctgcagaaggagctgctggacgacgtgtacgccgagagcgtggaggccgtgcaggacctgatcaagagattcggccagcagcagcagaccaccctgcaggtgaccgtgaacgtgatcaaggagggcgaggacctgatccagcagctgagagacagcgccatcagcagcaacaagaccccccacaacagcagcatcaaccacatcgagaccgtgctgcagcagctggacgaggcccagagccagatggaggagctgttccaggagagaaagatcaagctggagctgttcctgcagctgagaatcttcgagagagacgccatcgacatcatcagcgacctggagagctggaacgacgagctgagccagcagatgaacgacttcgacaccgaggacctgaccatcgccgagcagagactgcagcaccacgccgacaaggccctgaccatgaacaacctgaccttcgacgtgatccaccagggccaggacctgctgcagtacgtgaacgaggtgcaggccagcggcgtggagctgctgtgcgacagagacgtggacatggccaccagagtgcaggacctgctggagttcctgcacgagaagcagcaggagctggacctggccgccgagcagcacagaaagcacctggagcagtgcgtgcagctgagacacctgcaggccgaggtgaagcaggtgctgggctggatcagaaacggcgagagcatgctgaacgccggcctgatcaccgccagcagcctgcaggaggccgagcagctgcagagagagcacgagcagttccagcacgccatcgagaagacccaccagagcgccctgcaggtgcagcagaaggccgaggccatgctgcaggccaaccactacgacatggacatgatcagagactgcgccgagaaggtggccagccactggcagcagctgatgctgaagatggaggacagactgaagctggtgaacgccagcgtggccttctacaagaccagcgagcaggtgtgcagcgtgctggagagcctggagcaggagtacaagagagaggaggactggtgcggcggcgccgacaagctgggccccaacagcgagaccgaccacgtgacccccatgatcagcaagcacctggagcagaaggaggccttcctgaaggcctgcaccctggccagaagaaacgccgacgtgttcctgaagtacctgcacagaaacagcgtgaacatgcccggcatggtgacccacatcaaggcccccgagcagcaggtgaagaacatcctgaacgagctgttccagagagagaacagagtgctgcactactggaccatgagaaagagaagactggaccagtgccagcagtacgtggtgttcgagagaagcgccaagcaggccctggagtggatccacgacaacggcgagttctacctgagcacccacaccagcaccggcagcagcatccagcacacccaggagctgctgaaggagcacgaggagttccagatcaccgccaagcagaccaaggagagagtgaagctgctgatccagctggccgacggcttctgcgagaagggccacgcccacgccgccgagatcaagaagtgcgtgaccgccgtggacaagagatacagagacttcagcctgagaatggagaagtacagaaccagcctggagaaggccctgggcatcagcagcgacagcaacaagagcagcaagagcctgcagctggacatcatccccgccagcatccccggcagcgaggtgaagctgagagacgccgcccacgagctgaacgaggagaagagaaagagcgccagaagaaaggagttcatcatggccgagctgatccagaccgagaaggcctacgtgagagacctgagagagtgcatggacacctacctgtgggagatgaccagcggcgtggaggagatcccccccggcatcgtgaacaaggagctgatcatcttcggcaacatgcaggagatctacgagttccacaacaacatcttcctgaaggagctggagaagtacgagcagctgcccgaggacgtgggccactgcttcgtgacctgggccgacaagttccagatgtacgtgacctactgcaagaacaagcccgacagcacccagctgatcctggagcacgccggcagctacttcgacgagatccagcagagacacggcctggccaacagcatcagcagctacctgatcaagcccgtgcagagaatcaccaagtaccagctgctgctgaaggagctgctgacctgctgcgaggagggcaagggcgagatcaaggacggcctggaggtgatgctgagcgtgcccaagagagccaacgacgccatgcacctgagcatgctggagggcttcgacgagaacatcgagagccagggcgagctgatcctgcaggagagcttccaggtgtgggaccccaagaccctgatcagaaagggcagagagagacacctgttcctgttcgagatgagcctggtgttcagcaaggaggtgaaggacagcagcggcagaagcaagtacctgtacaagagcaagctgttcaccagcgagctgggcgtgaccgagcacgtggagggcgacccctgcaagttcgccctgtgggtgggcagaacccccaccagcgacaacaagatcgtgctgaaggccagcagcatcgagaacaagcaggactggatcaagcacatcagagaggtgatccaggagagaaccatccacctgaagggcgccctgaaggagcccatccacatccccaagaccgcccccgccaccagacagaagggcagaagagacggcgaggacctggacagccagggcgacggcagcagccagcccgacaccatcagcatcgccagcagaaccagccagaacaccctggacagcgacaagctgagcggcggctgcgagctgaccgtggtgatccacgacttcaccgcctgcaacagcaacgagctgaccatcagaagaggccagaccgtggaggtgctggagagaccccacgacaagcccgactggtgcctggtgagaaccaccgacagaagccccgccgccgagggcctggtgccctgcggcagcctgtgcatcgcccacagcagaagcagcatggagatggagggcatcttcaaccacaaggacagcctgagcgtgagcagcaacgacgccagcccccccgccagcgtggccagcctgcagccccacatgatcggcgcccagagcagccccggccccaagagacccggcaacaccctgagaaagtggctgaccagccccgtgagaagactgagcagcggcaaggccgacggccacgtgaagaagctggcccacaagcacaagaagagcagagaggtgagaaagagcgccgacgccggcagccagaaggacagcgacgacagcgccgccaccccccaggacgagaccgtggaggagagaggcagaaacgagggcctgagcagcggcaccctgagcaagagcagcagcagcggcatgcagagctgcggcgaggaggagggcgaggagggcgccgacgccgtgcccctgcccccccccatggccatccagcagcacagcctgctgcagcccgacagccaggacgacaaggccagcagcagactgctggtgagacccaccagcagcgagacccccagcgccgccgagctggtgagcgccatcgaggagctggtgaagagcaagatggccctggaggacagacccagcagcctgctggtggaccagggcgacagcagcagccccagcttcaaccccagcgacaacagcctgctgagcagcagcagccccatcgacgagatggaggagagaaagagcagcagcctgaagagaagacactacgtgctgcaggagctggtggagaccgagagagactacgtgagagacctgggctacgtggtggagggctacatggccctgatgaaggaggacggcgtgcccgacgacatgaagggcaaggacaagatcgtgttcggcaacatccaccagatctacgactggcacagagacttcttcctgggcgagctggagaagtgcctggaggaccccgagaagctgggcagcctgttcgtgaagcacgagagaagactgcacatgtacatcgcctactgccagaacaagcccaagagcgagcacatcgtgagcgagtacatcgacaccttcttcgaggacctgaagcagagactgggccacagactgcagctgaccgacctgctgatcaagcccgtgcagagaatcatgaagtaccagctgctgctgaaggacttcctgaagtacagcaagaaggccagcctggacaccagcgagctggagagagccgtggaggtgatgtgcatcgtgcccagaagatgcaacgacatgatgaacgtgggcagactgcagggcttcgacggcaagatcgtggcccagggcaagctgctgctgcaggacaccttcctggtgaccgaccaggacgccggcctgctgcccagatgcagagagagaagaatcttcctgttcgagcagatcgtgatcttcagcgagcccctggacaagaagaagggcttcagcatgcccggcttcctgttcaagaacagcatcaaggtgagctgcctgtgcctggaggagaacgtggagaacgacccctgcaagttcgccctgaccagcagaaccggcgacgtggtggagaccttcatcctgcacagcagcagccccagcgtgagacagacctggatccacgagatcaaccagatcctggagaaccagagaaacttcctgaacgccctgaccagccccatcgagtaccagagaaaccacagcggcggcggcggcggcggcggcagcggcggcagcggcggcggcggcggcagcggcggcggcggcgcccccagcggcggcagcggccacagcggcggccccagcagctgcggcggcgcccccagcaccagcagaagcagacccagcagaatcccccagcccgtgagacaccacccccccgtgctggtgagcagcgccgccagcagccaggccgaggccgacaagatgagcggcaccagcacccccggccccagcctgcccccccccggcgccgcccccgaggccggccccagcgcccccagcagaagaccccccggcgccgacgccgagggcagcgagagagaggccgagcccatccccaagatgaaggtgctggagagccccagaaagggcgccgccaacgccagcggcagcagccccgacgcccccgccaaggacgccagagccagcctgggcaccctgcccctgggcaagcccagagccggcgccgccagccccctgaacagccccctgagcagcgccgtgcccagcctgggcaaggagcccttcccccccagcagccccctgcagaagggcggcagcttctggagcagcatccccgccagccccgccagcagacccggcagcttcaccttccccggcgacagcgacagcctgcagagacagacccccagacacgccgcccccggcaaggacaccgacagaatgagcacctgcagcagcgccagcgagcagagcgtgcagagcacccagagcaacggcagcgagagcagcagcagcagcaacatcagcaccatgctggtgacccacgactacaccgccgtgaaggaggacgagatcaacgtgtaccagggcgaggtggtgcagatcctggccagcaaccagcagaacatgttcctggtgttcagagccgccaccgaccagtgccccgccgccgagggctggatccccggcttcgtgctgggccacaccagcgccgtgatcgtggagaaccccgacggcaccctgaagaagagcaccagctggcacaccgccctgagactgagaaagaagagcgagaagaaggacaaggacggcaagagagagggcaagctggagaacggctacagaaagagcagagagggcctgagcaacaaggtgagcgtgaagctgctgaaccccaactacatctacgacgtgccccccgagttcgtgatccccctgagcgaggtgacctgcgagaccggcgagaccgtggtgctgagatgcagagtgtgcggcagacccaaggccagcatcacctggaagggccccgagcacaacaccctgaacaacgacggccactacagcatcagctacagcgacctgggcgaggccaccctgaagatcgtgggcgtgaccaccgaggacgacggcatctacacctgcatcgccgtgaacgacatgggcagcgccagcagcagcgccagcctgagagtgctgggccccggcatggacggcatcatggtgacctggaaggacaacttcgacagcttctacagcgaggtggccgagctgggcagagccaactggaacaactggagcccctactag

SEQ ID NO: 170426 - DNA, 8766 bp, Artificial Sequence
  derived and/or modified sequence
atgagcggcagcagcggcggcgccgccgcccccgccgccagcagcggccccgccgccgccgccagcgccgccggcagcggctgcggcggcggcgccggcgagggcgccgaggaggccgccaaggacctggccgacatcgccgccttcttcagaagcggcttcagaaagaacgacgagatgaaggccatggacgtgctgcccatcctgaaggagaaggtggcctacctgagcggcggcagagacaagagaggcggccccatcctgaccttccccgccagaagcaaccacgacagaatcagacaggaggacctgagaagactgatcagctacctggcctgcatccccagcgaggaggtgtgcaagagaggcttcaccgtgatcgtggacatgagaggcagcaagtgggacagcatcaagcccctgctgaagatcctgcaggagagcttcccctgctgcatccacgtggccctgatcatcaagcccgacaacttctggcagaagcagagaaccaacttcggcagcagcaagttcgagttcgagaccaacatggtgagcctggagggcctgaccaaggtggtggaccccagccagctgacccccgagttcgacggctgcctggagtacaaccacgaggagtggatcgagatcagagtggccttcgaggactacatcagcaacgccacccacatgctgagcagactggaggagctgcaggacatcctggccaagaaggagctgccccaggacctggagggcgccagaaacatgatcgaggagcacagccagctgaagaagaaggtgatcaaggcccccatcgaggacctggacctggagggccagaagctgctgcagagaatccagagcagcgagagcttccccaagaagaacagcggcagcggcaacgccgacctgcagaacctgctgcccaaggtgagcaccatgctggacagactgcacagcaccagacagcacctgcaccagatgtggcacgtgagaaagctgaagctggaccagtgcttccagctgagactgttcgagcaggacgccgagaagatgttcgactggatcacccacaacaagggcctgttcctgaacagctacaccgagatcggcaccagccacccccacgccatggagctgcagacccagcacaaccacttcgccatgaactgcatgaacgtgtacgtgaacatcaacagaatcatgagcgtggccaacagactggtggagagcggccactacgccagccagcagatcagacagatcgccagccagctggagcaggagtggaaggccttcgccgccgccctggacgagagaagcaccctgctggacatgagcagcatcttccaccagaaggccgagaagtacatgagcaacgtggacagctggtgcaaggcctgcggcgaggtggacctgcccagcgagctgcaggacctggaggacgccatccaccaccaccagggcatctacgagcacatcaccctggcctacagcgaggtgagccaggacggcaagagcctgctggacaagctgcagagacccctgacccccggcagcagcgacagcctgaccgccagcgccaactacagcaaggccgtgcaccacgtgctggacgtgatccacgaggtgctgcaccaccagagacagctggagaacatctggcagcacagaaaggtgagactgcaccagagactgcagctgtgcgtgttccagcaggacgtgcagcaggtgctggactggatcgagaaccacggcgaggccttcctgagcaagcacaccggcgtgggcaagagcctgcacagagccagagccctgcagaagagacacgaggacttcgaggaggtggcccagaacacctacaccaacgccgacaagctgctggaggccgccgagcagctggcccagaccggcgagtgcgaccccgaggagatctaccaggccgcccaccagctggaggacagaatccaggacttcgtgagaagagtggagcagagaaagatcctgctggacatgagcgtgagcttccacacccacgtgaaggagctgtggacctggctggaggagctgcagaaggagctgctggacgacgtgtacgccgagagcgtggaggccgtgcaggacctgatcaagagattcggccagcagcagcagaccaccctgcaggtgaccgtgaacgtgatcaaggagggcgaggacctgatccagcagctgagagacagcgccatcagcagcaacaagaccccccacaacagcagcatcaaccacatcgagaccgtgctgcagcagctggacgaggcccagagccagatggaggagctgttccaggagagaaagatcaagctggagctgttcctgcagctgagaatcttcgagagagacgccatcgacatcatcagcgacctggagagctggaacgacgagctgagccagcagatgaacgacttcgacaccgaggacctgaccatcgccgagcagagactgcagcaccacgccgacaaggccctgaccatgaacaacctgaccttcgacgtgatccaccagggccaggacctgctgcagtacgtgaacgaggtgcaggccagcggcgtggagctgctgtgcgacagagacgtggacatggccaccagagtgcaggacctgctggagttcctgcacgagaagcagcaggagctggacctggccgccgagcagcacagaaagcacctggagcagtgcgtgcagctgagacacctgcaggccgaggtgaagcaggtgctgggctggatcagaaacggcgagagcatgctgaacgccggcctgatcaccgccagcagcctgcaggaggccgagcagctgcagagagagcacgagcagttccagcacgccatcgagaagacccaccagagcgccctgcaggtgcagcagaaggccgaggccatgctgcaggccaaccactacgacatggacatgatcagagactgcgccgagaaggtggccagccactggcagcagctgatgctgaagatggaggacagactgaagctggtgaacgccagcgtggccttctacaagaccagcgagcaggtgtgcagcgtgctggagagcctggagcaggagtacaagagagaggaggactggtgcggcggcgccgacaagctgggccccaacagcgagaccgaccacgtgacccccatgatcagcaagcacctggagcagaaggaggccttcctgaaggcctgcaccctggccagaagaaacgccgacgtgttcctgaagtacctgcacagaaacagcgtgaacatgcccggcatggtgacccacatcaaggcccccgagcagcaggtgaagaacatcctgaacgagctgttccagagagagaacagagtgctgcactactggaccatgagaaagagaagactggaccagtgccagcagtacgtggtgttcgagagaagcgccaagcaggccctggagtggatccacgacaacggcgagttctacctgagcacccacaccagcaccggcagcagcatccagcacacccaggagctgctgaaggagcacgaggagttccagatcaccgccaagcagaccaaggagagagtgaagctgctgatccagctggccgacggcttctgcgagaagggccacgcccacgccgccgagatcaagaagtgcgtgaccgccgtggacaagagatacagagacttcagcctgagaatggagaagtacagaaccagcctggagaaggccctgggcatcagcagcgacagcaacaagagcagcaagagcctgcagctggacatcatccccgccagcatccccggcagcgaggtgaagctgagagacgccgcccacgagctgaacgaggagaagagaaagagcgccagaagaaaggagttcatcatggccgagctgatccagaccgagaaggcctacgtgagagacctgagagagtgcatggacacctacctgtgggagatgaccagcggcgtggaggagatcccccccggcatcgtgaacaaggagctgatcatcttcggcaacatgcaggagatctacgagttccacaacaacatcttcctgaaggagctggagaagtacgagcagctgcccgaggacgtgggccactgcttcgtgacctgggccgacaagttccagatgtacgtgacctactgcaagaacaagcccgacagcacccagctgatcctggagcacgccggcagctacttcgacgagatccagcagagacacggcctggccaacagcatcagcagctacctgatcaagcccgtgcagagaatcaccaagtaccagctgctgctgaaggagctgctgacctgctgcgaggagggcaagggcgagatcaaggacggcctggaggtgatgctgagcgtgcccaagagagccaacgacgccatgcacctgagcatgctggagggcttcgacgagaacatcgagagccagggcgagctgatcctgcaggagagcttccaggtgtgggaccccaagaccctgatcagaaagggcagagagagacacctgttcctgttcgagatgagcctggtgttcagcaaggaggtgaaggacagcagcggcagaagcaagtacctgtacaagagcaagctgttcaccagcgagctgggcgtgaccgagcacgtggagggcgacccctgcaagttcgccctgtgggtgggcagaacccccaccagcgacaacaagatcgtgctgaaggccagcagcatcgagaacaagcaggactggatcaagcacatcagagaggtgatccaggagagaaccatccacctgaagggcgccctgaaggagcccatccacatccccaagaccgcccccgccaccagacagaagggcagaagagacggcgaggacctggacagccagggcgacggcagcagccagcccgacaccatcagcatcgccagcagaaccagccagaacaccctggacagcgacaagctgagcggcggctgcgagctgaccgtggtgatccacgacttcaccgcctgcaacagcaacgagctgaccatcagaagaggccagaccgtggaggtgctggagagaccccacgacaagcccgactggtgcctggtgagaaccaccgacagaagccccgccgccgagggcctggtgccctgcggcagcctgtgcatcgcccacagcagaagcagcatggagatggagggcatcttcaaccacaaggacagcctgagcgtgagcagcaacgacgccagcccccccgccagcgtggccagcctgcagccccacatgatcggcgcccagagcagccccggccccaagagacccggcaacaccctgagaaagtggctgaccagccccgtgagaagactgagcagcggcaaggccgacggccacgtgaagaagctggcccacaagcacaagaagagcagagaggtgagaaagagcgccgacgccggcagccagaaggacagcgacgacagcgccgccaccccccaggacgagaccgtggaggagagaggcagaaacgagggcctgagcagcggcaccctgagcaagagcagcagcagcggcatgcagagctgcggcgaggaggagggcgaggagggcgccgacgccgtgcccctgcccccccccatggccatccagcagcacagcctgctgcagcccgacagccaggacgacaaggccagcagcagactgctggtgagacccaccagcagcgagacccccagcgccgccgagctggtgagcgccatcgaggagctggtgaagagcaagatggccctggaggacagacccagcagcctgctggtggaccagggcgacagcagcagccccagcttcaaccccagcgacaacagcctgctgagcagcagcagccccatcgacgagatggaggagagaaagagcagcagcctgaagagaagacactacgtgctgcaggagctggtggagaccgagagagactacgtgagagacctgggctacgtggtggagggctacatggccctgatgaaggaggacggcgtgcccgacgacatgaagggcaaggacaagatcgtgttcggcaacatccaccagatctacgactggcacagagacttcttcctgggcgagctggagaagtgcctggaggaccccgagaagctgggcagcctgttcgtgaagcacgagagaagactgcacatgtacatcgcctactgccagaacaagcccaagagcgagcacatcgtgagcgagtacatcgacaccttcttcgaggacctgaagcagagactgggccacagactgcagctgaccgacctgctgatcaagcccgtgcagagaatcatgaagtaccagctgctgctgaaggacttcctgaagtacagcaagaaggccagcctggacaccagcgagctggagagagccgtggaggtgatgtgcatcgtgcccagaagatgcaacgacatgatgaacgtgggcagactgcagggcttcgacggcaagatcgtggcccagggcaagctgctgctgcaggacaccttcctggtgaccgaccaggacgccggcctgctgcccagatgcagagagagaagaatcttcctgttcgagcagatcgtgatcttcagcgagcccctggacaagaagaagggcttcagcatgcccggcttcctgttcaagaacagcatcaaggtgagctgcctgtgcctggaggagaacgtggagaacgacccctgcaagttcgccctgaccagcagaaccggcgacgtggtggagaccttcatcctgcacagcagcagccccagcgtgagacagacctggatccacgagatcaaccagatcctggagaaccagagaaacttcctgaacgccctgaccagccccatcgagtaccagagaaaccacagcggcggcggcggcggcggcggcagcggcggcagcggcggcggcggcggcagcggcggcggcggcgcccccagcggcggcagcggccacagcggcggccccagcagctgcggcggcgcccccagcaccagcagaagcagacccagcagaatcccccagcccgtgagacaccacccccccgtgctggtgagcagcgccgccagcagccaggccgaggccgacaagatgagcgagagcgagagcagcagcagcagcaacatcagcaccatgctggtgacccacgactacaccgccgtgaaggaggacgagatcaacgtgtaccagggcgaggtggtgcagatcctggccagcaaccagcagaacatgttcctggtgttcagagccgccaccgaccagtgccccgccgccgagggctggatccccggcttcgtgctgggccacaccagcgccgtgatcgtggagaaccccgacggcaccctgaagaagagcaccagctggcacaccgccctgagactgagaaagaagagcgagaagaaggacaaggacggcaagagagagggcaagctggagaacggctacagaaagagcagagagggcctgagcaacaaggtgagcgtgaagctgctgaaccccaactacatctacgacgtgccccccgagttcgtgatccccctgagcgaggtgacctgcgagaccggcgagaccgtggtgctgagatgcagagtgtgcggcagacccaaggccagcatcacctggaagggccccgagcacaacaccctgaacaacgacggccactacagcatcagctacagcgacctgggcgaggccaccctgaagatcgtgggcgtgaccaccgaggacgacggcatctacacctgcatcgccgtgaacgacatgggcagcgccagcagcagcgccagcctgagagtgctgggccccggcatggacggcatcatggtgacctggaaggacaacttcgacagcttctacagcgaggtggccgagctgggcagaggcagattcagcgtggtgaagaagtgcgaccagaagggcaccaagagagccgtggccaccaagttcgtgaacaagaagctgatgaagagagaccaggtgacccacgagctgggcatcctgcagagcctgcagcaccccctgctggtgggcctgctggacaccttcgagacccccaccagctacatcctggtgctggagatggccgaccagggcagactgctggactgcgtggtgagatggggcagcctgaccgagggcaagatcagagcccacctgggcgaggtgctggaggccgtgagatacctgcacaactgcagaatcgcccacctggacctgaagcccgagaacatcctggtggacgagagcctggccaagcccaccatcaagctggccgacttcggcgacgccgtgcagctgaacaccacctactacatccaccagctgctgggcaaccccgagttcgccgcccccgagatcatcctgggcaaccccgtgagcctgaccagcgacacctggagcgtgggcgtgctgacctacgtgctgctgagcggcgtgagccccttcctggacgacagcgtggaggagacctgcctgaacatctgcagactggacttcagcttccccgacgactacttcaagggcgtgagccagaaggccaaggagttcgtgtgcttcctgctgcaggaggaccccgccaagagacccagcgccgccctggccctgcaggagcagtggctgcaggccggcaacggcagaagcaccggcgtgctggacaccagcagactgaccagcttcatcgagagaagaaagcaccagaacgacgtgagacccatcagaagcatcaagaacttcctgcagagcagactgctgcccagagtgtag

SEQ ID NO: 170427 - DNA, 1791 bp, Artificial Sequence
  derived and/or modified sequence
atgctgccttctcaggctcagggacttctttggtgggtctttcccctgttccctgcatcttctctctcttacccccccgtgtcctatagagctgacggcctggccagaaataccttcctgaaggcatgcagtgaatcctctagttcatctaatatctccactatgctggtgacacatgattatactgctgtgaaagaggacgaaataaacgtctaccagggcgaagtggtgcagattctcgccagtaatcaacagaacatgttcctcgtcttccgcgccgctacagaccagtgtcctgccgctgagggctggatccctggctttgtcttggggcatacttcagccgtgatcgtggagaacccagacgggacgcttaagaaatccacaagctggcacaccgccctaagactccggaagaaatcagaaaagaaggataaagacgggaagcgggagggaaagctggagaatggctatagaaaatcacgcgagggattgagcaataaagtctctgtgaagctgctcaaccctaattatatctacgacgttccaccggaattcgttataccattgtcggaggtgacttgtgaaactggggagaccgtagtcctgaggtgtcgggtgtgcggccgtccaaaggcttcaattacctggaaaggccctgagcataatactctcaacaacgacggtcattacagtatttcctactcagatttaggtgaggccactctgaagattgtcggcgtcactactgaggatgacgggatttatacttgtattgcggttaatgatatgggaagcgctagcagctctgcctccctgcgcgtgctcggacctggcatggatggcatcatggtgacctggaaggataactttgactcgttctactctgaggtggccgaactgggtcgcggtagattcagtgttgtgaagaagtgtgaccagaaaggaacgaagagagccgtagccaccaagtttgtgaataaaaagctgatgaagagggatcaggtgactcatgagctgggaatccttcagagtcttcagcaccctctgctagtcggattgctggatacatttgagacgccaacaagctatattctcgtgctagagatggccgaccaggggcgactgttggattgcgtggtgcgatggggctctttaacggagggaaagatccgggcacatttgggtgaggtgctagaggcagtgcggtacctgcataactgcagaatagctcacctagatctgaagccggaaaatatcctagtggatgagtcgctggccaaaccaactatcaaactagcagattttggggatgccgtgcagctgaacactacatattatatccaccagctgctcggcaacccggagttcgctgcacctgaaattatcctggggaatcccgtatccctgacatcagacacatggtccgtgggagtactgacatatgtgttactttctggtgtgtctcccttcctcgatgactccgtggaggagacatgtctgaacatctgccgcctagatttctcatttcccgatgattacttcaagggcgtaagccagaaagcaaaggagttcgtgtgcttcctgctgcaggaagatccagccaagagacccagcgctgccctcgccctgcaagaacaatggcttcaggcggggaatggtaggtctaccggcgtcctggatactagccgtctgacgtcgtttattgagcgccgtaaacatcagaacgatgtgcgaccgattaggtcaatcaagaattttctgcaatctcgtctcctaccgagggtttag

SEQ ID NO: 170428 - DNA, 9294 bp, Artificial Sequence
  derived and/or modified sequence
atgtcggggtctagtggaggcgcggccgcccccgccgctagcagtggacccgctgccgcagcgtctgctgccggtagtggatgcggcgggggggctggcgaaggggcagaagaggctgcaaaggacttggccgatatcgctgccttctttcgttctgggttccgtaaaaacgatgaaatgaaagccatggatgtcctcccaatattgaaggaaaaggttgcctatctgagcggtggcagggataagcgagggggccctatccttactttccctgctaggtcaaatcacgacagaataagacaggaagacctcagaagattgatcagttatctcgcttgtatcccaagtgaagaggtatgcaaaagagggtttactgtaatcgtggatatgagagggtctaagtgggacagtatcaagcctctacttaagatcctgcaggagagcttcccctgttgtatccacgtcgccttgatcattaagcccgacaatttctggcagaagcagcgtaccaacttcggttcctcaaaattcgagttcgaaacaaacatggtgtccctcgagggactgaccaaggtggtggatccgagccaattgactcctgaatttgacggctgtctggagtataatcatgaagagtggattgagatacgggtcgcattcgaagactacatcagcaatgctacccatatgcttagccgcctggaagagttgcaagacattctcgccaaaaaggaactcccgcaggacctagaaggagctaggaacatgatcgaggaacacagccagcttaaaaagaaagtgattaaggcccctattgaggacctcgatttggagggccagaagctgttgcagcgaattcaaagctctgaatccttccctaaaaaaaacagcggctctggaaatgccgatctgcagaatttgctcccaaaggtttccacaatgctggacagacttcacagcaccagacagcatctgcatcagatgtggcacgtgagaaaacttaagctggatcagtgtttccagctccgcctttttgaacaggacgctgaaaagatgtttgactggattacacataacaagggcttattccttaatagttatactgaaataggtacatcccacccacacgccatggagcttcagacccagcacaatcacttcgccatgaattgcatgaacgtatatgtcaatatcaaccgtattatgagcgttgcaaaccgcctcgtggagtctggacactacgcttcccagcagattcgtcagatagcatcccaactggagcaggaatggaaggcattcgcggcagctctggacgagcgcagtactctgctagatatgtccagcatatttcatcagaaagcagagaagtacatgtcaaacgttgattcctggtgcaaagcctgtggggaagtagatctcccatccgagctgcaggatctcgaggacgcaatccaccatcaccaggggatttacgagcatattaccctggcgtattcagaggtatcccaggatggaaagtccctgttagataagctgcagcgacccttgaccccaggctcctccgacagtctaactgccagcgcaaactacagcaaagcggttcaccatgttctagatgtaatccatgaggtactgcatcatcagcgccagctcgaaaatatctggcagcaccgcaaagtaagactccatcaacgccttcaattgtgtgtgtttcagcaggacgtgcaacaggtgttggactggatcgaaaaccacggggaagcttttctgagcaaacacactggagtaggtaagtccctccacagagcaagagccctgcagaaacgacacgaagactttgaagaggtggcacagaatacttacaccaacgctgataagctcctcgaggccgctgaacagcttgctcagaccggggaatgcgaccccgaagagatttaccaggctgcacaccaattggaggaccgcatacaggatttcgtgcgccgggtggagcagaggaagatacttctggatatgtcagtctcctttcatactcacgtcaaggagctctggacatggcttgaggaattgcagaaagagctgctggatgatgtctatgccgagtctgtagaggctgttcaagacttaatcaagcgctttggtcaacaacagcagaccacacttcaggtgaccgtgaatgttataaaggagggggaggacctcatccagcagttgcgggacagcgcaatctcctcgaataagaccccccataacagcagcatcaaccacattgagactgtgctgcagcagttagatgaggctcaaagccagatggaagaactgtttcaggagcgtaagatcaagcttgaactgtttctgcagctccgcatcttcgaacgcgatgcaattgacatcatctccgatttggaatcatggaacgacgaactgtctcaacagatgaatgatttcgacactgaagatttgactatcgctgaacagcgactccaacaccatgccgataaggctctcaccatgaacaatctcacgttcgacgtaattcatcaagggcaggaccttcttcagtacgtcaatgaagtgcaagcctcgggggttgagctactgtgcgaccgggatgtagatatggctacaagggttcaagacctcctggagtttttgcacgaaaagcagcaggaacttgacctagccgctgagcagcaccgaaagcatctagagcagtgcgtccaattaagacacctccaggccgaggtcaagcaggtcctaggctggatccggaatggcgagagcatgctgaatgctggactgatcacggcgagcagccttcaggaagccgagcagttgcagcgagagcacgaacagttccagcacgccatagaaaagacccaccagagcgctctccaagtgcagcagaaagccgaagccatgctacaagcaaaccattatgacatggacatgattagagactgtgctgagaaagtagctagccactggcagcagctcatgcttaagatggaagaccgcctgaagttggtgaacgctagtgtagccttttacaaaacatcagaacaggtgtgtagtgtgctcgaatcacttgagcaggaatataagcgggaggaagactggtgcggcggagccgacaagctcggccctaactctgaaactgatcacgttacaccaatgatttccaaacacctcgaacagaaggaggcctttcttaaggcctgtaccctcgcaaggcgaaatgccgatgtgttcctgaaataccttcatcggaattctgttaacatgccaggcatggtaacacatatcaaggcaccagagcaacaagtcaagaacatactgaatgagctgtttcaacgggaaaacagggtgctgcactactggactatgcggaagcgcagactggatcagtgtcaacagtacgttgtgttcgagcggagcgcaaaacaggctctcgagtggatacacgataacggggaattctatctgagcacacacacctccactgggtcatccatccagcatacccaagaactgcttaaagagcatgaagagttccagattaccgccaaacagactaaggaaagagtgaagttgctcattcagctcgcagatggcttttgtgagaaaggccacgcccacgccgccgaaatcaagaagtgcgttacagcggtcgacaagaggtaccgcgacttctctctccgcatggagaagtacaggacctctctcgaaaaagcactgggaatctcatctgattctaacaagtccagcaagagtctgcagctggatattattcctgcgagcatccctggaagtgaggtcaagctgagagacgccgctcatgagctcaacgaggagaagaggaagtccgcgcggaggaaggaatttattatggccgagcttatacagaccgagaaagcctacgtgagggatctgagagaatgcatggatacatatctctgggaaatgacatccggagtcgaggagattccccccggcattgttaacaaggagctgatcatttttggtaacatgcaggaaatttacgaattccacaataatatcttccttaaggagctggagaaatatgaacagctgccagaggatgtcggccattgcttcgtgacgtgggcagataagttccagatgtacgtcacatattgcaaaaataagcccgactctacccagctgatactcgagcatgcaggatcctatttcgacgaaattcagcagagacacggcctggccaacagtatctcctcctatctgatcaaaccagtgcagcgaattaccaagtaccagttacttctgaaagagctgcttacctgctgtgaggagggcaaaggtgagatcaaggacggtctggaggttatgctctcagtgcccaaacgtgctaacgacgctatgcacctgtcgatgctagaagggttcgacgaaaacattgagtctcagggagaactgattctacaggagtccttccaggtatgggatcccaaaaccctcatccggaagggacgtgaacgccatctatttttattcgagatgagcctggtctttagtaaggaggtcaaagacagcagcgggcgatctaaatacctttataaatccaaactgtttacctcggagctcggcgtgacagaacatgttgagggagacccctgtaagtttgccctgtgggtggggcgaaccccgacttccgacaataaaattgtgctgaaggcctcctctattgaaaacaaacaagactggattaagcacatccgcgaggttatccaggaacgcacaatccacttaaaaggcgcactcaaggaaccaatccatattcccaagaccgctcccgcaactcggcagaagggacgcagggacggggaggatctggacagtcagggcgacgggtcaagtcagccagataccatctctatcgcctctagaacatctcaaaacaccctggactccgacaaactgtcaggggggtgcgaattaaccgtggtcattcatgacttcaccgcatgcaactctaacgaactcaccatccgccgaggacagaccgtcgaggtgctggagaggccccatgacaagccagactggtgtctggtaagaactactgacagaagcccagccgcagagggactggtcccgtgtggtagtctgtgtattgcccactctaggtccagcatggaaatggagggaatcttcaaccacaaggacagtttgagcgtcagttctaacgatgctagtccaccagcctccgtggcttcattgcaaccccacatgattggtgcccagtcttcccccggcccaaaacgcccaggcaacaccctccgcaagtggctgacgtcgccagttcggaggctgagtagcgggaaggccgatggccacgtgaagaagctggcccataaacacaagaagagccgcgaggtgaggaaatctgctgacgccggttcacaaaaagatagtgacgatagcgctgccactccacaggatgagaccgtggaggagaggggtaggaatgaggggttgtcatccggcacgttgtccaaatcaagctccagcggaatgcaaagttgcggtgaggaggagggggaagagggagccgacgctgtacccctccctcctcctatggcgatccagcagcacagcctccttcaacctgattcacaagacgacaaagcaagctcccgccttcttgtgagacccacctccagcgaaactcctagcgccgctgagctggtgagtgccatagaagaattggtaaaaagcaagatggctttagaggatagaccatcttcactccttgttgatcagggagactcctcatccccctcctttaacccttctgataattcgcttctttcctcctcttccccaattgacgagatggaggaaaggaagtccagttctttgaagaggagacactacgtgctgcaggagctggttgagactgagagagattacgtgagggacctcggatacgtggtcgaagggtatatggctctgatgaaagaggacggcgtgcccgatgatatgaaagggaaagataaaatcgtttttggcaacatccatcagatctatgattggcatcgcgatttttttttgggcgagctcgagaaatgcttagaggacccggaaaagctgggatcactgttcgtgaagcacgagcggaggctgcacatgtacatcgcttactgccagaacaaacccaagagcgagcacattgtttctgaatacattgataccttcttcgaggatcttaagcaacgcttgggacatcgcttgcagctgaccgacctcctgattaaaccagtccaacgtataatgaagtaccagctcctgttaaaggattttctgaagtacagcaaaaaagcctcactggacactagtgaactagaacgtgcagtcgaggttatgtgcatcgttccacgccgatgtaacgacatgatgaatgttggacgccttcaggggttcgatggtaagatagtggcccagggaaagcttcttctgcaagatacctttctggtcactgaccaagatgctggattattgccaagatgtagagaacgacgaatatttctgttcgagcagatagtgatctttagtgagccgcttgacaagaaaaaaggtttcagcatgcccgggtttctgtttaagaactccattaaggtgagctgtctgtgtctagaggaaaacgttgagaacgacccatgtaagtttgctctgactagtagaactggcgacgtcgtggaaacgttcatactgcacagcagcagtcccagtgtccggcagacctggatccacgaaattaaccagatactagagaaccagcgaaattttttaaacgctctgacgtctcccatcgagtatcagcgtaaccatagcggggggggaggggggggaggctctggcggatctggtggcggaggtggttctggcggcggtggtgcgccgtccggcgggtccgggcacagcggaggtccatcctcctgcgggggggccccatctacctcgagatcccgcccctccaggatcccacaacccgtgcgtcatcacccacccgtcctggtgtctagcgctgcctccagtcaggcggaggccgacaaaatgtccggaacgagtacccctggcccctcactgcctcccccaggggcggcaccggaagccggacccagcgcgccgagtagacggccccccggagccgacgctgaggggagtgagcgagaggcggagcctattcctaagatgaaggtcctcgaatcgccccggaagggagccgccaatgccagcggctccagcccagacgctcccgccaaagacgccagggcctcccttgggacactgcccttgggcaaaccccgggcaggtgctgcctcaccgctgaattctcctctaagttctgccgtgccgagcctggggaaggagccattcccaccgtcgagccctcttcagaagggagggtctttttggtcctcaattcccgctagtcctgcttctcgcccaggaagttttaccttcccgggggacagtgattctttacaaaggcagactcccagacacgccgcccccggcaaagacaccgatagaatgagcacctgttcctcagctagtgagcagtccgtccaatcaacccagagtaatggaagtgaatctagcagtagtagcaacatttctacgatgttagtgacgcacgactacacggctgtgaaagaagatgaaatcaacgtctatcagggggaagtggttcagatcctggcatctaaccagcaaaatatgtttctggtgtttagggcagcaaccgaccagtgtcccgcagcagagggctggatcccaggttttgtcctcggacacacttcagctgtgatagtggaaaatccggatggtaccctgaagaaatccacgtcctggcacacggccctgaggctccgcaagaaatcagaaaagaaggacaaagatggcaagagagagggaaagctggaaaacgggtacaggaagtctagggaaggccttagtaataaagtttccgtcaagttgctgaatcccaactacatctatgacgttccacctgaatttgtgatccccctcagtgaagttacatgcgagaccggggaaactgtggtgctgcgctgtagggtgtgcggtcggccaaaggcaagcattacatggaagggtccagagcacaacacgctcaacaatgatggacactattccatctcatacagcgatctgggtgaagcaacccttaaaatcgtcggcgtgaccaccgaggatgacggaatatacacatgcatagctgttaacgatatgggaagcgcctccagttcagcgtcactccgggtcctaggcccaggtatggatggaattatggtcacctggaaggacaatttcgatagtttctattccgaggtggctgaactaggccgggggaggttctctgtggttaagaagtgtgatcagaagggtacaaagcgtgctgttgccaccaaatttgtcaataagaagctgatgaagagggaccaagtgacccatgagcttggtattctgcagtcactgcaacatccgttgctcgtgggtttattggacacattcgagactcctacctcctacatcctggttctggagatggcagatcagggtagactgttagactgcgtagtaagatggggaagtttaactgaagggaagatcagggcccacttaggtgaagtgttggaagcagtgcggtacctccataactgtcgtatcgcacacctggacctgaaaccggaaaatatcctggtcgatgagtccctggccaagccaacaattaaattggccgatttcggcgatgcagtgcaactgaataccacgtattacatacatcaactcctgggaaacccggagttcgctgcccccgaaatcatcctgggaaaccctgtcagtttgacaagtgatacctggagtgtgggagtacttacctacgtgctcctgagcggtgttagcccctttctggacgattccgtcgaagaaacttgtctaaatatttgccgtctggacttctcgttccccgatgattattttaagggagttagccagaaagccaaagagtttgtgtgtttcctgcttcaggaagaccccgctaagcgcccttcagctgcgttggcacttcaggaacagtggctacaggcgggcaatggcagatccaccggagtccttgatactagccgcctcaccagcttcattgagcggaggaaacaccagaatgacgtgcgaccgattaggtccattaaaaatttcctgcaatccaggttgcttcctagagtttag

SEQ ID NO: 170429 - DNA, 7503 bp, Artificial Sequence
  derived and/or modified sequence
atgctcgataggttgcattctacccgacagcatctgcaccagatgtggcacgtgcgcaaactgaagctggatcagtgcttccagttgcggctcttcgagcaggacgcagaaaaaatgttcgattggataacccataacaaagggctgttcctgaacagctatacagagattggaacctcacaccctcatgccatggaacttcaaacccaacacaaccacttcgctatgaattgcatgaacgtgtacgtgaacatcaaccggataatgtctgtggccaatcggctggtcgaatcagggcactatgcttctcagcagattagacagatagctagtcaattggagcaagagtggaaggctttcgccgctgcccttgacgagaggagcaccctgctggatatgtcatccatcttccaccagaaggcagagaaatacatgtctaatgttgatagctggtgcaaggcttgcggcgaggtggaccttccttctgagctacaggacctagaggacgctatccatcatcaccagggaatctacgaacatattactctggcgtacagcgaggtgtctcaggacggcaaaagtctgttggacaaattacaaaggccactgactcctggcagctccgactcccttactgcttctgccaactactccaaagctgtgcatcatgtgctggacgtgatccacgaagtgctccatcatcagaggcaactagaaaatatatggcagcaccggaaggtacgtctgcatcaacgcttacagttgtgcgtgttccagcaggatgtgcagcaggttctagattggattgagaatcatggcgaggctttcttatctaaacacactggggtcgggaaatccctgcatagggccagagctcttcagaagcgccatgaagactttgaggaagtcgctcaaaacacttacactaacgcagacaagttgctggaggctgctgagcaacttgcccagactggagagtgtgatcctgaagagatctatcaggcagcccatcagctggaggataggatccaggatttcgttagacgcgtagaacaacgcaaaatactgttggatatgtcagtcagcttccacacacatgtgaaagagctctggacgtggctggaagaactccaaaaggaactactggacgacgtgtacgctgagagcgtagaagcagtccaggacctcatcaagagatttgggcagcagcagcagaccactctccaagtaaccgtgaacgtgatcaaagaaggtgaagacctgattcaacaactgcgcgattccgccatatcaagcaataagaccccacacaattcgtccattaaccatatagagacagttctccagcaacttgatgaagcacagtcacaaatggaggagcttttccaggagaggaaaattaagctagagctgttcctgcagctccgtattttcgaaagggacgccatcgatattatctcagacctcgagtcttggaatgatgaattgtcccagcagatgaatgatttcgatactgaagacctaaccattgctgaacaaaggctccagcatcacgcagataaagcacttacgatgaacaacttaactttcgatgtgatccaccagggccaggatctgctacagtatgtgaatgaggttcaggcctccggcgttgagttgctatgcgaccgggacgtggacatggccactagggtccaggatctcctggagttcctgcacgaaaagcagcaagagcttgatctggccgctgagcagcaccgcaagcatctcgaacagtgtgtacagctccgtcatctgcaggctgaggtcaaacaggtcctggggtggattagaaatggggagtcaatgcttaatgccggtctgatcacggccagttcactgcaagaggctgaacaattacaaagagaacacgaacaatttcaacatgccattgagaaaacgcaccaatccgccctgcaggtgcagcaaaaggcagaagcgatgctccaggccaaccattatgatatggacatgattagggattgtgcggagaaggtcgctagccattggcagcaactaatgctcaagatggaggatagactcaaattggtaaacgcatcagtggcattctataaaacctcagagcaggtctgcagcgttttggagtctcttgaacaggagtataaacgcgaagaagattggtgtggcggggcggacaaattggggcccaacagcgaaaccgatcacgtgaccccgatgatctcaaagcatctggagcagaaggaagcattcctcaaggcttgtacactcgctaggcgaaacgccgacgtgttcctcaagtatttgcatagaaatagtgtgaatatgcccggtatggtaacacacatcaaagccccagagcagcaggtgaagaatattcttaatgagttattccagcgggagaatcgagtacttcattattggacaatgaggaaaagaaggttggatcagtgccagcagtatgtggtcttcgaacgatccgcgaaacaagccctggagtggattcacgacaatggggaattctatctgtcgacccatacatctaccggttccagtatacagcatacgcaggagctacttaaagaacatgaggagttccaaatcaccgccaagcagaccaaagagcgagtcaaacttctcatccagctggctgatggcttttgtgagaaaggtcacgcccacgctgccgaaattaaaaagtgcgtgaccgcagttgataaaaggtaccgcgacttctctcttagaatggagaagtatcgtacctccctggaaaaagcactgggaatctcatctgatagtaacaaatcttcaaagagcttgcagcttgatattattcccgcatccattcctggcagcgaggtcaagctccgggacgcggcccatgagttaaacgaggagaagcgtaagtcagccagacggaaagagttcataatggccgagcttatacagaccgaaaaagcttacgtccgagacctcagagaatgcatggatacctacctgtgggaaatgacaagtggggttgaggaaatacctcctggtatcgtgaataaagaattaattatctttggcaacatgcaagagatctacgaattccataacaatatatttctgaaggaactagagaagtatgaacagcttcctgaggacgtgggacattgcttcgtcacatgggccgataaattccagatgtacgtgacttactgtaaaaacaagccggattcaacacaactcatcctagagcatgctggtagctactttgatgaaatccaacagcggcacggactggccaatagcatatcctcatatctgattaaaccagttcagcggattactaaataccaactcctgctgaaggaactcctgacctgctgtgaagagggcaaaggagagataaaagacggactagaagttatgctgtcagtgcccaagcgcgcaaacgacgctatgcatctatctatgttagaggggttcgatgaaaacatcgagtcgcaaggagaactcatcctccaggagtcctttcaagtttgggaccccaaaaccttgatcagaaaaggacgggagcggcatttgtttttgtttgagatgtcactggtattttccaaagaagtcaaggactcatccggccggagtaagtatttgtacaagagcaagttgtttaccagcgaactgggggtgactgagcacgtcgagggcgatccttgtaagtttgccctgtgggtgggccgaacccccacatcagataataaaatagtgctgaaggcctccagcattgagaacaagcaggactggatcaaacacattagggaagttattcaggaacgaactattcacttaaagggggctttgaaggagcctatacatataccaaagacagctcctgcgaccagacagaagggacgtcgcgacggcgaagacttggactcccagggggacgggtcttcacaaccggacacaatctccatagcgtcccggacttcccaaaacactctggactctgataagctgtcaggcgggtgtgaattaacggtcgttattcacgactttacggcctgcaactctaacgagctgaccattcgaagaggtcagactgtcgaggttctcgagcgcccccacgacaaaccagactggtgtcttgtgaggaccaccgacagatcaccagctgcagagggcctcgttccttgcgggtctctgtgcattgctcactctcgtagcagtatggagatggaaggcatcttcaatcacaaggactcactgtctgtatcatcaaacgacgcaagcccccccgccagtgtcgccagtctgcagccccatatgatcggtgctcagagcagcccaggacccaaaagaccagggaataccctccgcaagtggctgacctctccggtgagaaggttgtcctcaggtaaagcagacggccacgtgaagaaactagcccataagcataaaaagagccgagaggtccggaaatctgccgacgctggcagccagaaggattccgatgatagtgcagcgaccccccaggacgagaccgttgaagagagaggcagaaatgagggcctgtcctccggaaccctctctaagagctcttcctctggcatgcagtcctgcggcgaggaggagggagaggagggcgccgacgcggtccctttgcctcccccaatggctattcagcagcattcccttcttcagccagactcccaagacgacaaggccagctctcgactgctggtgcggcctacaagttcagagacccccagcgcagcggaactggtgagtgccatcgaggaactggtgaaatcaaagatggccttagaagaccgcccctcctcattgcttgtggaccaaggcgatagttcttctccttcgtttaaccctagcgataattctctcctgtcttctagttcccccattgacgaaatggaagagcggaaatcctctagcctaaaacgccggcactacgtgctgcaagaactcgttgagaccgagcgggattacgtgagggacctcggatatgtggtggaaggatacatggccctgatgaaagaggatggagtccctgacgatatgaagggcaaggacaaaatcgtattcggcaatattcatcaaatttacgactggcacagagacttttttctcggggaactagagaagtgcttggaggatcctgaaaagctcgggtctctgttcgtgaagcatgagcgcagactacatatgtatattgcgtactgccagaataaaccgaaatcagagcatatcgttagcgaatatattgacaccttcttcgaagaccttaaacagcgactcggacaccgcctgcagctgaccgacttgctgattaagcctgtccaacgtataatgaagtaccaactgttgctgaaggatttcctgaagtacagcaaaaaggcttcactggacactagcgagctcgaaagggccgtggaggtgatgtgcatagtgccacggaggtgcaacgacatgatgaatgtcggcaggttacaaggctttgacggcaagattgttgcccaaggtaagctgctattacaggataccttcctcgtcactgaccaggacgctggtctgttgcccagatgccgagaacgcagaatcttcctgtttgaacagatcgtcattttctctgagcctctggacaaaaaaaaggggttttccatgcctgggtttctgttcaaaaactcaattaaagtaagctgcctctgtctggaagaaaatgtggaaaacgatccatgcaagttcgccttgacatcacggacgggggatgtggtcgaaacctttatcctccattcttcatccccttctgtgaggcagacctggatccatgaaatcaaccagattctggagaaccagaggaacttcttgaacgctttgacaagccccattgagtaccagaggaaccatagcggcgggggtggtggtggcggtagcggaggcagcggcggggggggcggttcaggcggcggcggcgctccttctgggggtagtggccactcaggaggaccctccagttgtggtggagctccaagcacttcccgaagccggccttcgagaattcctcagccagtccggcaccaccccccagtgctggtgagcagcgcagccagcagccaggctgaggcggataagatgtctggcacctctactcctggcccttctctcccccctcccggcgccgctccagaagccggaccctcggctccaagtaggcggccaccaggtgcagacgccgaaggttcagagagagaggccgagccaatccctaaaatgaaagtcttagagtctccccgcaaaggcgccgccaacgcatcgggctcatcacccgatgcccccgctaaggacgcgcgcgccagtctgggaaccctgcctctggggaaacccagagctggcgcggcaagccccctaaatagtccactttcctctgcagtaccaagtcttggcaaggaaccattccccccttcttcgccattacagaaaggcggatcattttggtctagtatccctgcttcacctgcatcaagaccaggcagttttactttccctggggattcagactctctgcaaaggcagacgccacgacatgccgcacccggtaaggatactgacagaatgtcaacctgtagttcggcaagtgagcaatctgtgcagtcaacacagagtaatggctctgagtctagctcttctagtaacatcagcaccatgctggtgactcacgactataccgccgttaaagaggatgaaatcaatgtgtatcagggagaggttgttcagatactggcctccaatcagcagaacatgttcttggtgtttagggcagccaccgaccagtgtcccgccgcagagggctggatacccggtttcgtgctgggccacacctccgcagtgatcgtggagaatcctgacggtaccctcaagaaatccacatcatggcacacggctctccgcctgaggaagaagagtgaaaaaaaagataaagatggtaagagagaaggtaagttggagaacggctaccgaaagagtcgagaaggtctatcaaataaagtcagtgtcaaattgctgaatcctaattacatctacgacgtacctcccgagttcgtcataccgctttctgaggttacctgtgagaccggtgaaacagtcgtgctccgctgtcgggtgtgcggacgtccaaaagcatctattacatggaagggacctgagcacaacactctaaacaacgatggccactatagcatctcgtattccgatctgggggaggccacactgaagattgtaggcgtgactaccgaagatgatgggatttatacctgcatcgctgtgaatgacatgggctcagcgtcttcctcagccagcctgagagtgctgggaccgggcatggacggaattatggtcacatggaaggacaatttcgactccttctattccgaggtggccgagttgggacgggctaattggaacaattggtcaccgtattag

SEQ ID NO: 170430 - DNA, 8766 bp, Artificial Sequence
  derived and/or modified sequence
atgtcgggatcctctggaggggcagctgcgccagcagcaagttccgggcctgctgcggcagcatctgccgcaggttctggctgcggtgggggggccggcgagggtgccgaggaagccgccaaagacctggccgatattgccgcattctttagatctggcttccgtaaaaacgacgaaatgaaagccatggatgttctccctatcttgaaagagaaggtcgcctatctaagcggcggcagagataaacggggagggccaatcctgactttccctgctcggagcaaccacgacaggatcagacaggaggatttacggcgcctgatctcctacctcgcgtgtatcccctcagaagaggtgtgtaagcgggggtttaccgtcatcgtggacatgcgaggatccaaatgggactcgatcaagcctttgcttaagattctccaggaaagtttcccttgctgcatccatgtggccctgatcataaaacccgacaatttctggcaaaagcagcgcacaaacttcggatctagcaagtttgagtttgagacgaatatggttagtctcgaaggcctgacaaaggtggtagatccaagtcagctgacgccagagttcgatggttgtctggagtataaccacgaggaatggatagaaattcgcgtggcattcgaggactacatctcaaacgccactcatatgctgagtagattggaggagctgcaggacattctcgcgaagaaagaactaccacaggacttagaaggcgcccggaacatgatagaggaacatagccagctcaagaagaaggtgatcaaagcccccatagaggacctggacctggaggggcagaaactcctgcaaaggatacagtccagtgagagcttcccaaaaaagaacagtggcagcggtaatgccgaccttcagaatctgctgccgaaggtgagcacaatgcttgatcgcctacactccacaagacagcaccttcatcagatgtggcatgtgcgcaaactgaagctggaccagtgttttcagttaaggctgtttgagcaggatgccgagaaaatgtttgactggattacccataataagggcctctttctcaatagttatacagagatcgggacatcccacccccacgctatggagctgcagacacagcacaaccacttcgccatgaactgtatgaacgtttacgtgaacatcaatcggatcatgagtgttgcgaacagacttgtggagagcggacactatgctagtcagcaaattcggcagattgctagccagctcgaacaagagtggaaagcctttgcagccgccttggacgagcggtctaccctcctcgacatgtcctcgatctttcaccagaaggccgagaaatacatgagcaatgtcgattcttggtgtaaagcctgcggagaagtagatctacctagcgagctccaagacctggaggacgctatccatcatcaccagggcatatacgagcacatcactttagcctacagcgaagtcagtcaagatgggaagagcttgctggataaattgcagcggccactgacaccaggatcctcagactctctcaccgcttcagctaactacagtaaagcagtgcaccacgtgctggacgtcatccatgaagtcctccaccaccagaggcagttggagaatatatggcagcaccgcaaggtgcgtttgcaccaaaggttgcagttgtgcgtatttcagcaggatgtgcagcaggtgctggattggattgagaaccacggcgaagcgtttctgagcaagcacactggggtcgggaagagcctccatagggcgagggctctccagaaacggcacgaggactttgaggaggtcgcgcaaaatacctacaccaacgccgataaactgctggaagcagctgagcagctggcgcagactggagaatgtgacccggaggaaatttatcaggccgcacaccaactggaagatcgaatccaggattttgtgagacgagttgagcagcgaaagatcctgttggacatgtcggtatccttccatacacacgtgaaagagctgtggacctggttggaagagttacaaaaagagcttttggacgacgtgtacgcggaatccgttgaagctgtgcaggacctaatcaagagatttggccagcagcagcagaccaccctgcaagtaaccgttaatgtgataaaggaaggggaggacttaatacagcagcttcgagattccgccatcagctctaataaaacacctcacaacagttctatcaatcacattgagactgtgttgcagcaactagacgaagcacagtcccagatggaggagttattccaagagagaaagatcaaactagagctgtttttgcagctgcgcatatttgaaagggatgcgattgatattatatccgatttggaatcctggaacgatgaacttagccagcagatgaacgatttcgatacagaagacctaacaatcgcagaacagcgtctccagcatcacgcagataaggccctcacaatgaacaatctcacattcgacgtcatccaccaaggccaggatctgttgcaatacgtgaatgaagttcaggcctcaggagtggagctgctgtgcgaccgcgatgtggatatggccacaagggtccaggatctgctggagttcctgcacgaaaagcagcaggagctcgatctggcggccgagcagcatcgaaagcatttagaacagtgcgtccaactgcgacatttacaggccgaggtcaaacaggtgctcggctggatcaggaacggcgagagcatgctaaacgccgggctcataactgcctcttcgcttcaagaggctgaacaactgcagagagagcatgagcagttccaacacgccattgagaagacccaccagtctgctctgcaagtccagcagaaggccgaggccatgttacaggcaaaccattacgacatggacatgatccgtgactgtgctgaaaaagtcgcttcccactggcaacagttgatgttaaaaatggaggacagattgaaactcgtgaatgcttctgtcgctttttacaaaacatccgagcaggtctgcagcgtactggagagcctggagcaggagtacaagcgggaagaggactggtgtggaggggctgataagttagggccaaactcggagaccgaccacgtgacccctatgatcagcaaacatctcgaacagaaagaagcattcttgaaggcctgcacccttgccaggaggaatgccgacgtgtttttgaagtatctacaccggaactcggtgaacatgccaggcatggtgactcatatcaaggcaccggagcagcaggtgaagaacattctaaatgaacttttccagcgcgaaaatagggtactccattattggaccatgaggaagaggagactcgaccaatgccaacaatatgtggtatttgagagaagcgcgaaacaagccctggagtggatccacgataatggcgagttctacctctcgacccacactagcactgggagttctatacagcacacccaggaattattaaaggagcacgaggaatttcagattacggcaaagcagacgaaggaacgagtcaagctcttaattcagctggccgacggcttttgtgagaaaggccatgctcacgcagccgaaatcaagaagtgcgtaactgccgtggacaagcgctaccgcgacttctcccttaggatggagaaatatcgcacatccttagaaaaagctctgggcatctcaagcgatagcaataaatcaagcaagtccttacagcttgatattattcccgctagcatacctggttctgaagtgaaactgcgggatgcagcgcatgagctgaacgaggagaagagaaaatctgcccggcgaaaggagtttattatggcagagttaattcagaccgaaaaagcctacgtgagagatctacgggagtgtatggacacctatctttgggaaatgacatcaggcgtcgaagaaatccccccaggtatcgttaataaggagcttattatctttggcaacatgcaggaaatttatgagtttcacaataacattttcctcaaagagttggaaaaatacgagcagctaccagaagatgtgggacactgctttgttacctgggccgacaaattccagatgtatgtcacttactgtaaaaacaagcctgactcaacgcagctcatcctggagcacgctggctcttatttcgacgaaatccagcagagacatggcctcgcaaacagcatctcctcctacttaattaaaccagtccagcggatcaccaagtaccagctgctgctgaaggaacttctgacatgctgtgaggagggcaaaggggagattaaagacggcctggaagtcatgctatcagtgcccaaaagggccaatgacgctatgcatctctctatgctggagggcttcgatgagaacatcgagtctcaaggtgaactgatcctgcaagagtcatttcaggtatgggatccaaagacactgataagaaaaggtcgagagaggcatctgtttctgttcgagatgtctcttgtgttttccaaggaggttaaagacagcagcgggcgatccaagtacctgtataaatccaaactgtttacctccgaactgggcgtgaccgagcacgtggagggagatccctgcaagttcgctctctgggtcgggaggactcccacgagcgacaataaaattgtcctcaaggctagttccatcgagaataagcaagattggattaagcacatccgagaagttatccaggaaagaacaatccatcttaagggcgccctcaaagagccaatccacatccccaagactgctcccgctacccggcagaaggggcggagggatggggaggacctggacagtcagggagatgggtcaagccagccggacaccatatctatcgcttccagaaccagtcagaacaccctcgacagcgacaaactctccggaggctgtgaactgaccgtggtgattcacgattttacagcctgtaatagtaatgaactgacgataagaagaggacaaactgttgaggttctcgagcgccctcatgataagccggactggtgtttggtacgaactactgaccggagccccgcggccgagggacttgtgccatgtggctccctgtgcatcgctcacagcagaagttctatggaaatggaaggcatctttaatcataaggactccctgtctgtgagctccaatgacgcctctcctcccgcttccgtcgcatctttgcaaccccacatgattggcgctcagtcgagcccgggccctaagcggccaggtaataccctccgaaagtggctaacttcccctgttcgcagactctcatccggcaaggccgacggccacgtcaaaaagctggcccataagcataagaagtcccgggaggtacggaaatcagccgatgctggatcccagaaagatagcgatgactcagcggctacgcctcaggacgagactgtggaggagagagggcgcaatgagggattaagcagtggaacgctgtcaaagagtagtagctcgggcatgcaatcatgcggcgaggaggagggtgaagagggagccgacgctgttccactccctccaccaatggccattcagcagcatagtttgttgcagcccgactcccaagacgacaaggcttccagccggctgctcgtgaggccaacttcttccgaaacgccatctgcagcagagttggtgtccgcaatcgaggaattggtgaagagcaaaatggcgctcgaggatcgtcctagcagtttgctggtcgatcagggcgatagttcctctcccagctttaaccccagcgacaattcactgctttcatcctcctctcctatcgacgaaatggaggagagaaagagcagctcactcaaaaggaggcactacgtgcttcaggagctggtggagacagagagggactacgtccgcgatcttgggtatgtcgtggaaggctacatggccttgatgaaggaggatggagtgcccgacgatatgaaggggaaggacaagatagtgtttggcaacatacatcagatctacgattggcacagggatttctttcttggagagctggagaagtgtctcgaagatccagagaagcttggaagcttgtttgtaaagcatgagcgaagactgcatatgtatattgcgtattgtcagaataaacccaagtcagaacatatagtgtctgaatacattgatacattcttcgaggacctgaagcagaggctcggacatagactccagctaaccgatctgctgattaagcctgtccaacgcatcatgaagtatcagctcctcctaaaggattttcttaagtactccaaaaaggccagccttgacacttctgaattggaacgcgcggtcgaagtgatgtgtatcgtgccccggcgctgcaatgacatgatgaatgtcggccgccttcaggggtttgacggcaagatcgtcgctcaggggaaactacttctgcaggacacattcctggtgacagaccaggacgctggccttctgcctagatgtcgggagcggaggatctttttatttgaacagatcgtcattttctctgaaccgttagacaagaaaaaaggcttctccatgccgggctttctctttaagaattcaatcaaagtgtcctgcctttgccttgaggagaacgttgagaatgatccctgcaaatttgcgttgacctctcggacgggcgatgtggtagagacttttatcctgcactcctcaagcccatccgtcagacagacgtggatccacgagattaaccagatcctcgagaaccaacgaaatttcttgaacgcactgacgtcacccatcgagtatcagagaaatcattccggaggaggcggtggcgggggatccgggggctcaggcggcgggggaggtagtggcggaggaggcgccccatccgggggcagcgggcattctgggggcccatcttcatgtggcggagcccccagcacttctaggagtcgcccttctaggattccccagccagtcaggcaccatcctcctgtcctcgtgtccagcgctgccagcagtcaggcagaagctgataagatgagcgagagcgaaagtagctcctcctccaacatctcaacgatgctggtaacccacgactatacagctgtgaaggaggatgaaatcaatgtgtatcagggggaggtcgtgcaaatcctcgcttccaaccagcagaatatgttcctggtctttcgggccgccacagaccaatgccctgctgccgagggatggattcccgggtttgtgctgggccatacttccgcagtcatcgtggagaatccagatggaacgttaaagaaaagcactagttggcatactgctttacgccttagaaaaaagtcggagaagaaggacaaggatgggaagagggagggcaaactcgaaaacggctatcggaagtctagggagggattaagcaataaggtgtctgttaaattgttgaaccccaactacatctatgatgttccacccgagttcgtcattcccttaagcgaggtgacctgtgaaacaggtgagactgtcgttctgagatgtcgtgtgtgtgggcgtcccaaagcttctattacgtggaagggaccagagcacaacactcttaacaatgacgggcattatagcatttcatattccgatttgggcgaggcaaccctgaaaatcgttggcgtgacaacggaggacgatggtatctacacatgtattgccgtgaacgacatgggcagcgcatccagctcggcaagtctacgggtactggggccgggtatggacggcatcatggtgacttggaaggacaatttcgattcattttatagtgaggtcgccgagctggggcggggacgattctcggttgtgaagaagtgtgaccaaaaaggcactaaacgagctgtggctaccaagttcgtgaataagaagcttatgaagcgggatcaagtgactcacgagttggggatcctgcagtccttacagcaccctctgttagtggggctcctggacacttttgagaccccgacttcttacattcttgtcttggaaatggctgatcaggggagactcctcgactgcgtggtgaggtggggctctctgaccgaagggaaaatcagggctcatttgggcgaagtgttggaagccgtaaggtacttgcataactgccgcattgctcatctggacctgaagccagagaacatactggtggacgaatccctggcaaaaccaaccataaagctggcggattttggtgacgctgtccagcttaacaccacgtattatatacatcaactactgggaaatcccgaattcgcagcccccgagatcatcctgggcaatcctgtttccctcacttctgatacgtggagtgttggggtgcttacatacgtgctactgtctggcgtgtcaccatttctcgatgactccgtagaggagacgtgtctgaatatatgccggctcgacttcagctttcccgacgattactttaaaggagttagtcagaaagctaaagagtttgtttgttttctgctgcaggaagacccagccaaacggcctagtgctgcgctggccctccaggagcagtggctgcaggccggaaacggcagaagtactggtgtcctcgatacatcaaggttgactagctttatcgaacgacgaaagcaccagaacgacgtgagaccgattagatctatcaagaattttctccagagtcggctgctcccaagggtgtag

SEQ ID NO: 170431 - DNA, 1791 bp, Artificial Sequence
  derived and/or modified sequence
atgctgcccagccaggcccagggcctgctgtggtgggtgttccccctcttccctgccagcagcctgagctacccacctgtgtcctacagagcagatggcctggccaggaacaccttcctgaaggcctgcagcgagagcagcagcagcagcaacatcagcaccatgctggtgacccatgactacacagctgtgaaggaggatgagatcaacgtgtaccagggcgaggtggtgcagatcctggccagcaaccagcagaacatgttcctggtgttccgggccgccacagaccagtgcccagctgctgagggctggatccctggctttgtgctgggccacaccagcgctgtgattgtggagaacccagatggcaccctgaagaagagcacctcctggcacacagccctgcggctgaggaagaagtctgagaagaaggacaaggatggcaagcgggagggcaagctggagaatggctacaggaagagccgggagggcctgagcaacaaggtgtctgtgaagctgctgaaccccaactacatctatgatgtgcccccagagtttgtgatccccctgtctgaggtgacctgtgaaacaggagagaccgtggtgctgcgctgccgggtgtgtggccggcccaaggccagcatcacctggaagggccctgagcacaacaccctgaacaatgatggccactacagcatctcctacagcgacctgggggaggccaccctgaagatcgtgggcgtgaccacagaagatgatggcatctacacctgcatcgctgtgaatgacatgggcagcgccagcagcagcgccagcctgcgggtgctgggccctggcatggatggcatcatggtgacctggaaggacaactttgacagcttctacagcgaggtggccgagctgggccggggccgcttctctgtggtgaagaagtgtgaccagaagggcaccaagagagctgtggccaccaagtttgtgaacaagaagctgatgaagagggaccaggtgacccatgagctgggcatcctgcagagcctgcagcaccccctgctggtgggcctgctggacacctttgagacccccaccagctacatcctggtgctggagatggctgaccagggccgcctgctggactgtgtggtgcgctggggcagcctgacagagggcaagatccgggcccacctgggggaggtgctggaggccgtgcgctacctgcacaactgccgcatcgcccacctggacctgaagccagagaacatcctggtggatgagagcctggccaagcccaccatcaagctggccgactttggagatgctgtgcagctgaacaccacctactacatccaccagctgctgggcaaccctgagtttgctgcccctgagatcatcctgggcaaccctgtgtccctgaccagtgacacctggagcgtgggcgtgctgacctacgtgctgctgagcggcgtgagccccttcctggatgattctgtggaggagacctgcctgaacatctgccgcctggacttctccttcccagatgactacttcaagggcgtgtcccagaaggccaaggagtttgtgtgcttcctgctgcaggaggaccctgccaagaggccttctgctgccctggccctgcaggagcagtggctgcaggccggaaatggccgcagcactggagtgctggacaccagccggctgaccagcttcattgaaagaaggaagcaccagaatgatgtgcggcccatccgcagcatcaagaacttcctgcagagccggctgctgccccgggtgtag

SEQ ID NO: 170432 - DNA, 9294 bp, Artificial Sequence
  derived and/or modified sequence
atgagcggcagcagtggaggagctgctgccccagctgccagcagcggccctgctgctgctgccagcgctgctggcagcggctgcggcggcggggccggggagggcgctgaggaggccgccaaggacctggccgacattgctgccttcttccgcagcggcttcaggaagaatgatgagatgaaggccatggatgtgctgcccatcctgaaggagaaggtggcctacctgagcggcggccgggacaagaggggcggccccatcctgaccttccctgcccggagcaaccacgaccgcatccggcaggaggacctgcggcggctcatctcctacctggcctgcatccccagcgaggaggtgtgcaagaggggcttcaccgtgattgtggacatgaggggcagcaagtgggacagcatcaagcccctgctgaagatcctgcaggagagcttcccctgctgcatccacgtggccctgatcatcaagccagacaacttctggcagaagcagaggaccaactttggcagcagcaagtttgaatttgagaccaacatggtgtccctggagggcctgaccaaggtggtggaccccagccagctgaccccagagtttgatggctgcctggagtacaaccacgaggagtggattgagatccgggtggcctttgaggactacatcagcaatgccacccacatgctgagccggctggaggagctgcaggacatcctggccaagaaggagctgccccaggacctggagggcgccaggaacatgattgaggagcacagccagctgaagaagaaggtgatcaaggcccccatcgaggacctggacctggagggccagaagctgctgcagaggatccagagcagcgagagcttccccaagaagaacagcggcagcggaaatgctgacctgcagaacctgctgcccaaggtgtccaccatgctggaccggctgcacagcacccggcagcacctgcaccagatgtggcacgtgaggaagctgaagctggaccagtgcttccagctgcggctgtttgagcaggatgctgagaagatgtttgactggatcacccacaacaagggcctcttcctgaacagctacacagagatcggcaccagccacccccacgccatggagctgcagacccagcacaaccactttgccatgaactgcatgaatgtgtatgtgaacatcaaccgcatcatgtctgtggccaaccggctggtggagagcggccactacgccagccagcagatccggcagatcgccagccagctggagcaggagtggaaggcctttgctgctgccctggatgagaggagcaccctgctggacatgagcagcatcttccaccagaaggccgagaagtacatgagcaatgtggacagctggtgcaaggcctgtggggaggtggacctgcccagcgagctgcaggacctggaggatgccatccaccaccaccagggcatctatgagcacatcaccctggcctacagcgaggtgtcccaggacggcaagagcctgctggacaagctgcagaggcccctgaccccaggcagcagtgacagcctgacagccagcgccaactacagcaaggctgtgcaccacgtgctggatgtgatccacgaggtgctgcaccaccagaggcagctggagaacatctggcagcacaggaaggtgcggctgcaccagaggctgcagctgtgtgtgttccagcaggatgtgcagcaggtgctggactggattgaaaatcatggagaggccttcctgagcaagcacactggagtgggcaagagcctgcaccgggcccgggccctgcagaagagacatgaagattttgaggaggtggcccagaacacctacaccaatgctgacaagctgctggaggccgctgagcagctggcccagacaggagaatgtgaccctgaggagatctaccaggccgcccaccagctggaggaccgcatccaggactttgtgagaagagtggagcagaggaagatcctgctggacatgtctgtgtccttccacacccacgtgaaggagctgtggacctggctggaggagctgcagaaggagctgctggatgatgtgtatgcagagagcgtggaggccgtgcaggacctgatcaagagatttggccagcagcagcagaccaccctgcaggtgacagtgaatgtcatcaaggagggggaggacctgatccagcagctgcgggacagcgccatcagcagcaacaagaccccccacaacagcagcatcaaccacattgaaacagtgctgcagcagctggatgaggcccagagccagatggaggagctgttccaggagaggaagatcaagctggagctgttcctgcagctgcgcatctttgaaagagatgccatcgacatcatcagtgacctggagagctggaatgatgagctgagccagcagatgaatgactttgacacagaggacctgaccatcgccgagcagaggctgcagcaccacgccgacaaggccctgaccatgaacaacctgacctttgatgtgatccaccagggccaggacctgctgcagtatgtgaatgaggtgcaggccagcggcgtggagctgctgtgtgacagagatgtggacatggccaccagggtgcaggacctgctggagttcctgcacgagaagcagcaggagctggacctggccgctgagcagcacaggaagcacctggagcagtgtgtgcagctgcggcacctgcaggccgaggtgaagcaggtgctgggctggatcagaaatggagagagcatgctgaatgccggcctcatcacagccagcagcctgcaggaggccgagcagctgcagcgggagcacgagcagttccagcacgccatcgagaagacccaccagagcgccctgcaggtgcagcagaaggccgaggccatgctgcaggccaaccactatgacatggacatgatccgggactgtgccgagaaggtggccagccactggcagcagctgatgctgaagatggaggaccggctgaagctggtgaatgcctctgtggccttctacaagaccagcgagcaggtgtgcagcgtgctggagagcctggagcaggagtacaagcgggaggaggactggtgtggcggcgctgacaagctgggccccaacagcgagacagaccacgtgacccccatgatcagcaagcacctggagcagaaggaggccttcctgaaggcctgcaccctggccaggagaaatgctgatgtgttcctgaagtacctgcacaggaacagcgtgaacatgcctggcatggtgacccacatcaaggcccctgagcagcaggtgaagaacatcctgaatgagctgttccagcgggagaacagagtgctgcactactggaccatgaggaagaggcggctggaccagtgccagcagtatgtggtgtttgagaggtctgccaagcaggccctggagtggattcatgacaatggagagttctacctgagcacccacaccagcacaggcagcagcatccagcacacccaggagctgctgaaggagcacgaggagttccagatcacagccaagcagaccaaggagcgggtgaagctgctgatccagctggctgatggcttctgtgagaagggccacgcccacgccgctgagatcaagaagtgtgtgacagctgtggacaagcgctacagagacttcagcctgaggatggagaagtaccgcaccagcctggagaaggccctgggcatcagcagtgacagcaacaagagcagcaagagcctgcagctggacatcatcccagccagcatccctggcagcgaggtgaagctgagagatgctgcccacgagctgaatgaggagaagaggaagagcgcccggaggaaggagttcatcatggccgagctgatccagacagagaaggcctacgtgcgggacctgcgggagtgcatggacacctacctgtgggagatgaccagcggcgtggaggagatccccccaggcatcgtgaacaaggagctgatcatctttggaaacatgcaggagatctatgagttccacaacaacatcttcctgaaggagctggagaagtatgagcagctgcctgaagatgtgggccactgctttgtgacctgggccgacaagttccagatgtatgtgacctactgcaagaacaagccagacagcacccagctgatcctggagcacgccggcagctactttgatgagatccagcagagacatggcctggccaacagcatcagcagctacctgatcaagcctgtgcagaggatcaccaagtaccagctgctgctgaaggagctgctgacctgctgtgaggagggcaaaggagagatcaaggatggcctggaggtgatgctgtctgtgcccaagagggccaatgatgccatgcacctgtccatgctggagggctttgatgagaacatcgagagccagggcgagctgatcctgcaggagagcttccaggtgtgggaccccaagaccctcatcaggaagggccgggagcggcacctgttcctgtttgagatgagcctggtgttcagcaaggaggtgaaggacagcagcggccgcagcaagtacctgtacaagagcaagctgttcaccagcgagctgggcgtgacagaacatgtggagggggacccctgcaagtttgccctgtgggtgggccgcacccccaccagtgacaacaagatcgtgctgaaggccagcagcattgagaacaagcaggactggatcaagcacatccgggaggtgatccaggagaggaccatccacctgaagggggccctgaaggagcccatccacatccccaagacagccccagccacccggcagaagggcagaagagatggagaggacctggacagccagggagatggcagcagccagcctgacaccatcagcatcgccagcaggaccagccagaacaccctggacagcgacaagctgagcggcggctgtgagctgactgtggtgattcatgacttcaccgcctgcaacagcaatgagctgaccatccggcggggccagacagtggaggtgctggagcggccccatgacaagccagactggtgcctggtgaggaccacagacaggagccctgctgctgagggcctggtgccctgtggcagcctgtgcatcgcccacagccgcagctccatggagatggagggcatcttcaaccacaaggacagcctgtctgtgagcagcaatgatgccagccccccagcctctgtggccagcctgcagccccacatgattggagcccagagcagccctggccccaagaggcctggcaacaccctgaggaagtggctgaccagccctgtgcggcggctgagcagcggcaaggcagatggccacgtgaagaagctggcccacaagcacaagaagagccgggaggtgaggaagtctgcagatgctggcagccagaaggacagtgatgattctgctgccaccccccaggatgaaacagtggaggagcggggcagaaatgaaggcctgagcagcggcaccctgagcaagagcagcagcagcggcatgcagagctgtggggaggaggagggggaggagggcgcagatgctgtgcccctgcccccacccatggccatccagcagcacagcctgctgcagcctgacagccaggatgacaaggccagcagccggctgctggtgcggcccaccagcagcgagaccccatctgctgctgagctggtgtctgccatcgaggagctggtgaagagcaagatggccctggaggaccggcccagcagcctgctggtggaccagggcgacagcagcagccccagcttcaaccccagcgacaacagcctgctgagcagcagcagccccattgatgagatggaggagaggaagagcagcagcctgaagagaagacactacgtgctgcaggagctggtggagacagagcgggactatgtgcgggacctgggctacgtggtggagggctacatggccctgatgaaggaggatggagtgcctgatgacatgaagggcaaggacaagatcgtgtttggaaacatccaccagatctatgactggcaccgggacttcttcctgggggagctggagaagtgcctggaggaccctgagaagctgggcagcctgtttgtgaagcatgaaagaaggctgcacatgtacatcgcctactgccagaacaagcccaagtctgagcacatcgtgtctgagtacatcgacaccttctttgaggacctgaagcagaggctgggccaccggctgcagctgacagacctgctgatcaagcctgtgcagaggatcatgaagtaccagctgctgctgaaggacttcctgaagtacagcaagaaggccagcctggacaccagcgagctggagagagctgtggaggtgatgtgcatcgtgccccggcgctgcaatgacatgatgaatgtgggccgcctgcagggctttgatggcaagatcgtggcccagggcaagctgctgctgcaggacaccttcctggtgacagaccaggatgctggcctgctgccccgctgccgggagcggcgcatcttcctgtttgagcagatcgtcatcttcagcgagcccctggacaagaagaagggcttctccatgcctggcttcctgttcaagaacagcatcaaggtgtcctgcctgtgcctggaggagaatgtggagaatgacccctgcaagtttgccctgaccagcaggactggagatgtggtggagaccttcatcctgcacagcagcagccccagcgtgcggcagacctggatccacgagatcaaccagatcctggagaaccagaggaacttcctgaatgccctgaccagccccatcgagtaccagaggaaccacagcggcggcggcggcggcggcggcagcggcggcagcggcggcggcggcggcagcggcggcggcggggcccccagcggcggcagcggccacagcggcggccccagcagctgtggcggggcccccagcaccagccgcagccggcccagccgcatcccccagcctgtgcgccaccacccccctgtgctggtgtcctctgctgccagcagccaggccgaggccgacaagatgagcggcaccagcaccccaggccccagcctgcccccacctggagctgcccctgaggccggccccagcgcccccagccggcggcccccaggagcagatgctgagggcagcgagcgggaggccgagcccatccccaagatgaaggtgctggagagccccaggaagggggccgccaatgccagcggcagcagcccagatgccccagccaaggatgcccgggccagcctgggcaccctgcccctgggcaagcccagggctggagctgccagccccctgaacagccccctgagcagcgctgtgcccagcctgggcaaggagcccttcccccccagcagccccctgcagaagggcggcagcttctggagcagcatcccagccagccctgccagcaggcctggcagcttcaccttccctggggacagcgacagcctgcagaggcagacccccaggcatgctgcccctgggaaggacacagacaggatgagcacctgcagcagcgccagcgagcagagcgtgcagagcacccagagcaatggaagtgagagcagcagcagcagcaacatcagcaccatgctggtgacccatgactacacagctgtgaaggaggatgagatcaacgtgtaccagggcgaggtggtgcagatcctggccagcaaccagcagaacatgttcctggtgttccgggccgccacagaccagtgcccagctgctgagggctggatccctggctttgtgctgggccacaccagcgctgtgattgtggagaacccagatggcaccctgaagaagagcacctcctggcacacagccctgcggctgaggaagaagtctgagaagaaggacaaggatggcaagcgggagggcaagctggagaatggctacaggaagagccgggagggcctgagcaacaaggtgtctgtgaagctgctgaaccccaactacatctatgatgtgcccccagagtttgtgatccccctgtctgaggtgacctgtgagaccggggagaccgtggtgctgcgctgccgggtgtgtggccggcccaaggccagcatcacctggaagggccctgagcacaacaccctgaacaatgatggccactacagcatctcctacagcgacctgggggaggccaccctgaagatcgtgggcgtgaccacagaagatgatggcatctacacctgcatcgctgtgaatgacatgggcagcgccagcagcagcgccagcctgcgggtgctgggccctggcatggatggcatcatggtgacctggaaggacaactttgacagcttctacagcgaggtggccgagctgggccggggccgcttctctgtggtgaagaagtgtgaccagaagggcaccaagagagctgtggccaccaagtttgtgaacaagaagctgatgaagagggaccaggtgacccatgagctgggcatcctgcagagcctgcagcaccccctgctggtgggcctgctggacacctttgagacccccaccagctacatcctggtgctggagatggctgaccagggccgcctgctggactgtgtggtgcgctggggcagcctgacagagggcaagatccgggcccacctgggggaggtgctggaggccgtgcgctacctgcacaactgcagaattgcccacctggacctgaagccagagaacatcctggtggatgagagcctggccaagcccaccatcaagctggccgactttggagatgctgtgcagctgaacaccacctactacatccaccagctgctgggcaaccctgagtttgctgcccctgagatcatcctgggcaaccctgtgtccctgaccagtgacacctggagcgtgggcgtgctgacctacgtgctgctgtctggagtgagccccttcctggatgacagcgtggaggagacctgcctgaacatctgccgcctggacttctccttcccagatgactacttcaagggcgtgtcccagaaggccaaggagtttgtgtgcttcctgctgcaggaggaccctgccaagaggcccagcgctgccctggccctgcaggagcagtggctgcaggccggaaatggccgcagcactggagtgctggacaccagccggctgaccagcttcatcgagaggaggaagcaccagaatgatgtgcggcccatccgcagcatcaagaacttcctgcagagccggctgctgccccgggtgtag

SEQ ID NO: 170433 - DNA, 7503 bp, Artificial Sequence
  derived and/or modified sequence
atgctggaccggctgcacagcacccggcagcacctgcaccagatgtggcacgtgaggaagctgaagctggaccagtgcttccagctgcggctgtttgagcaggatgctgagaagatgtttgactggatcacccacaacaagggcctcttcctgaacagctacacagaaattggcaccagccacccccacgccatggagctgcagacccagcacaaccactttgccatgaactgcatgaatgtgtatgtgaacatcaaccgcatcatgtctgtggccaaccggctggtggagagcggccactacgccagccagcagatccggcagatcgccagccagctggagcaggagtggaaggcctttgctgctgccctggatgagaggagcaccctgctggacatgagcagcatcttccaccagaaggccgagaagtacatgagcaatgtggacagctggtgcaaggcctgtggggaggtggacctgcccagcgagctgcaggacctggaggatgccatccaccaccaccagggcatctatgagcacatcaccctggcctacagcgaggtgtcccaggacggcaagagcctgctggacaagctgcagaggcccctgaccccaggcagcagtgacagcctgacagccagcgccaactacagcaaggctgtgcaccacgtgctggatgtgattcatgaggtgctgcaccaccagaggcagctggagaacatctggcagcacaggaaggtgcggctgcaccagaggctgcagctgtgtgtgttccagcaggatgtgcagcaggtgctggactggattgagaaccacggggaggccttcctgagcaagcacactggagtgggcaagagcctgcaccgggcccgggccctgcagaagagacatgaggactttgaggaggtggcccagaacacctacaccaatgctgacaagctgctggaggccgctgagcagctggcccagacaggagaatgtgaccctgaggagatctaccaggccgcccaccagctggaggaccgcatccaggactttgtgcggcgggtggagcagaggaagatcctgctggacatgtctgtgtccttccacacccacgtgaaggagctgtggacctggctggaggagctgcagaaggagctgctggatgatgtgtatgcagagagcgtggaggccgtgcaggacctgatcaagcgcttcggccagcagcagcagaccaccctgcaggtgacagtgaatgtcatcaaggagggagaagatctcatccagcagctgcgggacagcgccatcagcagcaacaagaccccccacaacagcagcatcaaccacatcgagaccgtgctgcagcagctggatgaggcccagagccagatggaggagctgttccaggagaggaagatcaagctggagctgttcctgcagctgcgcatctttgaaagagatgccatcgacatcatcagtgacctggagagctggaatgatgagctgagccagcagatgaatgactttgacacagaggacctgaccatcgccgagcagaggctgcagcaccacgccgacaaggccctgaccatgaacaacctgacctttgatgtgatccaccagggccaggacctgctgcagtatgtgaatgaggtgcaggccagcggcgtggagctgctgtgtgacagagatgtggacatggccaccagggtgcaggacctgctggagttcctgcacgagaagcagcaggagctggacctggccgctgagcagcacaggaagcacctggagcagtgtgtgcagctgcggcacctgcaggccgaggtgaagcaggtgctgggctggatcagaaatggagagagcatgctgaatgccggcctcatcacagccagcagcctgcaggaggccgagcagctgcagcgggagcacgagcagttccagcacgccatcgagaagacccaccagagcgccctgcaggtgcagcagaaggccgaggccatgctgcaggccaaccactatgacatggacatgatccgggactgtgccgagaaggtggccagccactggcagcagctgatgctgaagatggaggaccggctgaagctggtgaatgcctctgtggccttctacaagaccagcgagcaggtgtgcagcgtgctggagagcctggagcaggagtacaagcgggaggaggactggtgtggcggcgctgacaagctgggccccaacagcgagacagaccacgtgacccccatgatcagcaagcacctggagcagaaggaggccttcctgaaggcctgcaccctggccaggagaaatgctgatgtgttcctgaagtacctgcacagaaattctgtgaacatgcctggcatggtgacccacatcaaggcccctgagcagcaggtgaagaacatcctgaatgaactcttccagagagaaaatagagtgctgcactactggaccatgaggaagaggcggctggaccagtgccagcagtatgtggtgtttgagaggtctgccaagcaggccctggagtggattcatgacaacggggagttctacctgagcacccacaccagcacaggcagcagcatccagcacacccaggagctgctgaaggagcacgaggagttccagatcacagccaagcagaccaaggagcgggtgaagctgctgatccagctggctgatggcttctgtgagaagggccacgcccatgctgctgagatcaagaagtgtgtgacagctgtggacaagcgctacagagacttcagcctgaggatggagaagtaccgcaccagcctggagaaggccctgggcatcagcagtgacagcaacaagagcagcaagagcctgcagctggacatcatcccagccagcatccctggcagcgaggtgaagctgagagatgctgcccacgagctgaatgaggagaagaggaagagcgcccggaggaaggagttcatcatggccgagctgatccagacagagaaggcctacgtgcgggacctgcgggagtgcatggacacctacctgtgggagatgaccagcggcgtggaggagatccccccaggcatcgtgaacaaggagctgatcatcttcggcaacatgcaggagatctatgagttccacaacaacatcttcctgaaggagctggagaagtatgagcagctgcctgaagatgtgggccactgctttgtgacctgggccgacaagttccagatgtatgtgacctactgcaagaacaagccagacagcacccagctgatcctggagcacgccggcagctactttgatgagatccagcagagacatggcctggccaacagcatcagcagctacctgatcaagcctgtgcagaggatcaccaagtaccagctgctgctgaaggagctgctgacctgctgtgaggagggcaagggggagatcaaggatggcctggaggtgatgctgtctgtgcccaagagggccaatgatgccatgcacctgtccatgctggagggctttgatgaaaatattgagagccagggcgagctgatcctgcaggagagcttccaggtgtgggaccccaagaccctcatcaggaagggccgggagcggcacctgttcctgtttgagatgagcctggtgttcagcaaggaggtgaaggacagcagcggccgcagcaagtacctgtacaagagcaagctgttcaccagcgagctgggcgtgacagagcacgtggagggggacccctgcaagtttgccctgtgggtgggccgcacccccaccagtgacaacaagatcgtgctgaaggccagcagcattgagaacaagcaggactggatcaagcacatccgggaggtgatccaggagaggaccatccacctgaagggggccctgaaggagcccatccacatccccaagacagccccagccacccggcagaagggcagaagagatggagaggacctggacagccagggagatggcagcagccagcctgacaccatcagcatcgccagcaggaccagccagaacaccctggacagcgacaagctgagcggcggctgtgagctgactgtggtgattcatgacttcaccgcctgcaacagcaatgagctgaccatcagaagaggccagacagtggaggtgctggagcggccccatgacaagccagactggtgcctggtgaggaccacagacaggagccctgctgctgagggcctggtgccctgtggcagcctgtgcatcgcccacagccgcagctccatggagatggagggcatcttcaaccacaaggacagcctgtctgtgagcagcaatgatgccagccccccagcctctgtggccagcctgcagccccacatgattggagcccagagcagccctggccccaagaggcctggcaacaccctgaggaagtggctgaccagccctgtgcggcggctgagcagcggcaaggcagatggccacgtgaagaagctggcccacaagcacaagaagagccgggaggtgaggaagtctgcagatgctggcagccagaaggacagtgatgacagcgctgccaccccccaggatgagaccgtggaggagcggggcagaaatgaaggcctgagcagcggcaccctgagcaagagcagcagcagcggcatgcagagctgtggggaggaggagggggaggagggcgcagatgctgtgcccctgcccccacccatggccatccagcagcacagcctgctgcagcctgacagccaggatgacaaggccagcagccggctgctggtgcggcccaccagcagcgagacccccagcgctgctgagctggtgtctgccatcgaggagctggtgaagagcaagatggccctggaggaccggcccagcagcctgctggtggaccagggcgacagcagcagccccagcttcaaccccagcgacaacagcctgctgagcagcagcagccccattgatgagatggaggagaggaagagcagcagcctgaagaggaggcactacgtgctgcaggagctggtggagacagagcgggactatgtgcgggacctgggctacgtggtggagggctacatggccctgatgaaggaggatggagtgcctgatgacatgaagggcaaggacaagatcgtgtttggaaacatccaccagatctatgactggcaccgggacttcttcctgggggagctggagaagtgcctggaggaccctgagaagctgggcagcctgtttgtgaagcatgagcggcggctgcacatgtacatcgcctactgccagaacaagcccaagtctgagcacatcgtgtctgagtacatcgacaccttctttgaggacctgaagcagaggctgggccaccggctgcagctgacagacctgctgatcaagcctgtgcagaggatcatgaagtaccagctgctgctgaaggacttcctgaagtacagcaagaaggccagcctggacaccagcgagctggagagagctgtggaggtgatgtgcatcgtgccccggcgctgcaatgacatgatgaatgtgggccgcctgcagggctttgatggcaagatcgtggcccagggcaagctgctgctgcaggacaccttcctggtgacagaccaggatgctggcctgctgccccgctgccgggagcggcgcatcttcctgtttgagcagatcgtcatcttcagcgagcccctggacaagaagaagggcttctccatgcctggcttcctgttcaagaacagcatcaaggtgtcctgcctgtgcctggaggagaatgtggagaatgacccctgcaagtttgccctgaccagcaggactggagatgtggtggagaccttcatcctgcacagcagcagccccagcgtgcggcagacctggattcatgagatcaaccagatcctggagaaccagaggaacttcctgaatgccctgaccagccccatcgagtaccagaggaaccacagcggcggcggcggcggcggcggcagcggcggcagcggcggcggcggcggcagcggcggcggcggggcccccagcggcggcagcggccacagcggcggccccagcagctgtggcggggcccccagcaccagccgcagccggcccagccgcatcccccagcctgtgcgccaccacccccctgtgctggtgagcagcgctgccagcagccaggccgaggccgacaagatgagcggcaccagcaccccaggccccagcctgcccccacctggggccgcccctgaggccggccccagcgcccccagcagaagacctcctggagcagatgctgagggcagcgagcgggaggccgagcccatccccaagatgaaggtgctggagagccccaggaaaggagctgccaatgccagcggcagcagcccagatgccccagccaaggatgcccgggccagcctgggcaccctgcccctgggcaagccccgggccggggccgccagccccctgaacagccccctgagcagcgctgtgcccagcctgggcaaggagcccttcccccccagcagccccctgcagaagggcggcagcttctggagcagcatcccagccagccctgccagccggcccggcagcttcaccttccctggggacagcgacagcctgcagaggcagacccccaggcatgctgcccctgggaaggacacagacaggatgagcacctgcagcagcgccagcgagcagagcgtgcagagcacccagagcaatggcagcgagagcagcagcagcagcaacatcagcaccatgctggtgacccatgactacacagctgtgaaggaggatgagatcaacgtgtaccagggcgaggtggtgcagatcctggccagcaaccagcagaacatgttcctggtgttccgggccgccacagaccagtgcccagctgctgagggctggatccctggctttgtgctgggccacaccagcgctgtgattgtggagaacccagatggcaccctgaagaagagcacctcctggcacacagccctgcggctgaggaagaagtctgagaagaaggacaaggatggcaagcgggagggcaagctggagaatggctacaggaagagccgggagggcctgagcaacaaggtgtctgtgaagctgctgaaccccaactacatctatgatgtgcccccagagtttgtgatccccctgtctgaggtgacctgtgaaacaggagagaccgtggtgctgcgctgccgggtgtgtggccggcccaaggccagcatcacctggaagggccctgagcacaacaccctgaacaatgatggccactacagcatctcctacagcgacctgggggaggccaccctgaagatcgtgggcgtgaccacagaagatgatggcatctacacctgcatcgctgtgaatgacatgggcagcgccagcagcagcgccagcctgcgggtgctgggccctggcatggatggcatcatggtgacctggaaggacaactttgacagcttctacagcgaggtggccgagctgggccgggccaactggaacaactggagcccctactag

SEQ ID NO: 170434 - DNA, 8766 bp, Artificial Sequence
  derived and/or modified sequence
atgagcggcagcagtggaggagctgctgccccagctgccagcagcggccctgctgctgctgccagcgctgctggcagcggctgcggcggcggggccggggagggcgctgaggaggccgccaaggacctggccgacattgctgccttcttccgcagcggcttcaggaagaatgatgagatgaaggccatggatgtgctgcccatcctgaaggagaaggtggcctacctgagcggcggccgggacaagaggggcggccccatcctgaccttccctgcccggagcaaccacgaccgcatccggcaggaggacctgcggcggctcatctcctacctggcctgcatccccagcgaggaggtgtgcaagaggggcttcaccgtgattgtggacatgaggggcagcaagtgggacagcatcaagcccctgctgaagatcctgcaggagagcttcccctgctgcatccacgtggccctgatcatcaagccagacaacttctggcagaagcagaggaccaactttggcagcagcaagtttgaatttgagaccaacatggtgtccctggagggcctgaccaaggtggtggaccccagccagctgaccccagagtttgatggctgcctggagtacaaccacgaggagtggattgagatccgggtggcctttgaggactacatcagcaatgccacccacatgctgagccggctggaggagctgcaggacatcctggccaagaaggagctgccccaggacctggagggcgccaggaacatgattgaggagcacagccagctgaagaagaaggtgatcaaggcccccatcgaggacctggacctggagggccagaagctgctgcagaggatccagagcagcgagagcttccccaagaagaacagcggcagcggaaatgctgacctgcagaacctgctgcccaaggtgtccaccatgctggaccggctgcacagcacccggcagcacctgcaccagatgtggcacgtgaggaagctgaagctggaccagtgcttccagctgcggctgtttgagcaggatgctgagaagatgtttgactggatcacccacaacaagggcctcttcctgaacagctacacagagatcggcaccagccacccccacgccatggagctgcagacccagcacaaccactttgccatgaactgcatgaatgtgtatgtgaacatcaaccgcatcatgtctgtggccaaccggctggtggagagcggccactacgccagccagcagatccggcagatcgccagccagctggagcaggagtggaaggcctttgctgctgccctggatgagaggagcaccctgctggacatgagcagcatcttccaccagaaggccgagaagtacatgagcaatgtggacagctggtgcaaggcctgtggggaggtggacctgcccagcgagctgcaggacctggaggatgccatccaccaccaccagggcatctatgagcacatcaccctggcctacagcgaggtgtcccaggacggcaagagcctgctggacaagctgcagaggcccctgaccccaggcagcagtgacagcctgacagccagcgccaactacagcaaggctgtgcaccacgtgctggatgtgatccacgaggtgctgcaccaccagaggcagctggagaacatctggcagcacaggaaggtgcggctgcaccagaggctgcagctgtgtgtgttccagcaggatgtgcagcaggtgctggactggattgaaaatcatggagaggccttcctgagcaagcacactggagtgggcaagagcctgcaccgggcccgggccctgcagaagagacatgaagattttgaggaggtggcccagaacacctacaccaatgctgacaagctgctggaggccgctgagcagctggcccagacaggagaatgtgaccctgaggagatctaccaggccgcccaccagctggaggaccgcatccaggactttgtgagaagagtggagcagaggaagatcctgctggacatgtctgtgtccttccacacccacgtgaaggagctgtggacctggctggaggagctgcagaaggagctgctggatgatgtgtatgcagagagcgtggaggccgtgcaggacctgatcaagagatttggccagcagcagcagaccaccctgcaggtgacagtgaatgtcatcaaggagggggaggacctgatccagcagctgcgggacagcgccatcagcagcaacaagaccccccacaacagcagcatcaaccacattgaaacagtgctgcagcagctggatgaggcccagagccagatggaggagctgttccaggagaggaagatcaagctggagctgttcctgcagctgcgcatctttgaaagagatgccatcgacatcatcagtgacctggagagctggaatgatgagctgagccagcagatgaatgactttgacacagaggacctgaccatcgccgagcagaggctgcagcaccacgccgacaaggccctgaccatgaacaacctgacctttgatgtgatccaccagggccaggacctgctgcagtatgtgaatgaggtgcaggccagcggcgtggagctgctgtgtgacagagatgtggacatggccaccagggtgcaggacctgctggagttcctgcacgagaagcagcaggagctggacctggccgctgagcagcacaggaagcacctggagcagtgtgtgcagctgcggcacctgcaggccgaggtgaagcaggtgctgggctggatcagaaatggagagagcatgctgaatgccggcctcatcacagccagcagcctgcaggaggccgagcagctgcagcgggagcacgagcagttccagcacgccatcgagaagacccaccagagcgccctgcaggtgcagcagaaggccgaggccatgctgcaggccaaccactatgacatggacatgatccgggactgtgccgagaaggtggccagccactggcagcagctgatgctgaagatggaggaccggctgaagctggtgaatgcctctgtggccttctacaagaccagcgagcaggtgtgcagcgtgctggagagcctggagcaggagtacaagcgggaggaggactggtgtggcggcgctgacaagctgggccccaacagcgagacagaccacgtgacccccatgatcagcaagcacctggagcagaaggaggccttcctgaaggcctgcaccctggccaggagaaatgctgatgtgttcctgaagtacctgcacaggaacagcgtgaacatgcctggcatggtgacccacatcaaggcccctgagcagcaggtgaagaacatcctgaatgagctgttccagcgggagaacagagtgctgcactactggaccatgaggaagaggcggctggaccagtgccagcagtatgtggtgtttgagaggtctgccaagcaggccctggagtggattcatgacaatggagagttctacctgagcacccacaccagcacaggcagcagcatccagcacacccaggagctgctgaaggagcacgaggagttccagatcacagccaagcagaccaaggagcgggtgaagctgctgatccagctggctgatggcttctgtgagaagggccacgcccacgccgctgagatcaagaagtgtgtgacagctgtggacaagcgctacagagacttcagcctgaggatggagaagtaccgcaccagcctggagaaggccctgggcatcagcagtgacagcaacaagagcagcaagagcctgcagctggacatcatcccagccagcatccctggcagcgaggtgaagctgagagatgctgcccacgagctgaatgaggagaagaggaagagcgcccggaggaaggagttcatcatggccgagctgatccagacagagaaggcctacgtgcgggacctgcgggagtgcatggacacctacctgtgggagatgaccagcggcgtggaggagatccccccaggcatcgtgaacaaggagctgatcatctttggaaacatgcaggagatctatgagttccacaacaacatcttcctgaaggagctggagaagtatgagcagctgcctgaagatgtgggccactgctttgtgacctgggccgacaagttccagatgtatgtgacctactgcaagaacaagccagacagcacccagctgatcctggagcacgccggcagctactttgatgagatccagcagagacatggcctggccaacagcatcagcagctacctgatcaagcctgtgcagaggatcaccaagtaccagctgctgctgaaggagctgctgacctgctgtgaggagggcaaaggagagatcaaggatggcctggaggtgatgctgtctgtgcccaagagggccaatgatgccatgcacctgtccatgctggagggctttgatgagaacatcgagagccagggcgagctgatcctgcaggagagcttccaggtgtgggaccccaagaccctcatcaggaagggccgggagcggcacctgttcctgtttgagatgagcctggtgttcagcaaggaggtgaaggacagcagcggccgcagcaagtacctgtacaagagcaagctgttcaccagcgagctgggcgtgacagaacatgtggagggggacccctgcaagtttgccctgtgggtgggccgcacccccaccagtgacaacaagatcgtgctgaaggccagcagcattgagaacaagcaggactggatcaagcacatccgggaggtgatccaggagaggaccatccacctgaagggggccctgaaggagcccatccacatccccaagacagccccagccacccggcagaagggcagaagagatggagaggacctggacagccagggagatggcagcagccagcctgacaccatcagcatcgccagcaggaccagccagaacaccctggacagcgacaagctgagcggcggctgtgagctgactgtggtgattcatgacttcaccgcctgcaacagcaatgagctgaccatccggcggggccagacagtggaggtgctggagcggccccatgacaagccagactggtgcctggtgaggaccacagacaggagccctgctgctgagggcctggtgccctgtggcagcctgtgcatcgcccacagccgcagctccatggagatggagggcatcttcaaccacaaggacagcctgtctgtgagcagcaatgatgccagccccccagcctctgtggccagcctgcagccccacatgattggagcccagagcagccctggccccaagaggcctggcaacaccctgaggaagtggctgaccagccctgtgcggcggctgagcagcggcaaggcagatggccacgtgaagaagctggcccacaagcacaagaagagccgggaggtgaggaagtctgcagatgctggcagccagaaggacagtgatgattctgctgccaccccccaggatgaaacagtggaggagcggggcagaaatgaaggcctgagcagcggcaccctgagcaagagcagcagcagcggcatgcagagctgtggggaggaggagggggaggagggcgcagatgctgtgcccctgcccccacccatggccatccagcagcacagcctgctgcagcctgacagccaggatgacaaggccagcagccggctgctggtgcggcccaccagcagcgagaccccatctgctgctgagctggtgtctgccatcgaggagctggtgaagagcaagatggccctggaggaccggcccagcagcctgctggtggaccagggcgacagcagcagccccagcttcaaccccagcgacaacagcctgctgagcagcagcagccccattgatgagatggaggagaggaagagcagcagcctgaagagaagacactacgtgctgcaggagctggtggagacagagcgggactatgtgcgggacctgggctacgtggtggagggctacatggccctgatgaaggaggatggagtgcctgatgacatgaagggcaaggacaagatcgtgtttggaaacatccaccagatctatgactggcaccgggacttcttcctgggggagctggagaagtgcctggaggaccctgagaagctgggcagcctgtttgtgaagcatgaaagaaggctgcacatgtacatcgcctactgccagaacaagcccaagtctgagcacatcgtgtctgagtacatcgacaccttctttgaggacctgaagcagaggctgggccaccggctgcagctgacagacctgctgatcaagcctgtgcagaggatcatgaagtaccagctgctgctgaaggacttcctgaagtacagcaagaaggccagcctggacaccagcgagctggagagagctgtggaggtgatgtgcatcgtgccccggcgctgcaatgacatgatgaatgtgggccgcctgcagggctttgatggcaagatcgtggcccagggcaagctgctgctgcaggacaccttcctggtgacagaccaggatgctggcctgctgccccgctgccgggagcggcgcatcttcctgtttgagcagatcgtcatcttcagcgagcccctggacaagaagaagggcttctccatgcctggcttcctgttcaagaacagcatcaaggtgtcctgcctgtgcctggaggagaatgtggagaatgacccctgcaagtttgccctgaccagcaggactggagatgtggtggagaccttcatcctgcacagcagcagccccagcgtgcggcagacctggatccacgagatcaaccagatcctggagaaccagaggaacttcctgaatgccctgaccagccccatcgagtaccagaggaaccacagcggcggcggcggcggcggcggcagcggcggcagcggcggcggcggcggcagcggcggcggcggggcccccagcggcggcagcggccacagcggcggccccagcagctgtggcggggcccccagcaccagccgcagccggcccagccgcatcccccagcctgtgcgccaccacccccctgtgctggtgtcctctgctgccagcagccaggccgaggccgacaagatgtctgagagcgagagcagcagcagcagcaacatcagcaccatgctggtgacccatgactacacagctgtgaaggaggatgagatcaacgtgtaccagggcgaggtggtgcagatcctggccagcaaccagcagaacatgttcctggtgttccgggccgccacagaccagtgcccagctgctgagggctggatccctggctttgtgctgggccacaccagcgctgtgattgtggagaacccagatggcaccctgaagaagagcacctcctggcacacagccctgcggctgaggaagaagtctgagaagaaggacaaggatggcaagcgggagggcaagctggagaatggctacaggaagagccgggagggcctgagcaacaaggtgtctgtgaagctgctgaaccccaactacatctatgatgtgcccccagagtttgtgatccccctgtctgaggtgacctgtgagaccggggagaccgtggtgctgcgctgccgggtgtgtggccggcccaaggccagcatcacctggaagggccctgagcacaacaccctgaacaatgatggccactacagcatctcctacagcgacctgggggaggccaccctgaagatcgtgggcgtgaccacagaagatgatggcatctacacctgcatcgctgtgaatgacatgggcagcgccagcagcagcgccagcctgcgggtgctgggccctggcatggatggcatcatggtgacctggaaggacaactttgacagcttctacagcgaggtggccgagctgggccggggccgcttctctgtggtgaagaagtgtgaccagaagggcaccaagagagctgtggccaccaagtttgtgaacaagaagctgatgaagagggaccaggtgacccatgagctgggcatcctgcagagcctgcagcaccccctgctggtgggcctgctggacacctttgagacccccaccagctacatcctggtgctggagatggctgaccagggccgcctgctggactgtgtggtgcgctggggcagcctgacagagggcaagatccgggcccacctgggggaggtgctggaggccgtgcgctacctgcacaactgcagaattgcccacctggacctgaagccagagaacatcctggtggatgagagcctggccaagcccaccatcaagctggccgactttggagatgctgtgcagctgaacaccacctactacatccaccagctgctgggcaaccctgagtttgctgcccctgagatcatcctgggcaaccctgtgtccctgaccagtgacacctggagcgtgggcgtgctgacctacgtgctgctgtctggagtgagccccttcctggatgacagcgtggaggagacctgcctgaacatctgccgcctggacttctccttcccagatgactacttcaagggcgtgtcccagaaggccaaggagtttgtgtgcttcctgctgcaggaggaccctgccaagaggcccagcgctgccctggccctgcaggagcagtggctgcaggccggaaatggccgcagcactggagtgctggacaccagccggctgaccagcttcatcgagaggaggaagcaccagaatgatgtgcggcccatccgcagcatcaagaacttcctgcagagccggctgctgccccgggtgtag

SEQ ID NO: 170435 - DNA, 1791 bp, Artificial Sequence
  derived and/or modified sequence
atgctgcccagccaggcccagggcctgctgtggtgggtgttccccctctttcccgccagttccctcagttacccacctgtgtcgtacagagcagatgggcttgcccggaacacctttctgaaagcctgttcagaaagcagctcatcctccaacatttccacaatgctggttacacatgactacacagctgtaaaagaggatgaaatcaacgtctaccagggcgaggtggtgcagatcttagcttcgaatcagcaaaatatgtttctggtgtttagggcggctacggaccagtgccctgctgcagagggctggatccccggctttgtgctgggccacacaagcgccgtaattgtcgagaatcctgatgggaccttaaagaaaagcacaagctggcacaccgcactcaggttgcgcaaaaagagtgaaaagaaagacaaagacggcaagcgcgaaggcaaacttgaaaacgggtaccgaaagtcacgtgaggggctgagcaataaggtgagcgtgaaacttctgaatcctaactacatctatgacgtgcctccggagttcgtgattcccctgtccgaagttacttgtgaaaccggtgaaactgtagtgctccggtgtcgcgtgtgtggtaggccaaaagccagtataacctggaagggtccagagcacaatactctcaacaacgacgggcattactctatttcgtacagtgatcttggggaagctaccttgaagatcgtcggagtgactacggaagacgacggcatttacacatgcattgctgtaaatgatatgggttccgctagctcttccgcgtcgctccgcgtgctaggccctggaatggatgggattatggtcacatggaaagataacttcgacagtttttactcagaggttgctgagcttggccggggcaggttttccgtggtgaagaaatgcgatcagaagggtacaaagcgcgcagtggcgacaaagtttgtgaataaaaaactaatgaagagagaccaggtgactcatgagctgggcatcctgcaatccctccagcaccccttacttgtgggcttgctggacaccttcgagacaccaactagttacattctggtattagaaatggccgatcaggggaggcttcttgattgtgttgtcagatggggctccttgactgagggtaaaattcgggctcaccttggagaggtactggaggccgtccggtacctgcacaactgccgaatcgcacacctagaccttaagcctgagaatattttggtcgacgagagcttggctaagcctactatcaaattggcggacttcggcgacgctgtccagctgaacacaacctattatattcatcagctgctggggaatcctgaattcgcggcacctgaaatcatccttggaaatccagtatcgctgacttcagacacgtggagcgtcggggtcttgacctatgttctcctctctggtgtttccccctttctggacgattcagtcgaagaaacgtgccttaacatttgtcggcttgatttctctttcccggacgattactttaaaggagtctcccagaaagccaaggagtttgtatgtttcctattgcaagaagatcccgcaaaaaggccgtccgccgccttggcactacaggagcagtggctgcaggccggcaatggccgatccactggcgtgcttgatacatcaaggctgacatcattcatcgaacggaggaagcatcagaacgacgtgcggccgatacgcagcatcaagaacttcctccaatctcgcttactgcctcgcgtatag

SEQ ID NO: 170436 - DNA, 9294 bp, Artificial Sequence
  derived and/or modified sequence
atgagcggcagcagcggcggcgccgccgcccccgccgccagcagcggccccgccgcagctgcttctgctgccgggtcaggatgtggtggcggcgccggggaaggcgctgaggaggctgcaaaagacctagccgatatagccgccttctttcggtctgggttcaggaaaaatgacgagatgaaagcgatggatgtactccccatcctcaaagagaaagtagcctacctgagtggtggccgagataagagagggggacccatacttacgttccccgcgcggtctaaccacgaccgcatccgtcaggaggaccttcggcgcttaatcagctacctggcctgcattcctagtgaggaagtgtgcaagcggggtttcaccgtgattgtggatatgcggggcagtaagtgggactctataaagccgctcctgaagatattacaggaatctttcccatgctgtatccatgtagctctcatcatcaagcctgacaacttctggcagaaacaaaggaccaactttggtagttctaaattcgagtttgaaacaaacatggtaagcctggaaggactgactaaggtggtcgacccttctcagctgacccctgaatttgatggctgtctcgagtacaaccatgaggagtggatcgaaatcagggttgcatttgaggactacattagtaatgctactcatatgctttctaggctggaggaactacaggatatactcgccaagaaagaactgccacaggacttggagggggcccggaacatgattgaggaacattcacaactgaagaagaaggtgataaaagcacctattgaggatctggacctcgaaggacaaaagctgttgcagcgaatccaatctagcgaatcattcccaaaaaagaactccggaagcgggaacgccgatctccagaatctattgccaaaggtgagcacgatgttggacaggcttcactctacacgacagcacctacaccagatgtggcacgtgcgcaaattgaagttagaccaatgcttccagctgaggctcttcgaacaagatgctgaaaaaatgtttgattggattactcacaataaagggttgttcctcaattcttacactgagattggaacaagccatcctcacgcaatggaacttcaaacccaacataaccacttcgcaatgaactgtatgaatgtctacgtcaatattaaccggattatgtctgtcgccaaccgcttagtggagagcggacactatgcaagccagcagattaggcagatcgcatctcaattggaacaggagtggaaagctttcgcagccgcgctggatgaaaggagcaccctccttgacatgtctagcatcttccatcagaaagcagagaagtatatgagcaatgtggatagctggtgtaaggcatgcggcgaggttgatctgcctagcgagctacaggatctggaggacgccattcatcatcatcagggtatctacgagcacataacactcgcctacagtgaggttagccaagacggcaaaagtctgttggacaagctgcagcgccctttgacacctggctcctctgattctctgactgctagcgcaaattattcaaaggccgttcaccatgtgttggatgtgattcacgaagtactgcaccaccagaggcagctggaaaatatttggcagcaccggaaagttcgactgcatcagagattacagttgtgcgttttccagcaagatgtgcaacaagtgctggactggatcgagaaccatggtgaagctttccttagcaagcacactggcgtggggaagagcttacacagagccagagccctgcagaaaagacatgaagacttcgaagaggtagcccagaatacctacactaatgcagacaaactgctggaggcagctgagcagctagctcagacaggcgaatgcgaccctgaagagatataccaggccgcccatcagctagaggatcgcatccaggacttcgtacgcagagtcgaacagcgcaaaatcttactggatatgtcagtgtccttccacactcacgtgaaggagctctggacttggctggaggagctgcagaaagaactgctggatgacgtgtacgccgagagcgtagaggcagtacaggacctcatcaaacgattcggacagcaacagcagactactctccaggtgacagtcaacgtgatcaaagagggcgaagatctaatccagcagctgcgagattcagcgatatctagcaataagacacctcacaactccagcatcaatcatattgaaaccgtactgcaacaactagacgaggcccagtcgcagatggaagagctctttcaagagcgaaagatcaaattagaactgtttttacagctgcggatctttgagcgtgatgctatagatattatttcagatctggagtcatggaatgacgagctaagccagcagatgaacgacttcgacaccgaggatctcaccattgccgaacagcgcctacaacatcatgctgacaaagctttgaccatgaacaacctgacattcgacgtcatccatcaggggcaagaccttttacagtacgtgaacgaagtacaagccagtggtgtggaactcctgtgtgatcgagatgtcgacatggctacccgggtgcaggacctactcgagttccttcatgaaaagcagcaggagctcgaccttgccgcggagcagcacaggaaacatctggaacagtgtgtgcagcttcggcatttacaggctgaggttaaacaggtcctaggctggatcaggaacggcgagtctatgctcaacgccggtttaattactgcctcatcgctgcaggaggcagagcagctgcagagagagcatgaacaattccagcacgccatagaaaagactcatcagtcagcattgcaggtgcagcagaaggccgaggccatgcttcaggctaatcattacgatatggacatgataagggactgcgccgagaaagtcgcttcacattggcagcagctgatgttaaagatggaagatcgcctcaaacttgtgaatgcctctgtggccttctacaaaacctccgagcaagtgtgttcagtgttggaaagcctagagcaggaatacaaacgagaggaggactggtgcggcggcgcagacaaacttggacctaactcagagactgatcacgtcacaccaatgataagcaaacacttagaacagaaagaggctttcctgaaagcttgcacactggcccgcagaaatgcagatgtttttttgaaatatttacacaggaattccgtcaacatgccagggatggtcactcacattaaggcccccgagcagcaggtgaaaaatatacttaatgaactctttcagagggaaaatagagtactccattactggaccatgagaaaacggcgactagaccaatgccagcagtatgtggtgttcgagcgctctgccaagcaggccctcgaatggattcacgacaacggggagttttatctgtccacccacacgagtacagggtcatccatccagcatacccaagagctcctgaaggaacatgaggaattccaaataaccgcaaagcaaactaaagaacgtgtcaagcttctgatacaactcgcggatggcttctgcgaaaaaggccacgcacacgctgccgagattaaaaagtgtgtcacggccgtggacaagcgataccgcgactttagcctgagaatggaaaagtaccgcaccagccttgaaaaagctcttggcatttcatcggactctaataagtcctctaagtccttacagttggacattatcccagcatcgattccaggtagtgaggtgaaattaagggacgccgcccatgagctgaacgaagagaagagaaagtccgctcgcaggaaggagttcatcatggctgagctgatccagaccgagaaggcctacgtgcgggatctcagggagtgtatggacacctacctctgggagatgactagtggggtcgaggaaatacccccaggcatcgtgaataaggagttgattattttcggaaatatgcaggaaatttatgagtttcacaataacatctttctaaaagagctggagaaatacgaacagttacccgaagatgtgggccactgttttgtcacatgggccgataagtttcaaatgtacgtcacctactgtaagaacaaacccgacagcacccagcttattttggaacatgcaggcagctactttgacgaaatccaacagcggcacggtcttgcgaatagcataagcagctacctcatcaaaccagtccagcggattacaaagtaccaattactgttgaaggaactgttgacctgctgcgaagagggaaagggcgaaattaaggacgggttagaggtgatgttatctgtgccaaaacgcgcaaatgacgccatgcacctgtctatgctcgaaggcttcgatgagaacattgagtctcaaggagaacttatactccaagaaagctttcaggtgtgggatccaaagaccctgatcaggaaaggtagggagcgccacttgtttctgttcgagatgtcactcgttttctccaaggaggttaaagattcctccggccgcagtaagtatctgtacaaaagtaagttgtttacatctgagctgggggtgaccgagcacgtcgaaggcgacccttgtaaattcgccctttgggtgggccgaactccgacctccgataacaagattgtgctgaaggccagcagcatcgaaaataaacaggactggattaagcatatccgagaggtcatccaggaaaggacgatccatctcaagggtgccttgaaggagccaatccatatccccaagaccgctccagctacccggcagaaaggccgacgcgatggtgaagacttggacagtcagggcgatggttcaagtcagcccgacaccatcagcatagcttctaggacctcacagaatacactcgactccgataaactttctggagggtgcgagctgactgttgtgattcacgactttaccgcttgtaacagcaatgagctcacaatacgccgaggccagacggtggaggtgctggagcggccacatgataagcccgactggtgtttggtgcgcactactgatcgcagccctgctgccgagggtctggtcccctgtggatctctgtgcatcgcccatagcagatctagtatggaaatggaaggcatcttcaatcacaaagatagtttatcagtaagttccaacgatgctagcccaccagctagtgtggcctcactacagcctcatatgattggcgctcagtcctcacccggtccaaaacgacctggaaataccctacgcaagtggctgacctcccctgtgaggcgcctgtcctctggaaaagcggatggtcatgtgaagaagttagctcacaagcataagaaatccagggaggtcagaaagtctgcggatgccggcagccagaaggatagtgacgatagcgcagcgacaccccaagacgaaaccgtggaggagcgggggcgcaacgaggggctgtcgtctggtacgctaagtaaatccagctccagcggcatgcaatcatgcggcgaagaggaaggagaggagggcgccgacgcggtacctctgccccctcccatggctatccagcagcactctctcttacagcctgattctcaggacgataaggcatcgagccgcttgctggtgcgtcctacgtcgagcgagaccccatctgccgccgagttagtaagcgccatcgaagagctggtgaaaagcaagatggcactcgaagatcgcccttcctcccttctggtggaccagggggactcaagcagtcccagttttaatccttctgacaactctttgctcagtagcagctccccaattgacgagatggaagaacgaaagagttcaagcttaaagcggcggcactatgtacttcaggagctcgtcgagactgagagagattacgttagagacctgggttacgtagtcgagggatatatggcccttatgaaggaggacggtgttcctgacgatatgaaggggaaagacaagatcgtgttcggcaatatacatcagatatatgattggcatagagactttttcctgggggaattggaaaaatgtctcgaagaccccgagaaactcggcagccttttcgtgaaacatgagagaagactccacatgtacattgcctactgccaaaacaaacccaaatccgaacatatagtctcagagtatattgacacattcttcgaggatctgaagcaaagactcggccaccgcctccaactaaccgacttactgatcaagcctgtacagcggataatgaagtatcaactcttgctaaaggatttcctgaaatactccaaaaaagcctcgctggacacatcagagctggagcgggctgtggaggtcatgtgcatagtgccccggcgctgtaatgacatgatgaatgtcggacgtcttcagggcttcgacggaaaaatagtggctcaggggaaactgctccttcaggacacatttctggtcacggaccaggacgcaggactcctgccccgctgcagggagcgtagaatcttcctgttcgagcagatcgtgatattctccgagccactggacaagaaaaaagggttctcaatgcctggtttcctgttcaagaattctataaaggtgtcctgcttatgtcttgaggagaatgtggaaaatgacccctgtaagtttgcgctcacaagtagaaccggggacgtggtcgagacctttatcctccacagttcatcaccttctgtcagacaaacatggattcacgaaatcaatcagatattggagaatcagcgcaattttctgaatgcattgacaagccccattgagtatcagcgcaatcattctgggggcggaggcggcggcggctccggtggctcaggaggcggaggcgggagcggtggaggaggcgctccgtccggtggctctggacactcaggagggccctcaagttgcggcggagccccctcaacttccagaagtcggccaagcagaataccacaacctgtccgccaccatccaccggtcttggtcagtagtgcagcttcatcacaagcagaggctgataagatgtcgggaacgtccacccctggaccgagtctaccccctcccggcgccgctcctgaagccggacccagcgccccatccaggcggcctcctggcgctgatgcggaaggatcagagagagaggcagagcctatccctaaaatgaaggtgctggagagccctagaaagggagcagccaacgcaagcgggagttcccctgacgcacctgcgaaagatgcccgagcttccctcggcaccttaccccttgggaagccccgcgccggggccgccagcccccttaacagccctctgtcaagcgcggtcccgtctttggggaaagaaccctttcctccttcatcccctctgcagaagggtggatcattctggtcgtctattcctgccagccccgccagtcgccccgggagcttcacattccccggcgacagcgactcccttcagcgacaaacacccaggcacgccgcccctggtaaagataccgaccgcatgtctacctgctcatctgcatctgaacagagcgtgcaatctacgcagtccaatggatcggaatcctcttcttcaagcaatatctccacgatgctcgtcactcacgactacaccgcggttaaagaggacgagatcaacgtctatcagggggaagtagtgcaaatccttgccagtaaccagcaaaatatgtttctggtgttcagagcagcgaccgatcaatgcccagctgctgagggatggatcccaggttttgtcctgggccatacaagtgctgtgattgtggagaatcctgatgggacattaaaaaagtccacaagctggcataccgctttacgactgcggaaaaaaagcgaaaagaaggacaaggatgggaagagagaggggaagctggagaacggttaccggaagtccagggaaggcctcagtaacaaagtatccgttaaattactgaatcctaattacatttatgacgtaccacctgaattcgtcatcccgctgtctgaggtgacgtgtgaaaccggagaaactgtggtgcttagatgccgcgtctgtggccggcctaaggcatccatcacctggaagggaccagagcataatacactcaataacgatggccattattccatcagttatagtgacctaggtgaggccactctgaagatcgtgggggtcactactgaggatgatggaatttacacctgcattgcagttaacgacatgggctcagccagttcttccgcatctctccgggtgttgggacctggaatggacggcatcatggtgacgtggaaggataacttcgactctttttattctgaagttgctgaacttggcagaggccgattttccgtggttaagaagtgtgatcaaaaaggaaccaagcgggccgttgccacaaaattcgtgaacaaaaaactcatgaagagggaccaagtcacccatgagctcggaatactgcaaagtctccagcaccctttacttgtcggtctgctcgatacgttcgagactcctacatcatacatccttgtcctggagatggctgaccagggacgcctgctggattgcgtggtcaggtggggttctcttaccgagggtaaaattcgcgcacatctgggagaagtccttgaggcagtgaggtacctccacaactgccggatagcacatctggacctcaagcccgagaacatcttagtcgacgagtcattggcaaaacccacaatcaaattggcagactttggcgacgccgtccagttgaatactacatactacattcaccagttgttaggcaatcctgagtttgctgctcccgagattatccttgggaatcccgtaagcctgacctcggacacatggagtgtgggcgtcctcacttatgtgctgctgtccggcgtctctccttttctggatgatagcgtggaagaaacctgtctcaatatttgcagactggacttctctttccccgatgactacttcaagggggtgtcacagaaagcaaaagaattcgtgtgcttcctactacaggaggacccggctaaaagacctagcgctgccctagccttgcaggagcagtggttgcaggctggcaatggccgatccacaggggttcttgacaccagtcgcttgaccagtttcatcgagcggagaaagcaccagaacgatgtgagacccattcggtctatcaaaaacttcctacaatccagattgcttccccgagtttag

SEQ ID NO: 170437 - DNA, 7503 bp, Artificial Sequence
  derived and/or modified sequence
atgctggaccggctgcacagcacccggcagcacctgcaccagatgtggcatgtccgaaaattaaagctagatcaatgttttcaactgaggctgtttgaacaggatgccgagaagatgttcgactggattacccataataaaggtctgttcctaaatagctatacagagatcggaacttcccacccacacgccatggaactgcagactcagcacaatcatttcgccatgaattgtatgaatgtctatgtgaatattaacagaattatgtccgtggccaacaggctggtcgagagtggacactatgcctctcagcagattcggcagattgcctcccaattagagcaggagtggaaggccttcgccgccgccctggatgaacgcagtacattgctagatatgtctagtattttccatcagaaagccgaaaaatatatgtcaaatgttgacagctggtgcaaggcctgtggcgaggtggacttgccctccgagcttcaagaccttgaggacgctattcaccatcaccaggggatctatgaacatatcacactggcatactctgaagtctcacaggacgggaaatcccttctcgacaagctccaacggcccctcacccccggttcttccgattcactgacagcttccgccaattattcaaaagcggtccatcacgtcttggatgtgatccacgaggtccttcaccatcaaagacaacttgagaacatttggcagcaccgaaaggtccgcttgcaccagcggctccagctgtgcgtctttcagcaagatgtccaacaggttctggattggattgaaaaccacggcgaagccttcctctccaaacatactggcgttggaaagagccttcatcgggcgagggcgttacaaaagagacacgaagacttcgaggaggtggcgcagaacacatatactaacgcagacaagctgctggaggcagctgaacagttggcccagaccggggaatgtgatcctgaggaaatctaccaagccgcgcaccagcttgaggacagaattcaggatttcgtccgtagagtggaacagaggaaaatactcctggatatgagtgtctcctttcatacccacgtgaaggaactgtggacttggctggaggaactgcaaaaagagctgctcgatgacgtttatgctgaaagcgtggaagccgtgcaggacctcatcaagaggtttggacagcagcagcagactacactccaggtcacagtcaacgtcataaaggagggtgaagacctgatccaacaacttcgcgactcagcaatctcttctaataagacgccccacaacagctcgattaatcacattgagaccgtgctacagcaactggatgaagcacagtctcagatggaggagttgtttcaggaaaggaagattaagctggaactgtttcttcaactccgcatctttgaaagagatgcaatcgacatcatatcggacctggagagctggaatgacgagctcagccagcagatgaacgattttgacacagaggacctgacaatagccgagcagagactccagcaccacgccgacaaagccttaacaatgaacaacctgaccttcgacgtcattcatcaaggacaggacctgctgcaatatgttaacgaagtgcaggcctccggcgtggaactgttatgtgatagagatgtggatatggccacgagagttcaggatctactggagtttctccatgagaagcagcaggagttggacctggcagccgagcagcacaggaagcacctagaacaatgtgtgcagctccgccatctgcaagccgaagtgaagcaggtgctgggctggatccggaatggtgaatcaatgcttaacgcggggctgattacagccagttccctccaggaagccgaacagctgcaacgggagcacgaacaattccagcacgcaattgagaaaacccaccaatctgcgctgcaagtgcaacagaaggcagaggcgatgctgcaggccaaccattacgacatggacatgattcgggactgtgcggagaaggtggcgagtcattggcagcagctgatgctcaagatggaggatcggctaaaattggtgaatgctagcgtggccttctataagaccagtgagcaagtgtgttctgttctcgagtctctggaacaggagtataaacgggaagaggactggtgtggtggagccgacaagctgggacccaacagtgagactgaccatgttactcctatgatatccaaacatcttgaacagaaggaggcatttctgaaggcatgtaccctcgctcgacgcaatgccgatgtcttccttaagtaccttcaccgcaattccgtgaacatgcctggcatggtaactcacataaaggccccagagcaacaagtgaagaatatcctgaatgaattattccaaagagagaacagggtgctgcactactggacaatgcgtaaacgtagacttgatcagtgccaacagtacgttgtcttcgaacgctccgctaaacaagccctggagtggatccatgacaacggcgaattttatctgtcaacgcacaccagcaccggcagctcaatccagcatacccaagaactgctgaaggaacacgaagagtttcagatcaccgccaagcagacaaaagagagagtcaaactgctgattcaactcgcagacggcttctgcgagaaggggcacgcccacgcagcggaaatcaagaagtgcgtgaccgccgttgacaagcgataccgggatttttccctcaggatggagaagtaccgcacgagcctcgagaaagcacttggtattagcagcgattctaacaagagctcaaagagcttgcagttggacattattccggcgagtattccaggcagcgaggtgaaactccgggatgccgcacacgagttaaatgaggaaaagcgaaaatcggcacgaagaaaagaattcatcatggcggaactcattcaaactgagaaggcttacgtgagggatttgcgggaatgcatggatacttacctctgggaaatgacctcaggcgtggaggagattcccccagggatagtgaacaaggagttaataatcttcggtaatatgcaggaaatatatgaattccacaataatattttcctgaaggaactagaaaagtacgagcagctacccgaggatgttggtcattgcttcgtgacttgggcagacaaatttcagatgtacgtcacttattgtaaaaacaagcctgacagcactcagctgatactagaacacgccggtagctattttgatgagatccagcagcgacatggcctcgctaactcaataagcagttatctaattaaacctgttcagcggatcacaaaataccagttactgctgaaagaattgttaacttgttgtgaggagggcaagggtgagatcaaagatggccttgaagttatgctgagcgttccgaaacgcgccaatgacgccatgcaccttagcatgctggaagggtttgatgagaacatagagtcccagggcgagctcattcttcaggaaagctttcaggtttgggaccccaaaacactgatccgtaagggcagggagaggcacctttttctattcgagatgagtttagtgttcagcaaagaggtcaaagatagttccgggcggagcaagtacttatacaaaagcaaactgtttaccagcgagctgggcgtgaccgaacacgtggagggggacccctgcaagttcgcgctatgggtcggacgaaccccaaccagcgataataagatcgtgttgaaggctagtagcatagaaaacaaacaggactggattaagcatatccgcgaggtaatccaggagaggactatacatctgaagggcgcgctaaaagaaccaatccatatcccgaagacagctccagcgacgcggcagaagggcagaagggacggagaagatttagacagccagggggacgggtcttcccagcccgatacaatcagtatcgcctcacgcacctctcagaacaccctcgacagtgataaactttctggaggctgtgaacttactgtagttattcacgacttcacagcctgcaactctaacgaacttaccatccggcgaggccagacagtggaagtgcttgaaagaccacatgacaagccggactggtgcctcgtgcgcactacagatcgatcccccgcagctgaggggctggtcccttgtggctctttgtgcatagcccatagtcgtagttcaatggagatggagggtatttttaaccataaggactcccttagtgtgtcatcaaatgacgccagtcctcctgcttcagtcgcatcactgcagccccatatgattggggcccagtcctcacccggaccaaagagaccgggcaatacccttcgaaagtggttaacatcccccgttcggcggctatcctcaggaaaggcagatggccatgtgaaaaaactggcacacaagcataaaaaaagcagggaggtacgcaagtccgcagacgccgggagtcagaaggactcagatgatagtgctgctacaccacaggatgagacagtcgaagagagggggaggaacgagggcctctcaagcgggactctgtccaagagttcctccagcggcatgcagtcttgtggagaagaagagggggaagaaggcgccgatgccgtccccctccccccccccatggccatccagcagcactccctgctccaacccgattcacaagatgacaaggcttcctcccggctcctggtgaggcctaccagcagcgagacccccagcgctgctgagctcgtatcagcaatcgaagaattggtgaagtctaagatggctctggaagatcggccttcgtccctcctcgtcgaccagggagatagctcgagccccagcttcaaccccagcgataactcactcttgagctcttcttccccgatcgacgagatggaggagagaaaatccagttccctcaaaaggaggcattacgtcctccaggaactggtggagaccgaacgggactacgttcgtgatctcggttacgtggtggaaggctacatggccttaatgaaggaagatggagttccagacgacatgaagggcaaggataaaatcgtcttcggtaatatccaccagatctacgactggcatcgggactttttcctaggcgagcttgaaaaatgccttgaggacccagagaaactgggctcactatttgtcaaacacgagcgccgcctgcatatgtacatcgcctactgtcagaataaacccaaaagtgagcacatagtatcagaatatattgacacattctttgaagatctgaagcagagacttggtcaccgactgcagctgacggacctgcttatcaagcccgtgcagcgaatcatgaaataccagctcctgctaaaagactttctcaaatactcaaagaaggctagtttggatactagtgagctcgagcgcgccgtagaggtcatgtgcattgtcccccgccgctgcaatgacatgatgaacgtgggcagactgcagggttttgacggtaaaatcgtcgcacagggaaaactgttattgcaagacaccttcctggtgactgatcaggatgctgggttgctacctcgctgcagagagaggcgaatttttctgttcgaacaaattgtcatctttagcgaaccccttgacaagaagaaagggttctctatgcctggtttcctgttcaagaattctatcaaggtgtcctgcctctgcctggaggagaacgtggaaaatgatccttgcaaattcgccctgacctcgcggactggagatgtcgtcgagacattcattctgcacagcagttcaccttccgtgcgccagacatggattcacgagatcaaccagatactggaaaatcagcgcaactttctcaatgccctcactagcccaattgagtaccagcgaaatcactccgggggcggaggggggggcggaagtggcggtagtggaggcggcggaggttccggcggcggaggagccccatccgggggcagcggccattcaggggggccttcatcatgcgggggcgccccatccacgtcacggagtagaccttcacgtatcccacaaccagttcgtcaccacccccccgtacttgtatcaagcgcagccagttcccaggccgaggcagacaagatgtctggcacctctaccccaggcccttcgttaccaccccctggggctgcgcccgaggcagggcccagcgcaccaagcaggcggcccccaggagcagacgctgagggctcagaaagagaagccgagccaattccaaagatgaaagtacttgagtcaccccgcaagggtgccgctaacgccagtgggtctagccccgatgcgccggctaaagatgccagggctagcctgggaactttgccgttgggaaagccacgggctggagctgcctctccactcaactctccactcagctcagctgtcccgtccctgggcaaagagccattcccgccttcatctcctctgcaaaagggtggcagcttctggtcgtcaattcccgcttctccggctagtagacccggcagctttacgtttcctggcgattctgacagtttacagaggcagacaccaagacacgccgccccaggaaaagataccgataggatgtccacctgtagctccgcctctgaacaaagtgttcagtcaacccagtctaacggttcggaaagttcatcatcctccaacatctctaccatgctcgttacacacgattatactgctgtgaaagaggacgaaatcaatgtttatcaaggcgaagtggtgcagatactggccagcaaccagcagaatatgttcctcgtctttcgcgccgccacggatcaatgtccggctgccgaggggtggattcccgggtttgtactgggccacactagtgcagtgatcgttgagaacccagatgggacactgaaaaaatccacatcctggcacacagctctccggctccggaagaaatccgaaaagaaagacaaggacgggaaaagagaaggcaagctggagaacggttataggaaatcaagggaaggactctcaaataaggtttccgttaaactcctaaaccctaattacatctatgatgtgccaccagagttcgtcattcccttgtcagaggtaacttgcgagaccggggaaacagttgtcttgagatgtagagtctgcggccggcctaaggcttccataacctggaaaggcccagaacacaataccttgaacaacgacggacactactcgatcagctactccgatcttggggaggctaccctaaaaatagtaggtgttaccacggaagacgatggaatctatacctgcatcgccgttaacgacatggggtcggccagttcaagtgcatccctacgagtactgggccctgggatggacggcattatggtcacgtggaaggataattttgacagtttttattctgaggtcgcagagttggggcgtgctaactggaacaactggtctccatattag

SEQ ID NO: 170438 - DNA, 8766 bp, Artificial Sequence
  derived and/or modified sequence
atgagcggcagcagcggcggcgccgccgcccccgccgccagcagcggacctgctgccgccgcgtctgctgcagggtccgggtgcggtggtggcgcgggtgaaggtgctgaagaggccgccaaggatctggccgacatcgccgccttttttcgctcgggattccgtaaaaatgacgagatgaaggcaatggatgtactcccgattctaaaggagaaggtggcttacctgagtggcgggcgggataagcggggcggacctatcttaacttttcctgctagaagtaatcatgacagaataagacaggaagacctgcgaaggctgatctcatatctcgcatgtattcctagcgaagaggtctgcaaaagggggtttaccgtcatcgttgacatgaggggctccaagtgggatagtatcaagccattactcaaaatattacaggaaagtttcccctgttgcatacatgtcgctctgatcattaagcccgacaacttttggcagaagcagagaacaaactttggttcttccaagtttgaattcgagacaaacatggtaagcctcgaagggctcaccaaagtcgttgacccctcccaactcacccccgagttcgatggttgcctggaatacaaccatgaggagtggatcgagatccgagtggcattcgaagattacatctcgaacgccacgcacatgctgtcccgcctggaggaactgcaggacatactcgctaagaaggagttgccccaggatttagaaggcgcccggaatatgattgaggagcactcacagctgaaaaagaaggtgatcaaagccccgatagaggatcttgacctggagggacagaagctcctgcagagaatccagtcatccgagtccttccccaagaaaaacagtggtagcggtaacgctgatctgcagaacctgttaccaaaagtgtccactatgctggaccgcctccatagcacccgtcagcatttacaccagatgtggcacgtaagaaaattaaagttggatcaatgtttccagttgcgtctctttgaacaggacgccgaaaaaatgttcgactggataactcataacaaagggttattccttaactcctataccgaaataggaacctcacaccctcatgcgatggagctgcagactcagcacaatcactttgcaatgaactgcatgaacgtgtacgttaatataaacaggattatgtccgttgcaaatagactggtggaatccggacactacgcctctcagcagatccgtcagattgcctcacaattggaacaggagtggaaggccttcgccgcagctctagatgagcgatctacactgttggacatgagctccatcttccaccaaaaagccgagaagtatatgtctaatgtggacagctggtgtaaggcatgtggcgaggtagacctaccctcagagctgcaggacctggaagatgctatccaccaccatcaggggatctatgagcacatcacgctggcttactcagaagtctctcaggacgggaagagtctgctggataagctacagcggccgctcacgcctggttcatctgactccttgactgcttccgccaattacagtaaggccgtccatcacgtactggacgtcatccatgaggtgcttcaccatcaaagacagcttgaaaatatatggcaacaccgcaaggtgcggctccaccagcgcctgcagctgtgtgtgtttcagcaggacgtgcagcaagtcctggactggatcgaaaatcacggggaggctttcctgtcaaaacacactggcgtaggaaagtcgttgcatcgcgcaagagctctccaaaagaggcacgaggacttcgaagaggtggcacaaaatacgtacactaatgctgacaagttacttgaggctgctgaacagctcgcccagacgggcgaatgcgatccagaagaaatctatcaagcagcccaccagctggaagatcgaatacaggatttcgttcgcagggtggagcagcggaaaattctacttgacatgagtgtgagttttcacacccatgtgaaggagctctggacgtggctcgaagaattgcagaaagaactgttagacgatgtgtacgcagaatccgtggaagccgtccaggacttgatcaaacggtttggccagcagcagcagaccaccctgcaggtgaccgtgaatgtcataaaagaaggagaagacctcatccagcaactacgcgacagcgccatttctagcaacaaaacgccccacaacagttccatcaaccacatagaaactgtgttgcaacagctcgatgaggcacaatcacagatggaggagctgttccaagagaggaagattaagcttgagctatttcttcaactccgcatcttcgagcgagatgccattgacattataagtgatcttgaatcttggaatgatgagctctcacagcagatgaatgatttcgacactgaggacctgactatagccgagcaacggttgcagcatcacgccgataaggctctcactatgaacaatctgacttttgacgtcatccaccaggggcaagacctgcttcagtacgtgaatgaagtccaggctagcggagtggaactgctctgcgacagggatgtggacatggccacccgtgtgcaggacctgctggaatttttgcatgaaaaacagcaggaactggatctggccgcagaacagcacagaaagcaccttgaacagtgtgtccaactaaggcatcttcaggcagaagtcaagcaggtcctaggttggattagaaacggggaatcaatgctaaacgcaggactgatcacagctagtagcctgcaagaagccgagcagttgcagcgagaacatgaacagtttcaacatgcgatagagaaaacgcaccaatcagcactccaggtccaacagaaggcggaagccatgctccaagccaaccactatgatatggacatgattcgggactgtgcagagaaggttgcaagccattggcaacagttgatgctcaaaatggaagatcggttaaagctggtgaatgcgtccgtggccttctataagacgagtgagcaggtgtgcagcgtgctggagtcattagagcaggagtacaaaagagaagaagattggtgtgggggagctgataaactagggcccaactcagagaccgaccatgtgaccccaatgatatccaagcacctagagcagaaagaggcatttctaaaagcttgtaccctcgctcgacgcaacgcagacgtgttcctcaaatatcttcatcgtaactctgttaatatgcctggcatggtgactcacatcaaagcacccgaacaacaggtgaagaacatccttaacgaactgttccagcgggaaaaccgcgtgctccactactggaccatgaggaaacggagactagaccagtgtcagcagtacgtggtgttcgaaagaagtgccaagcaggccctggagtggatccacgacaatggtgaattctacctctctacgcacacatctacagggagttctattcagcatacccaggagctcctgaaggagcacgaagaattccagatcacagcaaagcaaactaaagaacgcgttaaattgttgattcagctggctgatggcttttgcgagaagggccacgcccacgcggccgagatcaaaaaatgtgtaaccgctgtcgacaagcgttatcgagatttctcactccgtatggaaaagtacaggacatccctcgagaaggccctaggtattagttctgactctaacaaatccagtaagtccttacagttggacatcatccccgccagtattcctggttcggaggtgaagttaagggatgcggcacatgagctgaacgaagagaagcggaagagcgcgagaaggaaagaattcataatggccgagctaattcagaccgaaaaagcctatgtccgtgatttaagggaatgcatggatacttacctgtgggagatgacatcaggtgtggaagaaatcccccctggcatcgttaacaaggagctgatcatatttggaaatatgcaggagatttacgagtttcacaacaacatcttcctgaaagaattagagaaatacgagcagctcccggaggacgttggacattgcttcgtaacttgggcagataaattccagatgtatgtaacatactgtaaaaacaaacctgacagcacccagttaattctggagcatgcaggaagctactttgacgaaattcagcagcgccatggcctggcgaattccatttcaagttacctcatcaaacccgtccagagaatcacaaagtaccaacttctgctgaaagagctcctgacgtgctgcgaagagggaaagggagaaattaaggacggtcttgaagtgatgctaagcgtgccaaaacgcgccaatgatgctatgcacctttccatgcttgaggggttcgatgaaaacatagagagtcaaggcgagctcatcctacaagagagcttccaagtatgggatcccaagacactaattagaaaaggacgggagcgccatctgttcctcttcgaaatgtcactggttttcagcaaggaagtcaaagatagctcggggagaagtaaatacctttataagagtaaattgtttacctctgagctaggcgttaccgaacacgtggaaggagatccctgcaaattcgctctgtgggtcggcagaacccctacctctgacaacaaaatagtcctgaaggcgtcatcgattgaaaataaacaagactggatcaagcacattagggaggtgattcaggaaaggacaatccatctcaaaggagccctcaaggaacccatccacattcccaaaactgcaccagcaacccgccagaagggtcgtagggacggggaggacctggacagccaaggtgacggatcgtctcagcctgataccatctctatcgcctctcgaacttcccagaacactcttgactccgacaaactgtcaggtgggtgcgaactgacagtcgtcatacacgacttcaccgcctgtaactcaaacgagctgaccatacgtcgtggccaaaccgttgaagtgctagaacgcccacacgacaaaccagactggtgtctggtgagaacgaccgatagatcccctgctgcagagggcctggtgccatgcgggagcctctgcattgcccactcgcggtcctcgatggaaatggagggaatcttcaaccataaagatagccttagtgtgagctctaatgatgcttcaccacccgctagcgtggctagcctccaaccccatatgataggcgcccaaagcagcccaggcccaaaacgccccggcaatacgcttcgaaaatggctaacgtctcctgtgaggcgcttgtcgtccggaaaggccgacggccatgtgaaaaaactagctcacaagcacaaaaaaagtcgagaggtcagaaagagcgccgatgctggaagccaaaaggattctgacgatagcgcggcaacgcctcaggatgagaccgtcgaggagagagggcgcaatgaagggctctcttctggcacgctgagtaaaagttcttcatcaggaatgcagtcctgcggggaggaggaaggtgaggaaggagccgatgctgtgccgctcccgcctcccatggctattcagcagcacagtttgcttcagcctgactcacaggatgacaaagcatccagccggttgttggtgagaccaacaagctccgagacccccagcgccgctgaattagtgtccgccatagaggaattggtgaaatccaagatggcgctcgaagaccgtccctcaagcctgttggtcgatcaaggggacagctcatccccgtctttcaatcccagcgacaatagcctcctgtcttctagctctcccatcgatgaaatggaggaacggaagtcgtccagtttaaagaggcgacactatgtgctccaggagctagtggaaaccgagagggattatgtgcgcgatctgggctacgtggtcgaaggttacatggctctcatgaaagaagatggagtgcctgacgacatgaaagggaaggacaagatcgtgtttggaaacattcaccagatctacgactggcacagagatttctttctgggcgaactggaaaagtgtctcgaggatcctgaaaagctcggctctctattcgtgaagcacgaacgtcgactccatatgtacattgcttactgccagaataaacccaaaagcgaacacatcgtttctgagtacattgacaccttttttgaggacctgaaacagcgcctcggtcaccggttgcagctcaccgacttattgatcaagcccgtgcagaggatcatgaagtatcagctattgctaaaagacttcctcaagtatagcaaaaaggccagcctggacacatccgaacttgaaagggcagtggaggtcatgtgcattgtgccaagaagatgcaacgacatgatgaatgtaggcagactccaaggattcgacggtaagatagtcgcccagggtaaactgcttctccaagatacatttctggtgaccgaccaagacgcggggctgctgccccgctgtagagagaggcgcatttttctgtttgagcagatcgtgattttcagcgaacccttagataaaaaaaaaggattctctatgccagggttcttgtttaagaacagtattaaggtttcttgcctttgcctggaagaaaacgtcgaaaacgatccgtgtaagtttgcgctgactagtcgcacaggagacgtcgtagagacttttatattgcacagctccagccccagtgtgaggcagacttggatccatgaaatcaatcagattctcgaaaaccagcggaatttcctcaacgcactcaccagcccaatagagtatcagcggaaccactctggaggaggtggcggaggaggatctggtggctccggtggcgggggcggaagcggcgggggaggagcaccatcaggggggtcggggcattctggtggcccctcctcctgcggtggagcgcccagtaccagtcggtctagaccctctcgcattccccagcccgttagacatcaccccccagtgctcgtctcttccgccgcctctagtcaagccgaggcggacaagatgtcggaatcagagagttcttccagtagcaacattagcacaatgctggttacccacgattatacagcagtcaaagaggatgagattaatgtctatcaaggtgaagtggttcagatcctggccagtaaccaacagaacatgtttttggtgtttcgagcggcaaccgaccagtgtccagccgctgagggttggattcccggctttgtgctgggtcatactagtgccgtcattgtcgagaatccagatggtacgctaaagaagtccactagttggcatacggctctaagactccgtaagaagtccgagaaaaaggacaaagatggcaagagagaggggaagctggagaatggttacagaaagtcaagagaggggttaagtaataaggtaagcgtgaagctcctgaatccaaattacatctacgatgtccctcccgagttcgttataccactttccgaggtgacatgtgagacaggcgaaaccgttgtcctgcggtgccgggtgtgcggacgccctaaagccagtatcacctggaagggccctgaacacaatactctgaataacgatgggcattacagcatttcttattccgaccttggagaggcaaccctgaagatcgtgggtgtgaccacagaggacgacggcatctatacatgcatcgcagttaatgatatgggctccgccagctcttccgcatctcttcgcgtcctgggtccggggatggacgggataatggtaacctggaaggataactttgatagcttttactctgaagttgcggaactcggcagggggcgcttctcggtggtcaagaagtgcgaccagaagggtaccaaacgggctgtggcaaccaagtttgtgaataaaaaattaatgaagcgcgaccaggttacacacgaactcggcattttacagagccttcagcatccgttgctcgtgggacttctagatactttcgaaaccccaacctcctatatcctcgttctggaaatggcggaccagggccgattgttggattgtgtagtccgatggggatctctgactgaagggaagatccgggcccacctaggcgaggtcctcgaagccgtacgctatctgcacaattgtcggattgctcatctggacttgaagccggaaaatattctggttgacgaatcattggctaagcccaccataaaactggctgactttggtgacgcagttcagcttaatacgacatattacatccatcagctgctaggtaaccccgaatttgcggcccccgagatcatcctgggtaatccagttagcctgaccagcgatacatggagcgtaggtgtgctgacctacgtccttctgtctggcgtgtcaccgttccttgacgacagtgtcgaggagacatgtctaaacatttgtcgactagacttttcgttccccgacgactacttcaagggcgtgtctcagaaagcaaaggaattcgtttgctttctgctgcaggaggacccagctaaacgcccaagcgctgctttggcactgcaggagcagtggctacaggcgggaaatggtcggtcgaccggcgtgctcgatacctccaggctcactagcttcattgagcggcgcaaacaccaaaatgacgtgcgtccaatccgttccataaagaacttcctgcagagcaggttactcccaagagtctag

SEQ ID NO: 170439 - DNA, 1791 bp, Artificial Sequence
  derived and/or modified sequence
atgctacccagccaagcacagggcctgctctggtgggtttttcccctctttcctgcctcgtctttatcatatccccctgtgtcgtatcgagcggacgggttagccaggaacacatttcttaaagcttgcagtgagtccagcagctcaagtaacatctctacaatgctggtgacccatgactacaccgctgtgaaagaggacgagatcaacgtttaccaaggagaggtggtgcagatcctcgcatccaaccaacagaacatgttcctcgtcttcagagccgcaacagatcagtgccccgctgcagagggttggatcccgggatttgtgctcggccacaccagtgcagtgattgttgaaaacccagatggtactctgaagaagagcacaagttggcacacagccctgcgccttcgaaaaaagagcgaaaaaaaggacaaagatggtaagagggagggcaaactggagaacggctaccgcaagtcacgtgagggtctctcaaacaaggtatccgtgaagctgctcaatccaaactacatctacgacgtgccacctgagttcgtcatcccgctttccgaggtgacatgtgagaccggagagaccgttgtgctgcgatgcagagtgtgcggaagacccaaggctagcataacctggaagggccctgaacacaacactctgaacaatgacgggcactacagcatctcctacagcgatcttggagaggccactctgaagatcgtgggcgtaaccactgaagacgacggaatctacacctgcatagctgttaacgacatgggtagtgctagctcatctgctagtctgcgggtactgggacctggaatggatggtataatggtgacttggaaggataacttcgattccttctattccgaggtggcagaactggggcgtggaaggtttagtgtggtgaaaaaatgtgatcagaagggcactaagagggcagtggccaccaaatttgttaacaaaaaactcatgaaacgagatcaggtgacccacgaactgggaatcctgcagtctctgcagcatcccttactggtcggccttctggacacctttgagacgcccacctcctacattcttgtgcttgagatggccgatcagggcagactgttggattgtgtagtgagatgggggagtttaaccgagggaaagattagggcgcacctgggtgaggtcttagaggcagtgcgctacctgcacaactgcagaatcgctcacctggacctgaaacctgagaacatcttggtggacgaatcactggccaagcctacgatcaaacttgctgatttcggcgacgccgttcaactgaacaccacctactatatccaccagctgctgggcaaccctgagtttgctgccccagagattatcttggggaacccagtgtctctcacatcagacacctggagtgtcggtgtgctaacttacgttctgctgagtggcgtatccccttttcttgacgatagcgtggaggagacctgtctcaacatctgtcgcctcgactttagctttccagacgactacttcaaaggagtgagtcaaaaggctaaagagtttgtatgtttcctccttcaggaggacccagccaagcgtccttctgcagcactcgccttacaggaacagtggctccaggctggcaatggcaggtccacaggcgtgctggacacttcccgccttacttctttcattgagagacggaagcaccagaacgatgttagacctatcaggagtattaagaatttcctccagtctcgcctactacctcgggtctag

SEQ ID NO: 170440 - DNA, 9293 bp, Artificial Sequence
  derived and/or modified sequence
atgagcggctcctctggcggtgcagctgccccagccgcatcgagcggaccggcagccgctgcaagcgcagctgggagtgggtgtggtggcggtgctggggagggtgcagaggaggctgctaaggacctcgcggatattgctgctttctttcgctcaggtttccggaaaaatgacgagatgaaggccatggatgtgctgccgattttgaaggaaaaagtggcctatctgtcaggaggcagggacaaaagggggggtcccattcttacgtttccagccaggtcaaaccacgataggatccgacaagaagacctgaggaggttgatctcctatcttgcctgtataccctcggaggaagtgtgcaagagggggttcacagttattgtggacatgcggggaagcaaatgggatagcattaagccccttctcaaaattctgcaggaaagtttcccgtgttgtatccatgtggctctgataataaagccagataacttttggcaaaaacagcgaaccaattttgggagtagtaagttcgaatttgagacaaatatggtgtcgctcgaggggctgacaaaggtagtcgatccttcccagttgacgcctgagttcgatgggtgtctggagtacaatcacgaagaatggatcgagattagggtggcgtttgaggattatatttccaacgcaacccacatgctgtctcggcttgaggaactgcaggacatccttgctaaaaaggaactgccgcaggacctggaaggggctagaaacatgatcgaagagcactcccagttaaaaaagaaagtgattaaagccccaatcgaggacctagacctcgaaggtcaaaagctcctgcagagaattcagagctccgaatcatttccgaagaagaattccggtagcggcaacgcagatctgcagaatttgctgcctaaggtcagcaccatgctggacagacttcatagtacacggcagcatcttcaccagatgtggcatgttcggaaattgaaacttgatcagtgttttcagttaagacttttcgaacaagatgccgagaagatgttcgactggatcacacataataaagggctgtttctcaatagctacacggagattgggacctcccatccacacgcaatggagctgcaaactcagcacaaccattttgctatgaattgtatgaacgtctatgtgaatatcaaccgcatcatgtctgtcgccaaccggctggtcgaaagtggacattacgcctcccaacagattcgccaaatcgccagtcagctcgagcaagaatggaaggcctttgcagctgcccttgacgagcgctccaccctgctggacatgtcctctatattccatcagaaagctgagaaatatatgagcaatgtcgacagttggtgtaaagcctgtggagaggtcgacttgccatccgagctgcaagaccttgaggatgccatacaccatcaccaaggaatttacgagcacattaccttggcctatagtgaagtgtctcaggacgggaagagcctgctcgacaaactgcagaggcctctcaccccagggtcttccgactccctgacggcctctgcaaattactccaaggccgttcatcatgttcttgacgtgattcacgaggtcttacatcaccaacggcagttagagaacatatggcagcacagaaaggtccgcctgcatcaacgcctgcaactgtgtgtgttccagcaggatgtgcaacaagtgctggattggattgagaaccacggggaggcctttctcagtaagcacacaggcgtcggtaagtcactccaccgggcacgtgccctacagaagcgccacgaggacttcgaggaggtcgctcagaatacgtacactaacgctgacaagctgctcgaggcagccgaacagctggcccaaaccggcgaatgtgatcccgaggagatctatcaagccgcacaccagctggaagaccgcatccaggacttcgtacgacgcgtcgagcaacggaagatccttctcgatatgagcgtttccttccatacacacgtgaaggaactgtggacgtggctggaagagctgcagaaagaactcctcgacgacgtatatgcagaaagtgtcgaggctgtacaggatctaattaagcgcttcggtcaacagcagcagactacactccaggtgaccgtgaatgtgatcaaagaaggggaggatctgattcagcagctgcgcgactccgccatttcatccaataagacaccacacaacagctcaattaaccatatagagacagtgctgcagcaacttgacgaagcccagagccagatggaagagctgtttcaagaaagaaagatcaagctggaactgtttctgcagctcagaattttcgagagagacgccattgacattatctctgatctcgagtcgtggaacgatgaactgtcgcaacaaatgaatgactttgacaccgaggatcttacgatcgcagaacagcggctgcagcatcacgcagacaaggccctgactatgaataacctaaccttcgatgtgatacaccagggccaagaccttctccagtacgtaaatgaagttcaggcatccggggttgaactgctttgcgacagggacgtcgatatggcaacgcgcgttcaggatcttctcgagtttctacacgagaaacaacaggagctggacctggccgctgagcagcatagaaagcacctggaacagtgtgtgcagcttcgtcacttgcaagccgaagtgaagcaggtcctgggatggatccgcaacggagagagcatgttgaatgccggactgattacagcaagctcccttcaagaggctgaacagctccagagagaacatgagcagttccagcatgcaatcgaaaagacccatcagagcgccttacaagttcagcagaaagctgaggctatgttacaggcaaatcattacgacatggacatgattagggactgtgcagagaaagtggcctcgcactggcagcagttaatgctgaaaatggaggacaggctgaagttggtgaatgcctctgtcgctttctacaagacgagcgagcaggtttgttccgtgctggagagtctcgagcaggaatacaagcgcgaggaggattggtgtggtggagccgataagctgggaccaaactctgagaccgaccatgtaacccccatgatttcgaaacacctggagcagaaagaagcattcctcaaggcctgtacactcgctagacggaacgctgacgtgtttcttaaatatttacacaggaatagcgtgaacatgcccggaatggtgacgcatataaaggcccctgaacagcaagtgaagaacattctaaacgaactatttcaacgggaaaaccgggtcctgcattattggaccatgcgcaagagacggcttgatcaatgtcaacagtacgttgtcttcgaacgttctgcgaagcaggcactggaatggattcatgataatggagagttttatctgagcactcacacgagcacagggtccagtattcaacacactcaggaactcttgaaagaacacgaggagttccagattactgcaaagcagacgaaggagcgcgtgaagttactcatccagctggctgacggattctgtgaaaaaggccatgcccatgcagcggaaattaaaaaatgcgtgactgccgtcgataagagataccgcgacttcagtcttaggatggaaaaatatcggacctccctcgaaaaggccctcggaatatcatcagattccaacaaatccagtaagagcctgcagctcgatattatcccagccagcatccctggtagcgaggtgaaattaagagacgccgctcatgagctgaacgaagagaaaagaaagagtgccaggagaaaggagtttattatggcagagctcattcaaacagagaaggcatacgtccgggacctgcgggagtgtatggacacttacctgtgggagatgacgtccggtgtggaagaaatcccgccaggaattgtcaacaaggagctgatcatcttcggcaatatgcaggaaatctatgagttccataacaatatattcttaaaggagctcgaaaaatacgagcaattgcctgaagatgtcggtcactgcttcgtcacatgggccgataagttccagatgtatgtgacatattgcaaaaataagcctgatagtactcaactaatcctcgaacacgctggctcctatttcgacgaaatccagcagagacatggattagctaactccatttcaagctacttaattaagccggtgcaaagaattaccaagtaccagctgctactgaaggaactgctgacctgctgtgaggagggtaaaggagaaatcaaagacgggctggaggtgatgctatcagtgccgaagagagctaatgatgctatgcacctctctatgctggagggattcgatgagaatattgagagccaaggcgaacttatccttcaagagagctttcaggtttgggatcctaagactctgattaggaaggggagagaacgccacctgttcttgtttgagatgagtcttgtttttagcaaggaagtgaaagattcctcagggagatcgaaatacctttataaatctaagctgttcacttccgaactgggagttaccgagcacgtggaaggcgacccatgtaagtttgccctctgggtcggacgcacacccacctcagataacaagatcgttctaaaagcaagcagcatcgagaataagcaggactggatcaagcacattcgggaggtgatccaagaaagaaccattcatctgaagggagcgctaaaagagccgatccacatccctaaaaccgccccagctacaaggcagaagggcaggcgcgatggcgaggatctggacagccaaggcgatgggagcagccagcccgacacgatttctatagcgagtagaaccagccagaataccctcgattcagataaactttccggtggctgtgagctgaccgtcgttattcatgatttcactgcctgcaactccaatgaacttactattcgaaggggccagactgttgaagttctggagagacctcatgacaaacccgattggtgcctcgtgcgcacaactgacagaagtcctgcggctgaaggccttgtcccatgcggcagcttatgcatcgcacactcccggagctccatggaaatggagggaatattcaaccataaagattctctcagtgtgagtagtaacgatgctagcccacctgctagcgttgcgtccttgcaaccccacatgattggtgcccagagttcaccaggtcctaagagacccggaaacacgcttagaaagtggctgacctcacctgtccgcagactgtcttccgggaaagcagatggacacgtgaaaaagttagcccacaagcataagaaatctagggaggtgagaaaaagtgccgacgccggatcacagaaagatagcgatgacagcgccgctacaccacaggatgagactgtggaggaacgaggaagaaatgagggcctgtccagtgggacactgagcaagagcagcagctccgggatgcaatcttgcggcgaggaggaaggggaggaaggagctgacgcagtgccgctgcctcctccaatggctattcagcagcatagcctccttcagcccgatagccaggatgataaagcttcatctcgcctgctggttagacccacatctagcgagaccccgagcgctgcagaactagtctcagccattgaggagcttgttaaatccaaaatggccctggaagacagaccttcttcactattggtagaccagggtgattcctcctctccttcgtttaatccatcagataattctctgctgtcttctagttccccaattgacgagatggaggagagaaaaagttcttctttaaagaggcggcattacgtcctacaggaactggtagagactgaaagagattatgtgcgagacctgggctacgtggtagaaggatatatggctctgatgaaggaggatggagtccctgacgatatgaagggtaaggacaaaattgtatttgggaatattcaccaaatctacgattggcacagagatttttttttgggagaattagagaagtgtctagaggacccagagaagttgggttctctgtttgttaaacatgagagaagactgcatatgtatattgcctactgtcagaacaagcctaaatccgagcacattgtgtccgagtacatcgacacattctttgaggacctaaagcagaggttagggcaccgactgcagctcaccgacttgttaattaagcctgtgcaaagaatcatgaaatatcagttactcttgaaggacttcctcaaatactctaaaaaagcttcgctcgatacttccgagctcgagagagccgtcgaggtgatgtgcatcgtgcccaggaggtgcaatgacatgatgaatgtcggtagacttcagggatttgatggtaagattgtagcacaaggtaagctcctgctgcaagacaccttcctcgtgactgaccaggatgcgggattgctgcctcgttgcagggaaagacgaatcttcctgttcgaacagatcgtgatcttttctgagcccctagacaagaaaaaagggtttagcatgccaggtttcctattcaagaattccattaaagtgagttgtctgtgcctcgaggagaatgtggaaaatgatccatgtaagttcgctcttacgtccaggaccggcgatgttgttgagacgtttatcttgcattcaagctctccgagtgttcgacaaacttggattcacgagattaaccaaatcttggaaaaccagaggaatttcctgaatgcgctgacctctccgattgaataccagcgtaatcattcaggcggaggcggtgggggtggatcaggtggcagcggtggaggtggcggatcaggcggtggaggagcccctagcggtggatcaggacacagcggaggtccgtcgtcttgcggaggcgctcccagtacctcaaggagtaggccttcccgcatcccacagccggtccgccatcaccccccagttctcgtgtcgtctgccgcaagctcgcaggcagaagccgataagatgtccggtacgagtaccccgggaccctctctgcccccacctggagccgctccggaagccggaccttccgccccttccagacgaccacccggagccgatgcagagggtagcgagcgagaggcggagcctattcccaagatgaaagttctggaatccccccgaaaaggggctgccaacgctagtggctcttcaccagacgcccctgcaaaagatgctcgtgcctcactcggtaccttgcctctggggaagcctcgtgcgggtgccgcatctccattgaactcgcctctgtctagtgccgttccttccttgggcaaggagccctttccaccttccagccccttgcagaagggcggatccttctggtctagcattcctgcctccccagccagccggcctggcagcttcacgtttccaggagattccgattccctgcagcggcagacccctaggcacgcggctcctggaaaagataccgataggatgtcaacgtgttcctccgccagtgaacagagtgtacagtccacgcagtctaatggttccgaaagtagttccagctctaacattagtaccatgttggtaacacacgactacacagccgttaaagaggacgagattaatgtgtatcagggagaggtcgtgcaaattttggcctccaaccagcagaacatgtttctggtcttccgcgctgcaactgaccagtgccctgccgctgaaggttggatccccggtttcgtgttaggccataccagtgccgttatcgttgaaaatcccgacgggactcttaagaagtcgaccagctggcataccgctctgaggttgagaaaaaaaagcgagaagaaggataaagacggcaaaagagaaggtaagcttgagaatggctatcgaaaaagtcgtgaaggacttagtaacaaggtgtcggttaagctgcttaacccgaattatatttacgatgttcccccagaattcgttatccctttatctgaggtgacgtgcgaaaccggggagactgtggtgcttaggtgtagagtgtgcggaaggccgaaagcctcgatcacctggaaagggccagaacacaacacattaaacaatgacggtcactattcgatttcctatagtgatcttggtgaggccactcttaagattgtgggcgtgactaccgaagatgacggtatctatacttgcatcgcagtgaacgatatgggcagtgcaagctcctccgcgagtctgcgggttctgggacccggaatggatggcataatggttacgtggaaggacaacttcgactccttctattctgaagtggctgaattgggcaggggtaggttctctgttgtcaagaagtgcgaccagaaagggacaaagagagccgtggcgactaagtttgttaacaagaaacttatgaaacgggaccaagtgactcacgagctgggcatcctccagagcctgcaacatcctctgctggtcgggctgctggacaccttcgagacccccactagttatatcttagtgctcgagatggctgatcagggaaggctattagactgcgtcgtgcggtggggatctcttacagaggggaaaattcgggctcacctgggtgaggtcttagaagcagtgcgctatttgcataactgccgcattgcacacctcgaccttaaacctgaaaacattctcgtcgacgagtccctggccaagcccacaatcaaactcgccgattttggtgatgctgtacagctaaacacgacgtattatatacatcagctgctggggaatccagagttcgctgcccctgaaattatcttggggaacccggtaagtctgacctccgatacctggagcgtgggcgtccttacatacgtgttactcagtggcgtgagcccatttctagacgactctgtggaggagacatgcctcaacatttgccgcctggatttctcattccccgacgactactttaaaggtgtgagccagaaggctaaggagtttgtgtgctttctgctccaggaggatccagccaagagaccgtctgcggcactggccctccaggagcagtggttgcaggcaggcaacggaagatctacaggtgtgctggacacgagcagactgacttctttcattgagagacggaaacatcagaacgatgttaggccaattcgcagtatcaaaaactttctgcagagcaggctactgcctagggtata

SEQ ID NO: 170441 - DNA, 7502 bp, Artificial Sequence
  derived and/or modified sequence
atgctggacaggctgcactcaactcgacaacatctgcaccagatgtggcatgtgagaaaactaaagttggatcagtgtttccaacttaggctcttcgagcaagacgccgagaaaatgttcgactggatcactcacaacaaggggttattcctgaactcatatacagagattggcacttctcatcctcatgctatggagctgcagacacagcacaatcatttcgcaatgaactgcatgaacgtgtatgtgaacattaacagaattatgagcgtagctaataggcttgtggagtccgggcactatgcctctcagcagatcagacagatagcaagtcaactggaacaggaatggaaagcttttgccgctgcactggatgagagatctaccctgctggatatgagtagtatctttcaccaaaaggccgagaagtatatgagcaacgtggattcatggtgcaaagcttgtggggaagtagatctgcccagtgagctgcaagacctggaggacgccatccatcaccatcaggggatatacgagcatattacgctggcatacagcgaggtgtcgcaggatggtaagagcctcctcgataagctgcagagaccgctcacacctggatccagtgattctctgaccgcaagcgcaaactacagtaaggccgtgcatcacgttctggacgtgatccatgaagtgctgcatcaccagaggcagctggagaacatttggcagcaccgaaaggtgcgcctacaccagagactgcagctctgtgtgttccagcaggacgtgcagcaggttctcgattggatcgaaaaccatggagaggcgttcctcagcaagcacaccggagtaggcaaatccctccatcgggcacgcgctctgcaaaagcgtcacgaagatttcgaagaggttgctcaaaacacatacaccaacgcagataagttgctggaagccgctgagcaattagctcagaccggcgaatgtgatcctgaggaaatttaccaggcggctcaccagctggaggataggattcaagacttcgtcagaagggtcgaacagcgaaaaatcttgttggacatgagcgtgagcttccatacccacgttaaggaattgtggacttggctcgaggaacttcagaaagaactgctcgatgacgtgtacgccgaatccgttgaagccgtgcaagatctgataaagcgatttggccaacagcagcagacaaccctacaggtaaccgtgaacgtgatcaaggagggtgaagatctcatccagcagctccgcgatagtgctatcagctcaaacaagacccctcataatagttctattaaccacatcgaaactgtgcttcagcagttagatgaggctcagtcgcagatggaagagctgtttcaggagcgaaagatcaagctggaattgtttctccaactacggatattcgaaagggatgccattgatatcatttcagacctcgaatcttggaatgatgagctctcacagcagatgaatgacttcgacacagaggacctgaccatagccgaacaacgacttcaacaccacgccgataaagccctgactatgaacaatctgaccttcgacgtgatccatcagggccaggacctcctacagtacgtgaatgaagtgcaggcctctggcgtggagctgctgtgtgaccgcgacgtggatatggccacaagagtccaggaccttctcgaatttctgcatgagaaacaacaggagttggatctggctgctgaacagcatcggaagcacctggaacagtgcgtccagctaagacacctccaggccgaagtgaaacaggttcttggatggattcgaaacggagagtccatgcttaatgcagggctgatcactgcaagctcgttacaggaagccgaacaactgcagagagagcatgagcagtttcaacacgccattgaaaagacacaccagagcgccctgcaggttcagcagaaagccgaggccatgctccaggcaaaccattatgatatggacatgattcgagactgcgccgaaaaagtggctagccactggcagcagctcatgctgaaaatggaggaccggttaaaactggtgaatgccagcgttgccttttacaaaactagcgagcaggtttgctctgtcctcgaaagcctggaacaggaatataaacgcgaggaagactggtgcgggggagcggacaagctaggtcctaattctgagactgaccacgttacccccatgatcagcaaacatctggagcaaaaggaggccttcttgaaagcctgtactctggcaaggagaaacgcagacgtgtttctgaaatatttgcaccggaattctgtgaatatgccgggtatggtaactcatattaaagcccctgaacagcaagtcaagaacatcttgaacgagctgtttcagcgagaaaacagagtgctacattattggaccatgaggaagcggagactggaccaatgtcagcagtatgttgtctttgagaggtccgccaagcaagcacttgagtggatccacgataatggcgagttttacctttccacacacaccagtaccggcagctctatccagcacacacaggaactcctaaaagaacacgaggagtttcagatcacagcaaagcagaccaaagagcgcgtcaagcttctgatccaactagccgatgggttttgcgaaaaaggtcatgcacacgctgcagagatcaaaaaatgtgtgacagccgtggacaagaggtatcgtgatttctcgctgcggatggagaagtaccggacttccctcgagaaagcgctggggatatcgagcgattccaataagtcgtccaagagccttcagctggacattatccctgcatctatcccaggctcggaagtaaagctcagggacgccgctcatgagctaaatgaagagaagcgcaaatcagctagaagaaaagaatttatcatggccgagttgatccaaacagagaaggcctacgttcgggatttacgggagtgcatggacacttatctttgggaaatgacatcaggcgtcgaagaaattccccctgggatcgttaacaaggaactaattatctttgggaatatgcaggaaatttatgagttccataacaacatcttcttgaaggagctcgaaaagtatgagcagcttcctgaggatgttgggcattgcttcgtcacatgggccgataaatttcagatgtacgtgacttattgtaaaaacaagccggattcaacccagcttatattagaacacgcaggttcgtatttcgatgaaatccagcaaagacatggcctcgctaacagcattagtagctatttgatcaaacccgtgcagcgtattacaaagtatcaattgctccttaaagagctgctgacctgttgtgaggagggaaagggtgagataaaagacggcctcgaagttatgctgtctgtgcctaaacgcgctaatgacgctatgcacctgtcgatgctcgaggggttcgacgagaacatagagtcccagggcgaactgatactgcaggagagttttcaggtgtgggatccgaaaaccctcatcagaaaggggagagagcggcacctgttcctgttcgagatgtcattagtcttctctaaggaagtcaaggacagtagcggcagatctaaatatctatacaagagcaaactgttcacatccgagctgggggtgaccgagcatgtggagggggatccttgtaaatttgccttgtgggtgggaagaacacctacatcagataacaaaatagtgctgaaggcctcttctatcgagaacaaacaggactggatcaagcatatccgagaggtcattcaggaacgcaccatccacctgaagggcgctctcaaggagccaattcatatccctaaaactgcccctgcaacacgccagaaagggaggagggatggagaagatctggacagtcaaggagacggcagttctcagcccgacacgatatcgatcgcctcacgtacttcccaaaacaccctggacagcgacaaattgtcaggcggatgcgagctgacagtagtgatccatgacttcacagcatgcaactccaatgaactgactatacgacgaggccaaacagtagaagtgctcgagaggccccacgacaaaccagattggtgccttgtccgcaccacggatcggagccctgccgctgagggcctggttccttgcgggtccctctgtattgcccattcccgctcatcgatggagatggaaggaatcttcaaccacaaggacagcctctcagtttcaagtaacgatgccagcccaccagccagcgtggccagtctccagcctcacatgattggagcccagtccagtccaggtcccaaacggccagggaacacacttagaaagtggctgactagccctgtccgtcgtttgagctcgggtaaggcagatggtcacgtaaagaaactcgcccataaacacaaaaagagtagagaggttaggaagtcagctgatgccggatcgcaaaaggatagcgacgactctgctgcaacccctcaggacgaaactgtcgaggagcggggacgaaacgaaggtctgagctctgggaccctgagtaagagttccagttcagggatgcagagttgcggagaagaggaaggcgaggaaggcgcagacgccgttccactgcctccaccaatggccatacagcagcacagtctcctgcagcctgattcccaggacgacaaggcaagttctcggttacttgtcagaccaacaagtagcgaaactccttccgctgcagaattggtgtctgcaatcgaggagctggtgaagagtaaaatggccttagaggacaggcctagtagcctgttggttgaccaaggcgactcttccagtccatctttcaacccttctgacaattccttactatccagttcttcccccatagatgagatggaagagcgcaagagcagctccttaaagcgcaggcactatgtattacaggaattagtggaaactgaacgcgactacgtcagggacctcggttacgtcgtcgagggctatatggcgctaatgaaggaagatggagttcctgacgatatgaaggggaaggacaagattgtatttggcaacatacatcaaatctatgactggcatagagacttcttcctgggggagcttgagaaatgccttgaggaccccgaaaaattaggtagcttgtttgtcaaacacgagaggaggctccatatgtacattgcctactgccagaataagcctaagtctgagcacatcgtgagtgagtacattgatactttcttcgaagatctgaaacaacggctgggacaccggttgcaactgacagatctgctaataaaaccggtccaacggattatgaagtaccagctcctgctcaaagattttcttaagtattccaaaaaggcctccctggacacgagtgagctggagcgtgccgtagaggtgatgtgcattgtccctcgccgttgcaacgacatgatgaatgtgggccgtctgcagggttttgacgggaagattgtggcacaggggaagctgctgctccaggacacttttctagtcactgatcaggatgcgggactgctccccagatgccgcgaacgtaggatatttctttttgaacagattgtgatcttttcagaaccactcgacaagaagaaaggcttctcgatgcccggtttcttgttcaaaaacagcatcaaagtgtcttgtttgtgtctggaggaaaatgtggagaacgacccctgcaagttcgcgctgacttctaggacaggcgatgtggtggaaacatttatattgcacagttcaagtcccagtgtcagacagacctggatccatgaaataaatcagatcttggagaatcagagaaactttctaaacgccttaacctcccccatcgagtatcagagaaatcactccggcggtggaggcggtgggggaagcggcggatcagggggagggggtgggtccgggggaggaggagccccatctggtggcagcgggcattccgggggtccatcgagctgcggtggcgcaccctccaccagtcgatcgcggccatcgagaattccacaacccgtccgccaccacccaccagtgcttgtttcgtcagccgcttcttctcaagccgaggcggataaaatgtctggaacttctacccccggaccaagtttacccccacctggcgcagcgcctgaggctgggccttcagcacctagccgcagacccccaggagctgacgccgagggctctgaaagagaggcggagcccattcccaaaatgaaggtgctcgagagtcccagaaagggagccgctaacgctagtggctcatcacctgatgcacccgcaaaagatgccagggccagtctcggcacactacccctggggaaacctcgggctggcgctgcctcccctctgaactccccactttcatcagccgttccatccttaggaaaggagccctttcccccttctagccccctacagaaaggcggttccttctggagttccatccctgcgtcaccagcctcccgtcctggctctttcacatttccgggtgactcggactccctccaaagacagactcctaggcacgctgccccaggtaaggataccgatagaatgtctacatgctcgtctgcttccgagcagtcagtacaaagcactcagtcaaatgggtccgaaagtagctcaagcagcaatatcagtactatgctggtgacccatgattataccgcagttaaggaagacgagattaatgtttaccagggtgaagtggttcagatcctggcctctaatcagcagaacatgttcctagtcttcagagcagccactgatcagtgcccagccgcagagggatggatcccaggatttgttctcggacacacctcggccgtgatagtcgaaaatcccgacggaacactgaaaaaatcgacaagttggcacaccgccttgaggttgagaaaaaaatcagagaaaaaggacaaagatggaaagagagagggaaaattagagaacggatatagaaagtctagggaaggtctgtcgaacaaggtgtctgtgaagctgcttaatccaaattatatctacgacgtcccccctgagttcgtcatacctctgagcgaagtgacttgcgaaacaggggagaccgttgtcctgcgctgccgagtgtgcggtaggccgaaagccagcattacatggaagggcccagagcataacacattaaataacgacggtcactactccatcagctacagcgacctgggcgaagctacactgaagattgtcggagtcaccacggaagatgacgggatttacacatgtatagccgtcaacgacatggggtcagctagtagctcagcgagcctcagagttctcggcccaggcatggacggaattatggtgacttggaaggacaatttcgatagtttttatagtgaggtggccgagctcggcagagctaattggaacaactggtccccatatta

SEQ ID NO: 170442 - DNA, 8765 bp, Artificial Sequence
  derived and/or modified sequence
atgtcgggctctagcgggggtgcggctgcccctgccgctagttcaggtcctgccgcagccgctagcgcagctgggtctggctgcggtggtggggcaggcgaaggcgctgaggaggctgctaaagatctggcagatatagccgctttctttcggagcggctttagaaaaaatgatgagatgaaagctatggacgtgcttccgattctcaaagaaaaggtggcttacctgtccgggggtcgagacaagagagggggacccatactcaccttccccgctaggtctaatcacgacaggatccgccaggaggacctgcggagacttataagctatctggcatgcatccctagtgaggaggtgtgtaaaaggggcttcacggttatcgtggacatgaggggttctaaatgggacagcattaagcctcttctcaagatcctgcaggagtcattcccctgttgcattcatgttgccttaatcattaagcctgataatttctggcagaaacagcggaccaactttgggagcagtaagttcgagttcgaaacaaacatggtgtctctggaaggcctgaccaaagtagtggacccatctcagctgacacccgagttcgatgggtgtctcgaatataaccacgaggaatggatagagattagggttgccttcgaggattacatctcaaatgcaacacatatgctcagtcggctggaggaactgcaagacatcttagctaaaaaggagctcccacaggacctggagggtgcacggaatatgatcgaggagcatagccagttgaaaaaaaaggtcatcaaagccccaattgaggacctggacttggagggtcagaagctccttcagcggatccagtcctctgagtctttccccaaaaagaacagtggaagtggcaatgctgacctgcagaatctgctccctaaagtttccacaatgttggacagactgcattctactagacagcacctgcaccagatgtggcacgtgcgaaagctgaagctggaccaatgttttcagcttcgcctgttcgaacaggatgccgaaaagatgtttgattggattacccacaacaaaggcctgtttctgaattcttacaccgaaattgggactagtcatcctcacgcgatggaactccagacacagcataatcacttcgccatgaattgtatgaatgtgtatgtgaacatcaacagaattatgagcgttgcaaatagactggtagagtccgggcattacgcctcccagcaaatccgccagattgcctcccagttagaacaggagtggaaagctttcgctgccgctttggatgagaggagcaccctactagacatgagctcgatatttcatcagaaggctgaaaaatatatgtccaatgtcgactcatggtgtaaagcctgtggcgaggtggacctgccgtctgaactgcaagacctggaggacgccatccaccaccaccagggcatctacgaacacattaccttggcgtattccgaggtttcccaagacgggaagtctctgttagacaagctgcagcgaccactgacaccgggttcttcggacagcctgactgcatctgccaactactccaaagccgtgcatcatgttctggatgttatccatgaagttttgcatcaccagcggcaactggaaaatatttggcagcatcgcaaggtccgcctacaccagcgcctccagctgtgcgtctttcaacaggatgtccagcaggttctcgattggatcgagaatcatggggaggcatttctgtccaagcatactggggtgggaaagtccttacacagagcccgagccctgcagaaaaggcacgaagacttcgaagaagttgctcaaaacacatacaccaacgcggacaagctccttgaagccgcagaacagcttgcccaaactggggagtgtgacccagaggaaatttaccaggcagctcatcagctcgaggacagaatccaagattttgtcaggagggttgaacagcgcaaaatccttctggacatgagcgtgtcttttcacacccacgttaaggaactgtggacttggctagaggagctccaaaaagagcttctggacgatgtgtatgcagagtctgtagaagccgtgcaggatttgattaagcggtttggacagcaacagcagacaacgctccaggtgaccgtgaatgtcatcaaggagggagaagatctgatccagcagttgcgcgacagcgctattagttcaaataaaacccctcacaattctagcattaaccacatagagactgttcttcagcagctcgacgaagcccagtctcagatggaggagctgtttcaggagcgcaagataaagctcgaactcttcctgcaactgaggatctttgagcgggatgctatcgacattatttctgacttagagagctggaatgacgaattgtctcagcagatgaacgatttcgacacagaagatctgaccatcgcagagcagcgactgcagcaccacgcagataaagcccttaccatgaacaatcttacctttgacgtgatccaccagggtcaggacctgctacagtacgtgaacgaggttcaggccagcggagtggagcttctgtgtgaccgcgatgttgatatggccacccgagtgcaggacctgttagagttcctgcatgaaaagcagcaggagttggatttggcggcagaacaacaccggaagcatctcgagcagtgcgtccagttgcgtcacctgcaggcggaggtgaaacaggtactgggctggattcgtaacggggagtcaatgctgaacgcaggacttataaccgcctcaagtcttcaggaggctgagcagttgcagcgagagcacgagcagttccaacatgcgatcgaaaagactcaccagagcgcgcttcaggttcagcagaaagctgaggcaatgctgcaggccaaccattatgatatggatatgatccgagattgtgctgagaaggtagcttcccactggcaacagctcatgctgaagatggaagatcgactcaagttagtcaacgccagcgtggccttttacaagacttccgagcaggtctgtagtgtcttggaaagtcttgaacaggagtacaagcgtgaggaagattggtgcggcggtgccgataagctgggtcctaactctgaaaccgatcatgtgacgcccatgatcagtaaacatctcgagcagaaagaggccttcttaaaagcctgcaccctagctcgacgcaacgccgatgtttttctcaaatacctccaccgtaatagtgttaacatgccagggatggtgacccacatcaaagcacctgaacagcaggtgaaaaacatcctcaatgagctgttccagcgtgagaaccgcgtcctgcattattggaccatgcggaaaaggcggctggatcagtgtcagcagtacgtggtgttcgaacgaagtgctaaacaggctctcgaatggatccatgataacggcgagttttacctttctacacacaccagcaccggcagcagcatccagcacactcaggagttgttaaaggaacatgaagaattccagatcaccgcgaaacaaactaaggagcgtgtgaaacttctgatacagctcgctgatgggttttgcgaaaagggccatgcccatgccgctgagattaaaaagtgtgttactgccgtggataagagatatagggacttctcattacggatggagaaataccgaacatcacttgagaaggcccttggcattagctcagattctaataagtcatctaaatcactgcagcttgatatcattccagcttctatcccaggctctgaggtaaaactgagggatgccgcacatgaactcaacgaagagaaacgaaagtctgccaggcgtaaagagttcattatggccgagcttatccaaaccgagaaggcctacgtaagggatctgcgcgagtgtatggacacctatttgtgggaaatgacgagcggcgtcgaggagatccccccagggatagtgaacaaggaattgatcatctttggaaatatgcaagagatctacgaatttcacaacaacatcttcctgaaggaattagaaaagtatgaacaattgcccgaagatgtaggacactgcttcgtgacatgggccgacaagttccagatgtacgtcacttactgtaaaaataagcccgatagtacccagcttattctagagcacgccggttcctacttcgacgagattcagcagaggcatggactggccaattcaatttcgtcttacttaattaaacccgtacagaggatcacaaagtaccagcttctgctcaaggaacttctgacctgctgcgaggagggaaagggcgagatcaaagatggacttgaggtaatgttgtccgtacctaagcgtgccaacgatgctatgcatctcagcatgctggaggggttcgacgagaatatagagagtcaaggcgaactcatcctgcaggagtcgttccaggtctgggaccctaaaacactgatccgtaaagggagggagagacacctcttcctgtttgaaatgtcccttgttttcagcaaagaggtcaaagattcatcaggacgtagcaaatacctttataagagcaagctcttcactagtgaactgggagtgaccgaacacgtcgagggggacccatgcaaatttgccctgtgggtgggtagaactcctactagcgataacaaaatcgttctaaaggcttcttcaatagagaacaagcaggattggattaaacacatccgggaagttatccaagaaaggaccatccatttgaagggagctttgaaagagcccattcacatacccaagacagccccagcaacccgccaaaaaggcagacgtgatggcgaggatctggattcccaaggcgacggaagctctcagcccgataccatttcaattgcaagtcgcacatcacaaaatacgctggactcagataaactgtcaggagggtgcgaattgacagtggtaatccacgactttacggcatgcaactcaaacgaactgaccatacgtcggggacaaaccgttgaagtgctagaacggccacatgataaacctgactggtgtctggtgcgcaccaccgataggtcaccagctgcagagggcctggtgccctgcggttcattgtgcatcgcccattcccgctcaagtatggagatggaaggcatattcaaccacaaggattctctgagcgtgtcctccaacgatgcaagtccgccagctagcgtcgcctccctccagccgcatatgatcggagcacagtccagcccgggacctaaaagaccaggaaatacacttcgcaagtggttgaccagccctgttcgtcgcctctcaagcggaaaggctgatggtcatgtcaagaagttagcacacaaacacaagaaatcacgggaggtcagaaagtccgcagatgccggatcccagaaagactctgatgattcagcagccaccccacaggatgagactgtcgaggagcgtggcagaaatgaagggttgtcatccggcacactatcaaagagctcctcttccggaatgcagtcatgcggggaagaggagggtgaagagggcgcagacgctgtgcctctgcctccacctatggctatccagcaacacagcctgcttcagccagatagccaggatgataaggcgagctctagactgctcgtcaggcctacttcatcagaaacgcctagcgctgctgaattggtgtcggccattgaagaattggtcaagtctaaaatggctttggaagaccgcccatcgtctctccttgtggaccaaggggacagttctagccctagtttcaatccttccgacaacagcttattatcctccagttcaccgattgacgagatggaggagcgaaaatcctcctcactcaagcgacggcactacgtgttgcaagagcttgttgagacagagagagactatgtgcgcgatttgggatatgtggtggaaggatatatggccctgatgaaggaggatggagttcccgatgatatgaagggaaaagataaaatagtgtttggcaatattcatcagatctatgattggcaccgtgacttcttcctcggcgagctggagaagtgtctggaggaccccgaaaaacttggatcattatttgtgaagcatgaaagaaggcttcacatgtacatagcctactgccagaacaaaccaaagagcgaacacattgtgagtgaatatatcgatacctttttcgaagacctgaaacagaggcttggccatagactacagctcaccgacctccttattaaaccagtgcagcggatcatgaaataccagctcctgctgaaagatttcttgaagtatagcaagaaagcttcactggatacttccgagcttgagagggcagtagaggtgatgtgtatcgtgcccaggaggtgtaatgatatgatgaacgtgggcaggttgcagggctttgacggcaagatcgtggcgcagggaaaacttctcctccaggacacatttctcgtaaccgaccaggatgccggactattacctagatgccgggaaagaagaatcttcctgttcgagcagatcgtcattttctccgagcctctggataaaaagaaggggttcagtatgcccggatttctgttcaagaattcaatcaaggtgtcgtgcctgtgtctggaagagaacgtggaaaacgatccttgtaaattcgcactgacctcccggactggtgacgtggtcgagacattcattcttcacagtagctctccttcagttcgccagacatggattcacgagatcaaccagattctagaaaaccaacggaactttctgaacgccctgacatctcctatcgagtaccagcggaatcacagtggagggggtggtggaggcggtagtgggggttccggcggagggggtgggtccgggggaggaggtgctccctcggggggatccggtcattcagggggtcctagtagttgcggcggagcaccatccacctcgaggtccagaccttcaaggattcctcaacctgtgcgccaccatccaccagtcttggtgtccagcgcggctagctcccaggctgaagctgacaagatgtccgagtccgagtcctccagcagttctaacatatcgaccatgctggtcacacacgattacactgctgtgaaggaggatgaaatcaatgtctatcagggcgaagtagttcagatactagccagtaaccagcagaatatgtttctggtctttcgcgctgccactgatcagtgtcccgcagccgaagggtggatcccgggtttcgtactaggccatacatctgccgtgattgtggagaatcccgatgggaccctgaagaaatccactagctggcacacagccctccgcctaaggaaaaagagtgagaaaaaggacaaggacggcaagagagaaggcaaactggagaacggctataggaagtcccgcgaaggtttgtcaaacaaggtgtcagtgaagcttctgaaccctaattatatctacgatgttccaccggagtttgtaatccccctcagcgaagtgacctgcgagaccggtgaaacagtcgtcctgagatgccgggtttgcggtcgcccaaaagcaagcattacttggaaagggccagaacataacacactgaacaacgatgggcactacagtatctcatacagcgacttgggcgaggcaacgctgaagatcgtgggcgtaaccacggaggacgatggaatctatacctgtatcgccgtgaatgacatgggtagcgcatctagttctgcaagcttaagggttctgggaccagggatggatggtattatggttacctggaaagacaacttcgacagtttctattcggaagtggccgaattgggtcgtgggagattcagcgtggtgaaaaaatgtgaccagaaaggcactaagcgtgctgtagccactaagtttgtcaacaaaaaacttatgaagcgggatcaggtgacacacgagctgggaatcttacagtctctgcaacatccactactggtgggactgctcgacaccttcgaaacaccgaccagttacatcttggtcctggaaatggccgatcagggaagattgctcgactgtgtggtgcgctggggatcactcacagaggggaaaattcgtgctcatttaggagaagtcctcgaggcagtaaggtacctccacaactgccgaattgcacacctggacctcaaacctgaaaacatactggtggatgagtctctggccaagccgaccataaagcttgctgacttcggggacgccgtgcaactgaacaccacctactatatacatcagctgctcgggaaccccgagttcgctgccccagaaatcatccttggtaatccagtctctcttacttctgatacctggagcgtgggcgtcctcacttacgttctactttctggggtttctccttttttagacgactcagttgaagagacctgccttaatatctgtcgcctagacttcagctttcctgatgactactttaaaggcgtgagtcagaaggcaaaggagtttgtctgttttctacttcaagaggaccctgctaagaggcctagcgctgccctcgctttgcaggagcagtggttacaagccggtaacggtaggtcaacaggcgtcttagacacaagtagactgacgagctttatcgagaggagaaagcaccagaacgatgtacgacccattcgctctatcaagaatttcttacagagccgcctgctgccgagagtata

SEQ ID NO: 170443 - DNA, 4065 bp, Artificial Sequence
  derived and/or modified sequence
tgttcgtgtcttctaataagagcaagccgatcattaaccttctcaacgcagcgtcttttggtttcttccatttccaaccagcagaatatcttcttggaactttcttttttaacctctgccttcctcacgcacctattttttggagggttccttttccctgctctctacctcctgtttaaattgaaacctgtacactttaagctttttgctcatcgcttggttttgctcttttatgccttaaattatctttgcggcatttttgactcatctgctggggaagaccattccctcaagaaaacttccaacagcaactcaaagcaaactaagatgaaaaaatggggggaaagaatctgtccactgggaacgctttacgtcaccgtgttgctctggaagacagagactgctctgggcacctggcgaggcggctctgcagtgcaggctggggccggtccctgcggcctgctgggctctggcctcgtttggcccatcactcatgctgccgtctcaagcacaagggttgctgtggtgggttttccctctgtttcctgcttcctcactgtcctacccacctgtttcctacagggcagatggcctggcccgtaacactttcctgaaggcatgcagtgaaagcagcagcagtagcaacatctccaccatgttggtgacacacgattacacggcagtgaaggaggatgagatcaacgtctaccaaggagaggtcgttcaaattctggccagcaaccagcagaacatgtttctggtgttccgagccgccactgaccagtgccccgcagctgagggctggattccaggctttgtcctgggccacaccagtgcagtcatcgtggagaacccggacgggactctcaagaagtcaacatcttggcacacagcactccgtttaaggaaaaaatctgagaaaaaagataaagacggcaaaagggaaggcaagttagagaacggttatcggaagtcacgggaaggactcagcaacaaggtatctgtgaagcttctcaatcccaactacatttatgacgttcccccagaattcgtcattccattgagtgaggtcacgtgtgagacaggggagaccgttgttcttagatgtcgagtctgtggccgccccaaagcctcaattacctggaagggccctgaacacaacaccttgaacaacgatggtcactacagcatctcctacagtgacctgggagaggccacgctgaagattgtgggcgtgaccacggaagatgacggcatctacacgtgcatcgctgtcaatgacatgggttcagcctcatcgtcggccagcctgagggtcctaggtccagggatggatgggatcatggtgacctggaaagacaactttgactccttctacagtgaagtggctgagcttggcaggggcagattctctgtcgttaagaaatgtgatcagaaaggaaccaagcgagcagtggccactaagtttgtgaacaagaagttgatgaagcgcgaccaggtcacccatgagcttggcatcctgcagagcctccagcaccccctgcttgtcggcctcctcgacacctttgagacccccaccagctacatcctggtcttagaaatggctgaccagggtcgcctcctggactgcgtggtgcgatggggaagcctcactgaagggaagatcagggcgcacctgggggaggttctggaagctgtccggtacctgcacaactgcaggatagcacacctggacctaaagcctgagaatatcctggtggatgagagtttagccaagccaaccatcaaactggctgactttggagatgctgttcagctcaacacgacctactacatccaccagttactggggaaccctgaattcgcagcccctgaaatcatcctcgggaaccctgtctccctgacctcggatacgtggagtgttggagtgctcacatacgtacttcttagtggcgtgtcccccttcctggatgacagtgtggaagagacctgcctgaacatttgccgcttagactttagcttcccagatgactactttaaaggagtgagccagaaggccaaggagttcgtgtgcttcctcctgcaggaggaccccgccaagcgtccctcggctgcgctggccctccaggagcagtggctgcaggccggcaacggcagaagcacgggcgtcctcgacacgtccagactgacttccttcattgagcggcgcaaacaccagaatgatgttcgacctatccgtagcattaaaaactttctgcagagcaggcttctgcctagagtttgacctatccagaagttctttctcattctctttcacctgccaatcagctgttaatctgaattttcaagagaaaacaagcaaacataactgatcagctgccggtatgttcatcgtgtgaaattgcattccaagtgagctgtgctcagcagtgcttggacacagagctgcaagctgcgctggggtggaggaccgtcacttacactctgcccaaggcagaggtcgcattgctgtatcacagtattttattcaggtttctgcaaaaaaataaaaagataacttttttaaacaaacatgaatagaattttgcaaatttaacgttttcaagatttattcaaggaaacaaaatgcctatgttcaaccactggtgttaatgaacaaagatactgtgcgtctctggggaagacgcacctaggtggcggccactcccatggccttgtctaggactcagagaccactcggctctgagcttccaggcgcctcgtctgtgtgcatctcacgcccgacgtggcttctgaaacgtgcattcaacctcaaacttttgcataaaatagaatgaatcgttttgctctgatgaaatgtaggccttacttgtatataagactgttcctgccttcggtctgtcattttcccacctgcctcccctacccaccccccacccaccacctggggcttcctctgggggtccgagggtcttcccatcacatgaagacatcaggttgggtcctgccccactgcccctccccctgttcctgccccaagccgtcaatcagattgtggagcagtacacagtcagatgaaaatactgtaaatgcactcattgggggttttttggttttacttcatatcatgtgcaatgttgtggctttaacattttatgcaactatttatgaagacctctgttgtacctgtaataaatatatagaaaaagcacatacttcgtatggtgagctttatggttttgtgtgtgtgttggggttggcgggtgggtgggtagggtcgtagccctgtgccatcggttcaaagagacttttcgtgaaatttgttggttttgaggactgtaaaagtgatttcatactctgaatataaaactggataatagggtaatgttttaaaatttattatgctattattcagaatgccaaagtattattttttttcccaaaatcagtctggacatttactactttttagactttttgacgttgaactttctgtataaaaattggctgggttttgagcttttggtaagaaataaaagccgattaagcactggccgccccgcggctggtacccaatgcccgagtcactgtggcagcattcgcactggtgtggggagtcctttcaactcaaggaggctgggtttctgggcaccctcgaagttttctggatgtctttttatctttctcgtgtgaactgcactacaaaagagaccagcccgcttcccaagccagccagacacctgggtcttgagccataaactggcgtagttaagctttgcagcttccagtgtattttatttattcttttgttgggtttttgtttgtttcttcttgtaaaattgtacagaaactttttaaaagaaattggattcgaaactggatgtgtattcgtaacctcataatttttatttgtgtattgtttcttttattatttcagttaaatttttacattattttgcatgtatatttctttgtacagagaccttacatgtttacacagtatgatgtgatgtaaatattttattttgccatcagttattttaaaaaattaaacatatttgcctg

SEQ ID NO: 170444 - DNA, 11100 bp, Artificial Sequence
  derived and/or modified sequence
gcggccgcgggcgccgccgcagccatgagcggcagcagcggcggagccgccgcccccgccgcgtcctccggccccgccgcggcggccagcgcggctggctcgggctgcgggggcggtgccggcgagggggcagaggaggcggccaaggacctggccgacatcgcggccttcttccgatccgggtttcgaaaaaacgatgaaatgaaagctatggatgttttaccaattttgaaggaaaaagttgcatacctttcaggtgggagagataaacgtggaggtcccattttaacgtttccggcccgcagcaatcatgacagaatacgacaggaggatctcaggagactcatttcctatctagcctgtattcccagcgaggaggtctgcaagcgtggcttcacggtgatcgtggacatgcgtgggtccaagtgggactccatcaagccccttctgaagatcctgcaggagtccttcccctgctgcatccatgtggccctgatcatcaagccagacaacttctggcagaaacagaggactaattttggcagttctaaatttgaatttgagacaaatatggtctctttagaaggccttaccaaagtagttgatccttctcagctaactcctgagtttgatggctgcctggaatacaaccacgaagaatggattgaaatcagagttgcttttgaagactacattagcaatgccacccacatgctgtctcggctggaggaacttcaggacatcctagctaagaaggagctgcctcaggatttagagggggctcggaatatgatcgaggaacattctcagctgaagaagaaggtgattaaggcccccatcgaggacctggatttggagggacagaagctgcttcagaggatacagagcagtgaaagctttcccaaaaagaactcaggctcaggcaatgcggacctgcagaacctcttgcccaaggtgtccaccatgctggaccggctgcactcgacacggcagcatctgcaccagatgtggcatgtgaggaagctgaagctggaccagtgcttccagctgaggctgtttgaacaggatgctgagaagatgtttgactggatcacacacaacaaaggcctgtttctaaacagctacacagagattgggaccagccaccctcatgccatggagcttcagacgcagcacaatcactttgccatgaactgtatgaacgtgtatgtaaatataaaccgcatcatgtcggtggccaatcgtctggtggagtctggccactatgcctcgcagcagatcaggcagatcgcgagtcagctggagcaggagtggaaggcgtttgcggcagccctggatgagcggagcaccttgctggacatgtcctccattttccaccagaaggccgaaaagtatatgagcaacgtggattcatggtgtaaagcttgcggtgaggtagaccttccctcagagctgcaggacctagaagatgccattcatcaccaccagggaatatatgaacatatcactcttgcttattctgaggtcagccaagatgggaagtcgctccttgacaagctccagcggcccttgactcccggcagctccgattccctgacagcctctgccaactactccaaggccgtgcaccatgtcctggatgtcatccacgaggtgctgcaccaccagcggcagctggagaacatctggcaacaccgcaaggtccggctgcatcagaggctgcagctgtgtgttttccagcaggacgttcagcaggtgctagactggatcgagaaccacggagaagcatttctgagcaaacatacaggtgtggggaaatctcttcatcgggccagagcattgcagaaacgtcatgaagattttgaagaagtggcacagaacacatacaccaatgcggataaattactggaagcagcagaacagctggctcagactggggaatgtgaccccgaagagatttatcaggctgcccatcagctggaagaccggattcaagatttcgttcggcgtgttgagcagcgaaagatcctactggacatgtcagtgtcctttcacacccatgtgaaagagctgtggacgtggctggaggagctgcagaaggagctgctggacgacgtgtatgccgagtcggtggaggccgtgcaggacctcatcaagcgctttggccagcagcagcagaccaccctgcaggtgactgtcaacgtgatcaaggaaggggaggacctcatccagcagctcagggactctgccatctccagtaacaagaccccccacaacagctccatcaaccacattgagacggtgctgcagcagctggacgaggcgcagtcgcagatggaggagctcttccaggagcgcaagatcaagctggagctcttcctgcagctgcgcatcttcgagagggacgccatcgacattatctcagacctcgagtcttggaatgatgagctttctcagcaaatgaatgacttcgacacagaagatctcacgattgcagagcagcgcctccagcaccatgcagacaaagccttgaccatgaacaacttgacttttgacgtcatccaccaagggcaagatcttctgcagtatgtcaatgaggtccaggcctctggtgtggagctgctgtgtgatagagatgtagacatggcaactcgggtccaggacctgctggagtttcttcatgaaaaacagcaggaattggatttagccgcagagcagcatcggaaacacctggagcagtgcgtgcagctgcgccacctgcaggcagaagtgaaacaggtgctgggttggatccgcaacggagagtccatgttaaatgccggacttatcacagccagctcgttacaagaggcagagcagctccagcgagagcacgagcagttccagcatgccattgagaaaacacatcagagcgcgctgcaggtgcagcagaaggcagaagccatgctacaggccaaccactacgacatggacatgatccgggactgcgccgagaaggtggcgtctcactggcaacagctcatgctcaagatggaagatcgcctcaagctcgtcaacgcctctgtcgctttctacaaaacctcagagcaggtctgcagcgtcctcgagagcctggaacaggagtacaagagagaagaagactggtgtggcggggcggataagctgggcccaaactctgagacggaccacgtgacgcccatgatcagcaagcacctggagcagaaggaggcattcctgaaggcttgcacccttgctcggaggaatgcagacgtcttcctgaaatacctgcacaggaacagcgtgaacatgccaggaatggtgacgcacatcaaagctcctgaacagcaagtgaaaaatatcttgaatgaactcttccaacgggagaacagggtattgcattactggaccatgaggaagagacggctggaccagtgtcagcagtacgtggtctttgagaggagtgccaagcaggctttggaatggatccatgacaatggcgagttctacctttccacacacacctccacgggctccagtatacagcacacccaggagctcctgaaagagcacgaggagttccagataactgcaaagcaaaccaaagagagagtgaagctattgatacagctggctgatggcttttgtgaaaaagggcatgcccatgcggcagagataaaaaaatgtgttactgctgtggataagaggtacagagatttctctctgcggatggagaagtacaggacctctttggaaaaagccctggggatttcttcagattccaacaaatcgagtaaaagtctccagctagatatcattccagccagtatccctggctcagaggtgaaacttcgagatgctgctcatgaacttaatgaagagaagcggaaatctgcccgcaggaaagagttcataatggctgagctcattcaaactgaaaaggcttatgtaagagacctccgggaatgtatggatacgtacctgtgggaaatgaccagtggcgtggaagagattccacctggcattgtaaacaaagaactcatcatcttcggaaacatgcaagaaatctacgaatttcataataacatattcctaaaggagctggaaaaatatgaacagttgccagaggatgttggacattgttttgttacttgggcagacaagtttcagatgtatgtcacatattgcaaaaataagcctgattctactcagctgatattggaacatgcagggtcctattttgacgagatacagcagcgacatggattagccaattccatttcttcctaccttattaaaccagttcagcgaataacgaagtatcagctccttttaaaagagctgctgacgtgctgtgaggaaggaaagggagagattaaagatggcctggaggtgatgctcagcgtgccgaagcgagccaatgatgccatgcacctcagcatgctggaagggtttgatgaaaacattgagtctcagggagaactcatcctacaggaatccttccaagtgtgggacccaaaaaccttaattcgaaagggtcgagaacggcatctcttcctttttgaaatgtccttagtatttagtaaagaagtgaaagattccagtgggagaagcaagtacctttataaaagcaaattgtttacctcagagttgggtgtcacagaacatgttgaaggagacccttgcaaatttgcactgtgggtggggagaacaccaacttcagataataaaattgtccttaaggcttccagcatagagaacaagcaggactggataaagcatatccgcgaagtcatccaggagcggacgatccacctgaagggagccctgaaggagcccattcacatccctaagaccgctcccgccacaagacagaagggaaggagggatggagaggatctggacagccaaggagacggcagcagccagcctgatacgatttccatcgcctcacggacgtctcagaacacgctggacagcgataagctctctggtggctgtgagctgacagtggtgatccatgacttcaccgcttgcaacagcaacgagctgaccatccgacggggccagaccgtggaagttctggagcggccgcatgacaagcctgactggtgtctggtgcggacaactgaccgctccccagcggcagaaggcctggtcccctgtggttcactgtgcatcgcccactccagaagtagcatggaaatggagggcatcttcaaccacaaagactcgctctccgtctccagcaatgacgccagtccacccgcatccgtggcttccctccagccccacatgatcggggcccagagctcgccgggccccaagcggccgggcaacaccctgcgcaagtggctcaccagccccgtgcggcggctcagcagcggcaaggccgacgggcacgtgaagaagctggcgcacaagcacaagaagagccgcgaggtccgcaagagcgccgacgccggctcgcagaaggactccgacgacagtgcggccaccccgcaggacgagacggtcgaggagagaggccggaacgagggcctgagcagcggtactctctccaaatcctcctcctcggggatgcagagctgtggagaagaggaaggcgaggagggggccgacgccgtgcccctgccgccacccatggccatccagcagcacagcctcctccagccagactcacaggatgacaaggcctcttctcggttattagtccgccccaccagctccgaaacaccgagtgcagccgagctcgtcagtgcaattgaggaactcgtgaaaagcaagatggcactggaggatcgccccagctcactccttgttgaccagggagatagtagcagcccttccttcaacccttcggataattcccttctctcttcctcctcgcccattgatgagatggaagaaaggaaatccagctctttaaagagaagacactacgttttgcaagaactagtggagacagagcgtgactatgtgcgggaccttggctatgtggttgagggctacatggcacttatgaaagaagatggtgttcctgatgacatgaaaggaaaagacaaaattgtgttcggcaacatccatcagatttacgactggcacagagacttttttttaggagagttagagaagtgccttgaagatccagaaaaactaggatccctttttgttaaacacgagagaaggttgcacatgtacatagcttattgtcaaaataaaccaaagtctgagcacattgtctcagaatacattgataccttttttgaggacttaaagcagcgtcttggccacaggttacagctcacagatctgttgatcaaaccagtgcagagaatcatgaagtatcagctgttactgaaggacttcctcaagtattccaaaaaggccagcctggatacatcagaattagagagagctgtggaagtcatgtgcatagtacccaggcggtgcaacgacatgatgaacgtggggcggctgcaaggattcgacgggaaaatcgttgcccagggtaaactgctcttgcaggacacattcttggtcacagaccaagatgcaggacttctgcctcgctgcagagagaggcgcatcttcctctttgagcagatcgtcatattcagcgaaccacttgataaaaagaagggcttctccatgccgggattcctgtttaagaacagtatcaaggtgagttgcctttgcctggaggaaaatgtggaaaatgatccctgtaaatttgctctgacatcgaggacgggtgacgtggtagagaccttcattttgcattcatctagtccaagtgtccggcaaacttggatccatgaaatcaaccaaattttagaaaaccagcgcaattttttaaatgccttgacatcgccaatcgagtaccagaggaaccacagcgggggcggcggcggcggcggcagcgggggcagcggcgggggtgggggcagcggcggcggcggggcccccagtggcggcagcggccacagtggcggccccagcagctgcggcggcgcccccagcacgagcaggagccggccctcccggatcccccagcctgtccgacaccacccccccgtgctggtctcctctgcagcctcgagccaggcagaggcagacaagatgtcaggtacgtccacccccgggccctccctgcctccccctggcgcggcccccgaggccggccccagcgcgcccagcaggcggccccccggcgcggacgccgaggggtccgagcgagaagcggagccgatccccaagatgaaggtgctggagagccccaggaaaggcgccgcgaacgcctcggggtcgagcccagacgcccccgccaaggacgcgcgcgctagcctgggcaccctgccgcttgggaagccccgggccggggccgcttcgccgctgaactcgccgctctccagcgcggtcccttctctcggcaaggagcccttcccccccagcagccccctgcagaaggggggctccttctggagctccatccccgcctcccccgccagccgacccggctccttcaccttcccgggggacagcgactccctccagcggcagacaccccgccacgcggcccctggcaaggatactgaccgcatgagcacgtgctcctcggccagcgagcagtccgtgcagtccacccagagcaacgggagtgaaagcagcagcagtagcaacatctccaccatgttggtgacacacgattacacggcagtgaaggaggatgagatcaacgtctaccaaggagaggtcgttcaaattctggccagcaaccagcagaacatgtttctggtgttccgagccgccactgaccagtgccccgcagctgagggctggattccaggctttgtcctgggccacaccagtgcagtcatcgtggagaacccggacgggactctcaagaagtcaacatcttggcacacagcactccgtttaaggaaaaaatctgagaaaaaagataaagacggcaaaagggaaggcaagttagagaacggttatcggaagtcacgggaaggactcagcaacaaggtatctgtgaagcttctcaatcccaactacatttatgacgttcccccagaattcgtcattccattgagtgaggtcacgtgtgagacaggggagaccgttgttcttagatgtcgagtctgtggccgccccaaagcctcaattacctggaagggccctgaacacaacaccttgaacaacgatggtcactacagcatctcctacagtgacctgggagaggccacgctgaagattgtgggcgtgaccacggaagatgacggcatctacacgtgcatcgctgtcaatgacatgggttcagcctcatcgtcggccagcctgagggtcctaggtccagggatggatgggatcatggtgacctggaaagacaactttgactccttctacagtgaagtggctgagcttggcaggggcagattctctgtcgttaagaaatgtgatcagaaaggaaccaagcgagcagtggccactaagtttgtgaacaagaagttgatgaagcgcgaccaggtcacccatgagcttggcatcctgcagagcctccagcaccccctgcttgtcggcctcctcgacacctttgagacccccaccagctacatcctggtcttagaaatggctgaccagggtcgcctcctggactgcgtggtgcgatggggaagcctcactgaagggaagatcagggcgcacctgggggaggttctggaagctgtccggtacctgcacaactgcaggatagcacacctggacctaaagcctgagaatatcctggtggatgagagtttagccaagccaaccatcaaactggctgactttggagatgctgttcagctcaacacgacctactacatccaccagttactggggaaccctgaattcgcagcccctgaaatcatcctcgggaaccctgtctccctgacctcggatacgtggagtgttggagtgctcacatacgtacttcttagtggcgtgtcccccttcctggatgacagtgtggaagagacctgcctgaacatttgccgcttagactttagcttcccagatgactactttaaaggagtgagccagaaggccaaggagttcgtgtgcttcctcctgcaggaggaccccgccaagcgtccctcggctgcgctggccctccaggagcagtggctgcaggccggcaacggcagaagcacgggcgtcctcgacacgtccagactgacttccttcattgagcggcgcaaacaccagaatgatgttcgacctatccgtagcattaaaaactttctgcagagcaggcttctgcctagagtttgacctatccagaagttctttctcattctctttcacctgccaatcagctgttaatctgaattttcaagagaaaacaagcaaacataactgatcagctgccggtatgttcatcgtgtgaaattgcattccaagtgagctgtgctcagcagtgcttggacacagagctgcaagctgcgctggggtggaggaccgtcacttacactctgcccaaggcagaggtcgcattgctgtatcacagtattttattcaggtttctgcaaaaaaataaaaagataacttttttaaacaaacatgaatagaattttgcaaatttaacgttttcaagatttattcaaggaaacaaaatgcctatgttcaaccactggtgttaatgaacaaagatactgtgcgtctctggggaagacgcacctaggtggcggccactcccatggccttgtctaggactcagagaccactcggctctgagcttccaggcgcctcgtctgtgtgcatctcacgcccgacgtggcttctgaaacgtgcattcaacctcaaacttttgcataaaatagaatgaatcgttttgctctgatgaaatgtaggccttacttgtatataagactgttcctgccttcggtctgtcattttcccacctgcctcccctacccaccccccacccaccacctggggcttcctctgggggtccgagggtcttcccatcacatgaagacatcaggttgggtcctgccccactgcccctccccctgttcctgccccaagccgtcaatcagattgtggagcagtacacagtcagatgaaaatactgtaaatgcactcattgggggttttttggttttacttcatatcatgtgcaatgttgtggctttaacattttatgcaactatttatgaagacctctgttgtacctgtaataaatatatagaaaaagcacatacttcgtatggtgagctttatggttttgtgtgtgtgttggggttggcgggtgggtgggtagggtcgtagccctgtgccatcggttcaaagagacttttcgtgaaatttgttggttttgaggactgtaaaagtgatttcatactctgaatataaaactggataatagggtaatgttttaaaatttattatgctattattcagaatgccaaagtattattttttttcccaaaatcagtctggacatttactactttttagactttttgacgttgaactttctgtataaaaattggctgggttttgagcttttggtaagaaataaaagccgattaagcactggccgccccgcggctggtacccaatgcccgagtcactgtggcagcattcgcactggtgtggggagtcctttcaactcaaggaggctgggtttctgggcaccctcgaagttttctggatgtctttttatctttctcgtgtgaactgcactacaaaagagaccagcccgcttcccaagccagccagacacctgggtcttgagccataaactggcgtagttaagctttgcagcttccagtgtattttatttattcttttgttgggtttttgtttgtttcttcttgtaaaattgtacagaaactttttaaaagaaattggattcgaaactggatgtgtattcgtaacctcataatttttatttgtgtattgtttcttttattatttcagttaaatttttacattattttgcatgtatatttctttgtacagagaccttacatgtttacacagtatgatgtgatgtaaatattttattttgccatcagttattttaaaaaattaaacatatttgcctga

SEQ ID NO: 170445 - DNA, 7993 bp, Artificial Sequence
  derived and/or modified sequence
attaaggcccccatcgaggacctggatttggagggacagaagctgcttcagaggatacagagcagtgaaagctttcccaaaaagaactcaggctcaggcaatgcggacctgcagaacctcttgcccaaggtgtccaccatgctggaccggctgcactcgacacggcagcatctgcaccagatgtggcatgtgaggaagctgaagctggaccagtgcttccagctgaggctgtttgaacaggatgctgagaagatgtttgactggatcacacacaacaaaggcctgtttctaaacagctacacagagattgggaccagccaccctcatgccatggagcttcagacgcagcacaatcactttgccatgaactgtatgaacgtgtatgtaaatataaaccgcatcatgtcggtggccaatcgtctggtggagtctggccactatgcctcgcagcagatcaggcagatcgcgagtcagctggagcaggagtggaaggcgtttgcggcagccctggatgagcggagcaccttgctggacatgtcctccattttccaccagaaggccgaaaagtatatgagcaacgtggattcatggtgtaaagcttgcggtgaggtagaccttccctcagagctgcaggacctagaagatgccattcatcaccaccagggaatatatgaacatatcactcttgcttattctgaggtcagccaagatgggaagtcgctccttgacaagctccagcggcccttgactcccggcagctccgattccctgacagcctctgccaactactccaaggccgtgcaccatgtcctggatgtcatccacgaggtgctgcaccaccagcggcagctggagaacatctggcaacaccgcaaggtccggctgcatcagaggctgcagctgtgtgttttccagcaggacgttcagcaggtgctagactggatcgagaaccacggagaagcatttctgagcaaacatacaggtgtggggaaatctcttcatcgggccagagcattgcagaaacgtcatgaagattttgaagaagtggcacagaacacatacaccaatgcggataaattactggaagcagcagaacagctggctcagactggggaatgtgaccccgaagagatttatcaggctgcccatcagctggaagaccggattcaagatttcgttcggcgtgttgagcagcgaaagatcctactggacatgtcagtgtcctttcacacccatgtgaaagagctgtggacgtggctggaggagctgcagaaggagctgctggacgacgtgtatgccgagtcggtggaggccgtgcaggacctcatcaagcgctttggccagcagcagcagaccaccctgcaggtgactgtcaacgtgatcaaggaaggggaggacctcatccagcagctcagggactctgccatctccagtaacaagaccccccacaacagctccatcaaccacattgagacggtgctgcagcagctggacgaggcgcagtcgcagatggaggagctcttccaggagcgcaagatcaagctggagctcttcctgcagctgcgcatcttcgagagggacgccatcgacattatctcagacctcgagtcttggaatgatgagctttctcagcaaatgaatgacttcgacacagaagatctcacgattgcagagcagcgcctccagcaccatgcagacaaagccttgaccatgaacaacttgacttttgacgtcatccaccaagggcaagatcttctgcagtatgtcaatgaggtccaggcctctggtgtggagctgctgtgtgatagagatgtagacatggcaactcgggtccaggacctgctggagtttcttcatgaaaaacagcaggaattggatttagccgcagagcagcatcggaaacacctggagcagtgcgtgcagctgcgccacctgcaggcagaagtgaaacaggtgctgggttggatccgcaacggagagtccatgttaaatgccggacttatcacagccagctcgttacaagaggcagagcagctccagcgagagcacgagcagttccagcatgccattgagaaaacacatcagagcgcgctgcaggtgcagcagaaggcagaagccatgctacaggccaaccactacgacatggacatgatccgggactgcgccgagaaggtggcgtctcactggcaacagctcatgctcaagatggaagatcgcctcaagctcgtcaacgcctctgtcgctttctacaaaacctcagagcaggtctgcagcgtcctcgagagcctggaacaggagtacaagagagaagaagactggtgtggcggggcggataagctgggcccaaactctgagacggaccacgtgacgcccatgatcagcaagcacctggagcagaaggaggcattcctgaaggcttgcacccttgctcggaggaatgcagacgtcttcctgaaatacctgcacaggaacagcgtgaacatgccaggaatggtgacgcacatcaaagctcctgaacagcaagtgaaaaatatcttgaatgaactcttccaacgggagaacagggtattgcattactggaccatgaggaagagacggctggaccagtgtcagcagtacgtggtctttgagaggagtgccaagcaggctttggaatggatccatgacaatggcgagttctacctttccacacacacctccacgggctccagtatacagcacacccaggagctcctgaaagagcacgaggagttccagataactgcaaagcaaaccaaagagagagtgaagctattgatacagctggctgatggcttttgtgaaaaagggcatgcccatgcggcagagataaaaaaatgtgttactgctgtggataagaggtacagagatttctctctgcggatggagaagtacaggacctctttggaaaaagccctggggatttcttcagattccaacaaatcgagtaaaagtctccagctagatatcattccagccagtatccctggctcagaggtgaaacttcgagatgctgctcatgaacttaatgaagagaagcggaaatctgcccgcaggaaagagttcataatggctgagctcattcaaactgaaaaggcttatgtaagagacctccgggaatgtatggatacgtacctgtgggaaatgaccagtggcgtggaagagattccacctggcattgtaaacaaagaactcatcatcttcggaaacatgcaagaaatctacgaatttcataataacatattcctaaaggagctggaaaaatatgaacagttgccagaggatgttggacattgttttgttacttgggcagacaagtttcagatgtatgtcacatattgcaaaaataagcctgattctactcagctgatattggaacatgcagggtcctattttgacgagatacagcagcgacatggattagccaattccatttcttcctaccttattaaaccagttcagcgaataacgaagtatcagctccttttaaaagagctgctgacgtgctgtgaggaaggaaagggagagattaaagatggcctggaggtgatgctcagcgtgccgaagcgagccaatgatgccatgcacctcagcatgctggaagggtttgatgaaaacattgagtctcagggagaactcatcctacaggaatccttccaagtgtgggacccaaaaaccttaattcgaaagggtcgagaacggcatctcttcctttttgaaatgtccttagtatttagtaaagaagtgaaagattccagtgggagaagcaagtacctttataaaagcaaattgtttacctcagagttgggtgtcacagaacatgttgaaggagacccttgcaaatttgcactgtgggtggggagaacaccaacttcagataataaaattgtccttaaggcttccagcatagagaacaagcaggactggataaagcatatccgcgaagtcatccaggagcggacgatccacctgaagggagccctgaaggagcccattcacatccctaagaccgctcccgccacaagacagaagggaaggagggatggagaggatctggacagccaaggagacggcagcagccagcctgatacgatttccatcgcctcacggacgtctcagaacacgctggacagcgataagctctctggtggctgtgagctgacagtggtgatccatgacttcaccgcttgcaacagcaacgagctgaccatccgacggggccagaccgtggaagttctggagcggccgcatgacaagcctgactggtgtctggtgcggacaactgaccgctccccagcggcagaaggcctggtcccctgtggttcactgtgcatcgcccactccagaagtagcatggaaatggagggcatcttcaaccacaaagactcgctctccgtctccagcaatgacgccagtccacccgcatccgtggcttccctccagccccacatgatcggggcccagagctcgccgggccccaagcggccgggcaacaccctgcgcaagtggctcaccagccccgtgcggcggctcagcagcggcaaggccgacgggcacgtgaagaagctggcgcacaagcacaagaagagccgcgaggtccgcaagagcgccgacgccggctcgcagaaggactccgacgacagtgcggccaccccgcaggacgagacggtcgaggagagaggccggaacgagggcctgagcagcggtactctctccaaatcctcctcctcggggatgcagagctgtggagaagaggaaggcgaggagggggccgacgccgtgcccctgccgccacccatggccatccagcagcacagcctcctccagccagactcacaggatgacaaggcctcttctcggttattagtccgccccaccagctccgaaacaccgagtgcagccgagctcgtcagtgcaattgaggaactcgtgaaaagcaagatggcactggaggatcgccccagctcactccttgttgaccagggagatagtagcagcccttccttcaacccttcggataattcccttctctcttcctcctcgcccattgatgagatggaagaaaggaaatccagctctttaaagagaagacactacgttttgcaagaactagtggagacagagcgtgactatgtgcgggaccttggctatgtggttgagggctacatggcacttatgaaagaagatggtgttcctgatgacatgaaaggaaaagacaaaattgtgttcggcaacatccatcagatttacgactggcacagagacttttttttaggagagttagagaagtgccttgaagatccagaaaaactaggatccctttttgttaaacacgagagaaggttgcacatgtacatagcttattgtcaaaataaaccaaagtctgagcacattgtctcagaatacattgataccttttttgaggacttaaagcagcgtcttggccacaggttacagctcacagatctgttgatcaaaccagtgcagagaatcatgaagtatcagctgttactgaaggacttcctcaagtattccaaaaaggccagcctggatacatcagaattagagagagctgtggaagtcatgtgcatagtacccaggcggtgcaacgacatgatgaacgtggggcggctgcaaggattcgacgggaaaatcgttgcccagggtaaactgctcttgcaggacacattcttggtcacagaccaagatgcaggacttctgcctcgctgcagagagaggcgcatcttcctctttgagcagatcgtcatattcagcgaaccacttgataaaaagaagggcttctccatgccgggattcctgtttaagaacagtatcaaggtgagttgcctttgcctggaggaaaatgtggaaaatgatccctgtaaatttgctctgacatcgaggacgggtgacgtggtagagaccttcattttgcattcatctagtccaagtgtccggcaaacttggatccatgaaatcaaccaaattttagaaaaccagcgcaattttttaaatgccttgacatcgccaatcgagtaccagaggaaccacagcgggggcggcggcggcggcggcagcgggggcagcggcgggggtgggggcagcggcggcggcggggcccccagtggcggcagcggccacagtggcggccccagcagctgcggcggcgcccccagcacgagcaggagccggccctcccggatcccccagcctgtccgacaccacccccccgtgctggtctcctctgcagcctcgagccaggcagaggcagacaagatgtcaggtacgtccacccccgggccctccctgcctccccctggcgcggcccccgaggccggccccagcgcgcccagcaggcggccccccggcgcggacgccgaggggtccgagcgagaagcggagccgatccccaagatgaaggtgctggagagccccaggaaaggcgccgcgaacgcctcggggtcgagcccagacgcccccgccaaggacgcgcgcgctagcctgggcaccctgccgcttgggaagccccgggccggggccgcttcgccgctgaactcgccgctctccagcgcggtcccttctctcggcaaggagcccttcccccccagcagccccctgcagaaggggggctccttctggagctccatccccgcctcccccgccagccgacccggctccttcaccttcccgggggacagcgactccctccagcggcagacaccccgccacgcggcccctggcaaggatactgaccgcatgagcacgtgctcctcggccagcgagcagtccgtgcagtccacccagagcaacgggagtgaaagcagcagcagtagcaacatctccaccatgttggtgacacacgattacacggcagtgaaggaggatgagatcaacgtctaccaaggagaggtcgttcaaattctggccagcaaccagcagaacatgtttctggtgttccgagccgccactgaccagtgccccgcagctgagggctggattccaggctttgtcctgggccacaccagtgcagtcatcgtggagaacccggacgggactctcaagaagtcaacatcttggcacacagcactccgtttaaggaaaaaatctgagaaaaaagataaagacggcaaaagggaaggcaagttagagaacggttatcggaagtcacgggaaggactcagcaacaaggtatctgtgaagcttctcaatcccaactacatttatgacgttcccccagaattcgtcattccattgagtgaggtcacgtgtgagacaggggagaccgttgttcttagatgtcgagtctgtggccgccccaaagcctcaattacctggaagggccctgaacacaacaccttgaacaacgatggtcactacagcatctcctacagtgacctgggagaggccacgctgaagattgtgggcgtgaccacggaagatgacggcatctacacgtgcatcgctgtcaatgacatgggttcagcctcatcgtcggccagcctgagggtcctaggtccagggatggatgggatcatggtgacctggaaagacaactttgactccttctacagtgaagtggctgagcttggcagggcaaactggaacaactggtcaccctactaacctgtaaactgggaataactggcatttgtgcagaatggctcccaggttcctgatgcccagcggcactctacagacattgccaggtctgtctgcaaatccacggtgcttggccggatgctgtttgaagtgtgcactttagagaagaaaaggggcggggtgtcatttcccacacacaagccgctagtccttatggaaactcttccaacgaaggtggatggaaacttttccaacgaaggtgatgtttttgaaacccagcttttatttggacaaagccttcttgaaaaatccttgaaaatgctttctgtttttaataaaggagatctctggaacatttccatgagctttcatagca

SEQ ID NO: 170446 - DNA, 9689 bp, Artificial Sequence
  derived and/or modified sequence
gcagccatgagcggcagcagcggcggagccgccgcccccgccgcgtcctccggccccgccgcggcggccagcgcggctggctcgggctgcgggggcggtgccggcgagggggcagaggaggcggccaaggacctggccgacatcgcggccttcttccgatccgggtttcgaaaaaacgatgaaatgaaagctatggatgttttaccaattttgaaggaaaaagttgcatacctttcaggtgggagagataaacgtggaggtcccattttaacgtttccggcccgcagcaatcatgacagaatacgacaggaggatctcaggagactcatttcctatctagcctgtattcccagcgaggaggtctgcaagcgtggcttcacggtgatcgtggacatgcgtgggtccaagtgggactccatcaagccccttctgaagatcctgcaggagtccttcccctgctgcatccatgtggccctgatcatcaagccagacaacttctggcagaaacagaggactaattttggcagttctaaatttgaatttgagacaaatatggtctctttagaaggccttaccaaagtagttgatccttctcagctaactcctgagtttgatggctgcctggaatacaaccacgaagaatggattgaaatcagagttgcttttgaagactacattagcaatgccacccacatgctgtctcggctggaggaacttcaggacatcctagctaagaaggagctgcctcaggatttagagggggctcggaatatgatcgaggaacattctcagctgaagaagaaggtgattaaggcccccatcgaggacctggatttggagggacagaagctgcttcagaggatacagagcagtgaaagctttcccaaaaagaactcaggctcaggcaatgcggacctgcagaacctcttgcccaaggtgtccaccatgctggaccggctgcactcgacacggcagcatctgcaccagatgtggcatgtgaggaagctgaagctggaccagtgcttccagctgaggctgtttgaacaggatgctgagaagatgtttgactggatcacacacaacaaaggcctgtttctaaacagctacacagagattgggaccagccaccctcatgccatggagcttcagacgcagcacaatcactttgccatgaactgtatgaacgtgtatgtaaatataaaccgcatcatgtcggtggccaatcgtctggtggagtctggccactatgcctcgcagcagatcaggcagatcgcgagtcagctggagcaggagtggaaggcgtttgcggcagccctggatgagcggagcaccttgctggacatgtcctccattttccaccagaaggccgaaaagtatatgagcaacgtggattcatggtgtaaagcttgcggtgaggtagaccttccctcagagctgcaggacctagaagatgccattcatcaccaccagggaatatatgaacatatcactcttgcttattctgaggtcagccaagatgggaagtcgctccttgacaagctccagcggcccttgactcccggcagctccgattccctgacagcctctgccaactactccaaggccgtgcaccatgtcctggatgtcatccacgaggtgctgcaccaccagcggcagctggagaacatctggcaacaccgcaaggtccggctgcatcagaggctgcagctgtgtgttttccagcaggacgttcagcaggtgctagactggatcgagaaccacggagaagcatttctgagcaaacatacaggtgtggggaaatctcttcatcgggccagagcattgcagaaacgtcatgaagattttgaagaagtggcacagaacacatacaccaatgcggataaattactggaagcagcagaacagctggctcagactggggaatgtgaccccgaagagatttatcaggctgcccatcagctggaagaccggattcaagatttcgttcggcgtgttgagcagcgaaagatcctactggacatgtcagtgtcctttcacacccatgtgaaagagctgtggacgtggctggaggagctgcagaaggagctgctggacgacgtgtatgccgagtcggtggaggccgtgcaggacctcatcaagcgctttggccagcagcagcagaccaccctgcaggtgactgtcaacgtgatcaaggaaggggaggacctcatccagcagctcagggactctgccatctccagtaacaagaccccccacaacagctccatcaaccacattgagacggtgctgcagcagctggacgaggcgcagtcgcagatggaggagctcttccaggagcgcaagatcaagctggagctcttcctgcagctgcgcatcttcgagagggacgccatcgacattatctcagacctcgagtcttggaatgatgagctttctcagcaaatgaatgacttcgacacagaagatctcacgattgcagagcagcgcctccagcaccatgcagacaaagccttgaccatgaacaacttgacttttgacgtcatccaccaagggcaagatcttctgcagtatgtcaatgaggtccaggcctctggtgtggagctgctgtgtgatagagatgtagacatggcaactcgggtccaggacctgctggagtttcttcatgaaaaacagcaggaattggatttagccgcagagcagcatcggaaacacctggagcagtgcgtgcagctgcgccacctgcaggcagaagtgaaacaggtgctgggttggatccgcaacggagagtccatgttaaatgccggacttatcacagccagctcgttacaagaggcagagcagctccagcgagagcacgagcagttccagcatgccattgagaaaacacatcagagcgcgctgcaggtgcagcagaaggcagaagccatgctacaggccaaccactacgacatggacatgatccgggactgcgccgagaaggtggcgtctcactggcaacagctcatgctcaagatggaagatcgcctcaagctcgtcaacgcctctgtcgctttctacaaaacctcagagcaggtctgcagcgtcctcgagagcctggaacaggagtacaagagagaagaagactggtgtggcggggcggataagctgggcccaaactctgagacggaccacgtgacgcccatgatcagcaagcacctggagcagaaggaggcattcctgaaggcttgcacccttgctcggaggaatgcagacgtcttcctgaaatacctgcacaggaacagcgtgaacatgccaggaatggtgacgcacatcaaagctcctgaacagcaagtgaaaaatatcttgaatgaactcttccaacgggagaacagggtattgcattactggaccatgaggaagagacggctggaccagtgtcagcagtacgtggtctttgagaggagtgccaagcaggctttggaatggatccatgacaatggcgagttctacctttccacacacacctccacgggctccagtatacagcacacccaggagctcctgaaagagcacgaggagttccagataactgcaaagcaaaccaaagagagagtgaagctattgatacagctggctgatggcttttgtgaaaaagggcatgcccatgcggcagagataaaaaaatgtgttactgctgtggataagaggtacagagatttctctctgcggatggagaagtacaggacctctttggaaaaagccctggggatttcttcagattccaacaaatcgagtaaaagtctccagctagatatcattccagccagtatccctggctcagaggtgaaacttcgagatgctgctcatgaacttaatgaagagaagcggaaatctgcccgcaggaaagagttcataatggctgagctcattcaaactgaaaaggcttatgtaagagacctccgggaatgtatggatacgtacctgtgggaaatgaccagtggcgtggaagagattccacctggcattgtaaacaaagaactcatcatcttcggaaacatgcaagaaatctacgaatttcataataacatattcctaaaggagctggaaaaatatgaacagttgccagaggatgttggacattgttttgttacttgggcagacaagtttcagatgtatgtcacatattgcaaaaataagcctgattctactcagctgatattggaacatgcagggtcctattttgacgagatacagcagcgacatggattagccaattccatttcttcctaccttattaaaccagttcagcgaataacgaagtatcagctccttttaaaagagctgctgacgtgctgtgaggaaggaaagggagagattaaagatggcctggaggtgatgctcagcgtgccgaagcgagccaatgatgccatgcacctcagcatgctggaagggtttgatgaaaacattgagtctcagggagaactcatcctacaggaatccttccaagtgtgggacccaaaaaccttaattcgaaagggtcgagaacggcatctcttcctttttgaaatgtccttagtatttagtaaagaagtgaaagattccagtgggagaagcaagtacctttataaaagcaaattgtttacctcagagttgggtgtcacagaacatgttgaaggagacccttgcaaatttgcactgtgggtggggagaacaccaacttcagataataaaattgtccttaaggcttccagcatagagaacaagcaggactggataaagcatatccgcgaagtcatccaggagcggacgatccacctgaagggagccctgaaggagcccattcacatccctaagaccgctcccgccacaagacagaagggaaggagggatggagaggatctggacagccaaggagacggcagcagccagcctgatacgatttccatcgcctcacggacgtctcagaacacgctggacagcgataagctctctggtggctgtgagctgacagtggtgatccatgacttcaccgcttgcaacagcaacgagctgaccatccgacggggccagaccgtggaagttctggagcggccgcatgacaagcctgactggtgtctggtgcggacaactgaccgctccccagcggcagaaggcctggtcccctgtggttcactgtgcatcgcccactccagaagtagcatggaaatggagggcatcttcaaccacaaagactcgctctccgtctccagcaatgacgccagtccacccgcatccgtggcttccctccagccccacatgatcggggcccagagctcgccgggccccaagcggccgggcaacaccctgcgcaagtggctcaccagccccgtgcggcggctcagcagcggcaaggccgacgggcacgtgaagaagctggcgcacaagcacaagaagagccgcgaggtccgcaagagcgccgacgccggctcgcagaaggactccgacgacagtgcggccaccccgcaggacgagacggtcgaggagagaggccggaacgagggcctgagcagcggtactctctccaaatcctcctcctcggggatgcagagctgtggagaagaggaaggcgaggagggggccgacgccgtgcccctgccgccacccatggccatccagcagcacagcctcctccagccagactcacaggatgacaaggcctcttctcggttattagtccgccccaccagctccgaaacaccgagtgcagccgagctcgtcagtgcaattgaggaactcgtgaaaagcaagatggcactggaggatcgccccagctcactccttgttgaccagggagatagtagcagcccttccttcaacccttcggataattcccttctctcttcctcctcgcccattgatgagatggaagaaaggaaatccagctctttaaagagaagacactacgttttgcaagaactagtggagacagagcgtgactatgtgcgggaccttggctatgtggttgagggctacatggcacttatgaaagaagatggtgttcctgatgacatgaaaggaaaagacaaaattgtgttcggcaacatccatcagatttacgactggcacagagacttttttttaggagagttagagaagtgccttgaagatccagaaaaactaggatccctttttgttaaacacgagagaaggttgcacatgtacatagcttattgtcaaaataaaccaaagtctgagcacattgtctcagaatacattgataccttttttgaggacttaaagcagcgtcttggccacaggttacagctcacagatctgttgatcaaaccagtgcagagaatcatgaagtatcagctgttactgaaggacttcctcaagtattccaaaaaggccagcctggatacatcagaattagagagagctgtggaagtcatgtgcatagtacccaggcggtgcaacgacatgatgaacgtggggcggctgcaaggattcgacgggaaaatcgttgcccagggtaaactgctcttgcaggacacattcttggtcacagaccaagatgcaggacttctgcctcgctgcagagagaggcgcatcttcctctttgagcagatcgtcatattcagcgaaccacttgataaaaagaagggcttctccatgccgggattcctgtttaagaacagtatcaaggtgagttgcctttgcctggaggaaaatgtggaaaatgatccctgtaaatttgctctgacatcgaggacgggtgacgtggtagagaccttcattttgcattcatctagtccaagtgtccggcaaacttggatccatgaaatcaaccaaattttagaaaaccagcgcaattttttaaatgccttgacatcgccaatcgagtaccagaggaaccacagcgggggcggcggcggcggcggcagcgggggcagcggcgggggtgggggcagcggcggcggcggggcccccagtggcggcagcggccacagtggcggccccagcagctgcggcggcgcccccagcacgagcaggagccggccctcccggatcccccagcctgtccgacaccacccccccgtgctggtctcctctgcagcctcgagccaggcagaggcagacaagatgtcagaaagtgaaagcagcagcagtagcaacatctccaccatgttggtgacacacgattacacggcagtgaaggaggatgagatcaacgtctaccaaggagaggtcgttcaaattctggccagcaaccagcagaacatgtttctggtgttccgagccgccactgaccagtgccccgcagctgagggctggattccaggctttgtcctgggccacaccagtgcagtcatcgtggagaacccggacgggactctcaagaagtcaacatcttggcacacagcactccgtttaaggaaaaaatctgagaaaaaagataaagacggcaaaagggaaggcaagttagagaacggttatcggaagtcacgggaaggactcagcaacaaggtatctgtgaagcttctcaatcccaactacatttatgacgttcccccagaattcgtcattccattgagtgaggtcacgtgtgagacaggggagaccgttgttcttagatgtcgagtctgtggccgccccaaagcctcaattacctggaagggccctgaacacaacaccttgaacaacgatggtcactacagcatctcctacagtgacctgggagaggccacgctgaagattgtgggcgtgaccacggaagatgacggcatctacacgtgcatcgctgtcaatgacatgggttcagcctcatcgtcggccagcctgagggtcctaggtccagggatggatgggatcatggtgacctggaaagacaactttgactccttctacagtgaagtggctgagcttggcaggggcagattctctgtcgttaagaaatgtgatcagaaaggaaccaagcgagcagtggccactaagtttgtgaacaagaagttgatgaagcgcgaccaggtcacccatgagcttggcatcctgcagagcctccagcaccccctgcttgtcggcctcctcgacacctttgagacccccaccagctacatcctggtcttagaaatggctgaccagggtcgcctcctggactgcgtggtgcgatggggaagcctcactgaagggaagatcagggcgcacctgggggaggttctggaagctgtccggtacctgcacaactgcaggatagcacacctggacctaaagcctgagaatatcctggtggatgagagtttagccaagccaaccatcaaactggctgactttggagatgctgttcagctcaacacgacctactacatccaccagttactggggaaccctgaattcgcagcccctgaaatcatcctcgggaaccctgtctccctgacctcggatacgtggagtgttggagtgctcacatacgtacttcttagtggcgtgtcccccttcctggatgacagtgtggaagagacctgcctgaacatttgccgcttagactttagcttcccagatgactactttaaaggagtgagccagaaggccaaggagttcgtgtgcttcctcctgcaggaggaccccgccaagcgtccctcggctgcgctggccctccaggagcagtggctgcaggccggcaacggcagaagcacgggcgtcctcgacacgtccagactgacttccttcattgagcggcgcaaacaccagaatgatgttcgacctatccgtagcattaaaaactttctgcagagcaggcttctgcctagagtttgacctatccagaagttctttctcattctctttcacctgccaatcagctgttaatctgaattttcaagagaaaacaagcaaacataactgatcagctgccggtatgttcatcgtgtgaaattgcattccaagtgagctgtgctcagcagtgcttggacacagagctgcaagctgcgctggggtggaggaccgtcacttacactctgcccaaggcagaggtcgcattgctgtatcacagtattttattcaggtttctgcaaaaaaataaaaagataacttttttaaacaaacatgaatagaattttgcaaatttaacgttttcaagatttattcaaggaaacaaaatgcctatgttcaaccactggtgttaatgaacaaagatactgtgcgtctctggggaagacgcacctaggtggcggccactcccatggccttgtctaggactcagagaccactcggctctgagcttccaggcgcctcgtctgtgtgcatctcacgcccgacgtggcttctgaaacgtgcattcaacctcaaacttttgcataaaatagaatgaatcgttttgctctgatgaaatgtaggccttacttgtatataagactgttcctgccttcggtctgtcattttcccacctgcctcccctacccaccccccacccaccacctggggcttcctctgggggtccgagggtcttcccatcacatgaagacatcaggttgggtcctgccccactgcccctccccctgttcctgccccaagccgtcaatcagattgtggagcagtacacagtcagatgaaaatactgtaaatgcactcattgggggttttttggttttacttcatatcatgtgcaatgttgtggctttaacattttatgcaactatttatgaagacctctgttgtacctgtaataaatatat

SEQ ID NO: 170447 - protein, 534 aa, Artificial Sequence
  derived and/or modified sequence
MARGLQVPLPRLATGLLLLLSVQPWAESGKVLVVPTDGSPWLSMREALRELHARGHQAVVLTPEVNMHIKEEKFFTLTAYAVPWTQKEFDRVTLGYTQGFFETEHLLKRYSRSMAIMNNVSLALHRCCVELLHNEALIRHLNATSFDVVLTDPVNLCGAVLAKYLSIPAVFFWRYIPCDLDFKGTQCPNPSSYIPKLLTTNSDHMTFLQRVKNMLYPLALSYICHTFSAPYASLASELFQREVSVVDLVSYASVWLFRGDFVMDYPRPIMPNMVFIGGINCANGKPLSQEFEAYINASGEHGIVVFSLGSMVSEIPEKKAMAIADALGKIPQTVLWRYTGTRPSNLANNTILVKWLPQNDLLGHPMTRAFITHAGSHGVYESICNGVPMVMMPLFGDQMDNAKRMETKGAGVTLNVLEMTSEDLENALKAVINDKSYKENIMRLSSLHKDRPVEPLDLAVFWVEFVMRHKGAPHLRPAAHDLTWYQYHSLDVIGFLLAVVLTVAFITFKCCAYGYRKCLGKKGRVKKAHKSKTH

SEQ ID NO: 170448 - DNA, 1605 bp, Artificial Sequence
  derived and/or modified sequence
atggccagaggtctgcaagtgcccctcccgcgactggccactggccttctactccttttgtctgtgcagccctgggctgagtctgggaaggtgctggtcgttcctacagacggctctccttggctgtccatgcgagaggctctgcgggaactgcatgccaggggtcaccaggctgtggtacttactcccgaagtaaacatgcatattaaggaggagaagtttttcacgttgacagcgtacgcggtgccatggactcaaaaggaatttgatagagtcaccctgggatacactcagggattcttcgaaaccgagcacctgctgaaacgttactccagatccatggccattatgaacaatgtgagcctggccctgcacagatgctgtgtagagttgcttcataacgaggccctgatcaggcatctcaacgctacttcttttgacgttgtgctaaccgaccccgtcaacttatgcggggcagtgttggccaagtatctatcgattcccgcagttttcttctggcggtatattccctgcgacttagacttcaaaggaactcaatgccccaatccctcttcttatattcctaaattgctgactacgaattctgaccacatgacctttctgcaacgagtgaaaaacatgctgtacccactcgccctctcttatatctgccacacattcagtgctccttatgccagtctcgcgagcgaactgttccagagggaagtcagtgtagtggatctggtttcttacgcgagcgtgtggctctttcggggagatttcgttatggattatccacgcccaatcatgccaaacatggtttttatcgggggcattaactgcgcaaacggcaaacctctcagccaggaattcgaagcttacataaacgctagtggcgaacacggtatagtagtgttctccctggggtccatggtttctgaaatcccggaaaagaaagcgatggctatcgccgacgccctggggaagatccctcagactgttctgtggcgttacacaggtactcggccttcaaatttggccaataataccatcttagtcaaatggctgccacagaacgacctactgggccacccaatgacaagagcattcatcacccacgctggctcccatggggtttacgagtcgatttgcaatggagttcctatggtcatgatgccactcttcggagaccagatggacaacgccaaacggatggaaacgaaaggggccggcgtaacattgaatgtcctggagatgacttcagaagacttggaaaacgcgctcaaggccgtcattaacgacaaaagctataaagaaaacattatgagactctcctctttacataaagacagaccggtggagccgctggatctcgcggttttttgggtcgagttcgttatgaggcacaaaggtgctccacatctgcgtccggcagcccacgacctcacctggtatcagtaccatagcctcgacgtgatcggcttcttacttgcagtcgttctcactgttgccttcatcactttcaaatgttgtgcctatggctacagaaagtgtctcggtaagaaagggcgagtgaaaaaagcccacaagagtaagacgcattag

SEQ ID NO: 170449 - DNA, 1605 bp, Artificial Sequence
  derived and/or modified sequence
atggcccggggcctgcaggtgcccctgccccggctggccaccggcctgctgctgctgctgtctgtgcagccctgggccgagagcggcaaggtgctggtggtgcccacagatggcagcccctggctgtccatgagggaggccctgcgggagctgcacgcccggggccaccaggccgtggtgctgaccccagaggtgaacatgcacatcaaggaggagaagttcttcaccctgacagcctatgctgtgccctggacccagaaggagtttgacagagtgaccctgggctacacccagggcttctttgaaacagagcacctgctgaagcgctacagccgctccatggccatcatgaacaacgtgtccctggccctgcaccgctgctgcgtggagctgctgcacaatgaggccctgatccgccacctgaatgccaccagctttgatgtggtgctgacagatcctgtgaacctgtgtggggctgtgctggccaagtacctgagcatcccagctgtgttcttctggagatacatcccctgtgacctggacttcaagggcacccagtgccccaaccccagcagctacatccccaagctgctgaccaccaacagcgaccacatgaccttcctgcagagggtgaagaacatgctgtaccccctggccctgagctacatctgccacaccttcagcgccccctatgccagcctggccagcgagctgttccagcgggaggtgtctgtggtggacctggtgtcctatgcctctgtgtggctgttccggggggactttgtgatggactacccccggcccatcatgcccaacatggtgttcatcggcggcatcaactgtgccaacgggaagcccctgagccaggagtttgaggcctacatcaatgccagcggggagcacggcatcgtggtgttcagcctgggctccatggtgtctgagatccctgagaagaaggccatggccatcgcagatgccctgggcaagatcccccagacagtgctgtggagatacacaggcacccggcccagcaacctggccaacaacaccatcctggtgaagtggctgccccagaatgacctgctgggccaccccatgacccgggccttcatcacccacgccggcagccatggagtgtatgagagcatctgcaatggagtgcccatggtgatgatgcccctgtttggagaccagatggacaatgccaagaggatggagaccaagggggccggcgtgaccctgaatgtgctggagatgaccagcgaggacctggagaatgccctgaaggccgtcatcaatgacaagagctacaaggagaacatcatgaggctgagcagcctgcacaaggacaggcctgtggagcccctggacctggccgtgttctgggtggagtttgtgatgaggcacaagggggccccccacctgcggcctgctgcccatgacctgacctggtaccagtaccacagcctggatgtgattggcttcctgctggccgtggtgctgactgtggccttcatcaccttcaagtgctgtgcctacggctacaggaagtgcctgggcaagaagggccgggtgaagaaggcccacaagagcaagacccactag

SEQ ID NO: 170450 - DNA, 1605 bp, Artificial Sequence
  derived and/or modified sequence
atggcccggggcctgcaggtgcccctgccccggctggccaccggccttttgctgctcttgagtgtgcagccatgggcagagtctggcaaagttcttgtggttcccaccgacggatcaccctggctcagcatgagggaggcccttagggagctgcacgccaggggccatcaggccgtggtcctgacgcccgaggtcaatatgcatatcaaagaggaaaagtttttcaccttgacggcctacgcagtgccgtggactcaaaaagagtttgatagggtgacattgggttatacacagggattttttgagacggagcatttgctcaaacgatacagccggagtatggctattatgaataacgtatcgcttgcacttcatcggtgctgtgttgaacttttacataacgaagcattaatccgccaccttaatgccacctcattcgacgtggtgctgacagaccctgtgaacctttgtggggctgtgttagctaaatatctgtcgattcccgccgtctttttctggcgctatattccctgtgacctcgattttaagggcacccaatgtccaaacccctcaagctatataccgaaactcttaaccacaaactcagaccacatgacatttctgcagcgcgtaaagaacatgctgtacccactggctttgtcatatatatgccacacctttagtgcgccttatgcttcccttgcttcagagctgtttcagcgcgaggttagtgtggtggacttagtgtcctatgctagtgtgtggctgtttagaggcgactttgtaatggactatcccaggcctatcatgccgaacatggtgtttatcggcggaattaattgcgctaatgggaagccactgagccaggagttcgaggcatacattaacgccagtggcgagcacggtatcgtcgttttctctctcggatccatggtgtcagaaatccctgaaaagaaggctatggctatcgcagacgcattaggtaagataccccagacagtcctgtggagatatactggtaccaggcctagcaatctcgccaacaacactatccttgtcaaatggctgcctcagaatgacctgttgggccacccgatgactcgagcctttattacccacgctggtagtcacggggtttacgagagtatttgcaacggcgtgcccatggtgatgatgcctttatttggcgaccaaatggacaacgccaagcgtatggagaccaaaggcgctggcgtgactctcaatgtcctggagatgacttccgaagacctcgaaaatgcgctcaaagcggtgatcaacgataaatcctataaggagaatatcatgagactgtcttcacttcacaaagatcggccagtggagcctttggacctggctgtcttctgggtggagtttgtcatgcgtcacaagggagctcctcacctgagaccagctgcgcatgatctgacttggtaccagtaccacagcctggacgttatcggattcttgttggctgtagtattgactgtagctttcatcacctttaagtgttgtgcctacggatatagaaaatgtttaggaaagaagggcagagtgaagaaagcccataaatccaagacacactag

SEQ ID NO: 170451 - DNA, 1605 bp, Artificial Sequence
  derived and/or modified sequence
atggccaggggcttgcaggtaccactgcctaggttggccactggcctgctgcttctgctgtccgtccagccatgggccgaaagcggcaaggtgctggtggtccccactgacgggtcaccttggctgagcatgcgggaggccctgagagaactccatgcgagaggacaccaagcggtggtgcttaccccagaggtgaacatgcacattaaagaggagaagttctttacattaacagcctatgcagttccttggactcagaaggaatttgatcgggtaacactggggtacacccagggttttttcgagactgagcacttgctgaaacgctattcccgaagtatggctataatgaacaacgtaagtttggcactgcaccggtgctgtgtggagttgctgcacaatgaggccctcatcagacacttgaacgcaacaagtttcgacgtggtcctgacagaccccgtcaacctttgcggagcagtccttgccaagtatctgagtatcccagcagtcttcttttggcgttacatcccgtgtgatctcgacttcaagggaacacagtgtcctaatcccagttcctatatccccaaactgctcaccactaattccgaccatatgacttttctccagcgagtgaaaaacatgttgtaccctctggccctgtcttatatttgccacactttcagtgctccgtatgcaagtctagcttcagagttattccaacgagaagtcagtgtggtggacctggtaagctacgccagtgtctggctcttcagaggcgatttcgtgatggattaccctagaccgatcatgcccaatatggtgtttatcggcggtatcaattgtgcaaatgggaagcctctgtcccaggagtttgaggcttacataaacgcttctggcgaacatggtattgtcgtgttctctctcggatcgatggttagcgaaataccggagaagaaagcgatggcaattgctgatgctttgggcaaaatccctcagaccgtgctgtggcgctatactgggacgcgcccatctaacctcgcgaataacaccattctggtaaagtggctcccacagaatgaccttctgggccatccaatgacacgggcattcataacacacgccggatctcatggggtgtatgaaagtatttgtaatggcgtgccaatggtgatgatgcctctctttggagatcagatggacaatgccaagagaatggagaccaaaggcgctggagtgaccctcaacgtactcgagatgaccagtgaggacctcgagaacgctctgaaagctgtgatcaacgataaaagttataaagagaacatcatgcgtctgtctagcctgcacaaagacaggccggtggagccactggacctggccgttttttgggtggagtttgtgatgcggcacaagggcgcaccccacctgcgacctgccgctcacgaccttacctggtaccagtatcactctctagacgttattggtttcctcctcgccgtggtcttaaccgtggccttcatcacatttaagtgttgtgcctacggatatcgcaagtgtctgggaaagaaaggacgggtgaagaaggcgcacaagagcaagacgcattag

SEQ ID NO: 170452 - DNA, 2388 bp, Artificial Sequence
  derived and/or modified sequence
acagcgtggggtggacagtcagctgtcggtggcttctgctgagatggccagaggactccaggttcccctgccgcggctggccacaggactgctgctcctcctcagtgtccagccctgggctgagagtggaaaggtgttggtggtgcccactgatggcagcccctggctcagcatgcgggaggccttgcgggagctccatgccagaggccaccaggcggtggtcctcaccccagaggtgaatatgcacatcaaagaagagaaatttttcaccctgacagcctatgctgttccatggacccagaaggaatttgatcgcgttacgctgggctacactcaagggttctttgaaacagaacatcttctgaagagatattctagaagtatggcaattatgaacaatgtatctttggcccttcataggtgttgtgtggagctactgcataatgaggccctgatcaggcacctgaatgctacttcctttgatgtggttttaacagaccccgttaacctctgtggggcggtgctggctaagtacctgtcgattcctgctgtgtttttttggaggtacattccatgtgacttagactttaagggcacacagtgtccaaatccttcctcctatattcctaagttactaacgaccaattcagaccacatgacattcctgcaaagggtcaagaacatgctctaccctctggccctgtcctacatttgccatactttttctgccccttatgcaagtcttgcctctgagctttttcagagagaggtgtcagtggtggatcttgtcagctatgcatccgtgtggctgttccgaggggactttgtgatggactaccccaggccgatcatgcccaacatggtcttcattgggggcatcaactgtgccaacgggaagccactatctcaggaatttgaagcctacattaatgcttctggagaacatggaattgtggttttctctttgggatcaatggtctcagaaattccagagaagaaagctatggcaattgctgatgctttgggcaaaatccctcagacagtcctgtggcggtacactggaacccgaccatcgaatcttgcgaacaacacgatacttgttaagtggctaccccaaaacgatctgcttggtcacccgatgacccgtgcctttatcacccatgctggttcccatggtgtttatgaaagcatatgcaatggcgttcccatggtgatgatgcccttgtttggtgatcagatggacaatgcaaagcgcatggagactaagggagctggagtgaccctgaatgttctggaaatgacttctgaagatttagaaaatgctctaaaagcagtcatcaatgacaaaagttacaaggagaacatcatgcgcctctccagccttcacaaggaccgcccggtggagccgctggacctggccgtgttctgggtggagtttgtgatgaggcacaagggcgcgccacacctgcgccccgcagcccacgacctcacctggtaccagtaccattccttggacgtgattggtttcctcttggccgtcgtgctgacagtggccttcatcacctttaaatgttgtgcttatggctaccggaaatgcttggggaaaaaagggcgagttaagaaagcccacaaatccaagacccattgagaagtgggtgggaaataaggtaaaattttgaaccattccctagtcatttccaaacttgaaaacagaatcagtgttaaattcattttattcttattaaggaaatactttgcataaattaatcagccccagagtgctttaaaaaattctcttaaataaaaataatagactcgctagtcagtaaagatatttgaatatgtatcgtgccccctctggtgtctttgatcaggatgacatgtgccatttttcagaggacgtgcagacaggctggcattctagattacttttcttactctgaaacatggcctgtttgggagtgcgggattcaaaggtggtcccacggctgcccctactgcaaatggcagttttaatcttatcttttggcttctgcagatggttgcaattgatccttaaccaataatggtcagtcctcatctctgtcgtgcttcataggtgccaccttgtgtgtttaaagaagggaagctttgtacctttagagtgtaggtgaaatgaatgaatggcttggagtgcactgagaacagcatatgatttcttgctttggggaaaaagaatgatgctatgaaattggtgggtggtgtatttgagaagataatcattgcttatgtcaaatggagctgaatttgataaaaacccaaaatacagctatgaagtgctgggcaagtttactttttttctgatgtttcctacaactaaaaataaattaataaatttatataaattct

SEQ ID NO: 170453 - DNA, 1605 bp, Artificial Sequence
  derived and/or modified sequence
atggccagaggcctgcaggtgcccctgcccagactggccaccggcctgctgctgctgctgagcgtgcagccctgggccgagagcggcaaggtgctggtggtgcccaccgacggcagcccctggctgagcatgagagaggccctgagagagctgcacgccagaggccaccaggccgtggtgctgacccccgaggtgaacatgcacatcaaggaggagaagttcttcaccctgaccgcctacgccgtgccctggacccagaaggagttcgacagagtgaccctgggctacacccagggcttcttcgagaccgagcacctgctgaagagatacagcagaagcatggccatcatgaacaacgtgagcctggccctgcacagatgctgcgtggagctgctgcacaacgaggccctgatcagacacctgaacgccaccagcttcgacgtggtgctgaccgaccccgtgaacctgtgcggcgccgtgctggccaagtacctgagcatccccgccgtgttcttctggagatacatcccctgcgacctggacttcaagggcacccagtgccccaaccccagcagctacatccccaagctgctgaccaccaacagcgaccacatgaccttcctgcagagagtgaagaacatgctgtaccccctggccctgagctacatctgccacaccttcagcgccccctacgccagcctggccagcgagctgttccagagagaggtgagcgtggtggacctggtgagctacgccagcgtgtggctgttcagaggcgacttcgtgatggactaccccagacccatcatgcccaacatggtgttcatcggcggcatcaactgcgccaacggcaagcccctgagccaggagttcgaggcctacatcaacgccagcggcgagcacggcatcgtggtgttcagcctgggcagcatggtgagcgagatccccgagaagaaggccatggccatcgccgacgccctgggcaagatcccccagaccgtgctgtggagatacaccggcaccagacccagcaacctggccaacaacaccatcctggtgaagtggctgccccagaacgacctgctgggccaccccatgaccagagccttcatcacccacgccggcagccacggcgtgtacgagagcatctgcaacggcgtgcccatggtgatgatgcccctgttcggcgaccagatggacaacgccaagagaatggagaccaagggcgccggcgtgaccctgaacgtgctggagatgaccagcgaggacctggagaacgccctgaaggccgtgatcaacgacaagagctacaaggagaacatcatgagactgagcagcctgcacaaggacagacccgtggagcccctggacctggccgtgttctgggtggagttcgtgatgagacacaagggcgccccccacctgagacccgccgcccacgacctgacctggtaccagtaccacagcctggacgtgatcggcttcctgctggccgtggtgctgaccgtggccttcatcaccttcaagtgctgcgcctacggctacagaaagtgcctgggcaagaagggcagagtgaagaaggcccacaagagcaagacccactag

SEQ ID NO: 170454 - protein, 460 aa, Artificial Sequence
  derived and/or modified sequence
MSSPTTSSLDTPLPGNGPPQPGAPSSSPTVKEEGPEPWPGGPDPDVPGTDEASSACSTDWVIPDPEEEPERKRKKGPAPKMLGHELCRVCGDKASGFHYNVLSCEGCKGFFRRSVVRGGARRYACRGGGTCQMDAFMRRKCQQCRLRKCKEAGMREQCVLSEEQIRKKKIRKQQQESQSQSQSPVGPQGSSSSASGPGASPGGSEAGSQGSGEGEGVQLTAAQELMIQQLVAAQLQCNKRSFSDQPKVTPWPLGADPQSRDARQQRFAHFTELAIISVQEIVDFAKQVPGFLQLGREDQIALLKASTIEIMLLETARRYNHETECITFLKDFTYSKDDFHRAGLQVEFINPIFEFSRAMRRLGLDDAEYALLIAINIFSADRPNVQEPGRVEALQQPYVEALLSYTRIKRPQDQLRFPRMLMKLVSLRTLSSVHSEQVFALRLQDKKLPPLLSEIWDVHE

SEQ ID NO: 170455 - protein, 458 aa, Artificial Sequence
  derived and/or modified sequence
MSSPTTSSLDTPLPGNGPPQPGAPSSSPTVKEEGPEPWPGGPDPDVPGTDEASSACSTDWVIPDPEEEPERKRKKGPAPKMLGHELCRVCGDKASGFHYNVLSCEGCKGFFRRSVVRGGARRYACRGGGTCQMDAFMRRKCQQCRLRKCKEAGMREQCVLSEEQIRKKKIRKQQQESQSQSQSPVGPQGSSSSASGPGASPGGSEAGSQGSGEGEGVQLTAAQELMIQQLVAAQLQCNKRSFSDQPKVTPWPLGADPQSRDARQQRFAHFTELAIISVQEIVDFAKQVPGFLQLGREDQIALLKASTIEIMLLETARRYNHETECITFLKDFTYSKDDFHRAGLQVEFINPIFEFSRAMRRLGLDDAEYALLIAINIFSADRPNGAGPRGGVAAALRGGAAVLHAHQEAADQLRFPRMLMKLVSLRTLSSVHSEQVFALRLQDKKLPPLLSEIWDVHE

SEQ ID NO: 170456 - DNA, 2087 bp, Artificial Sequence
  derived and/or modified sequence
aagtttcacgctccgcccctcttccggacgtgacgcaagggcggggttgccggaagaagtggcgaagttacttttgagggtatttgagtagcggcggtgtgtcaggggctaaagaggaggacgaagaaaagcagagcaagggaacccagggcaacaggagtagttcactccgcgagaggccgtccacgagacccccgcgcgcagccatgagccccgccccccgctgttgcttggagaggggcgggacctggagagaggctgctccgtgaccccaccatgtcctctcctaccacgagttccctggatacccccctgcctggaaatggcccccctcagcctggcgccccttcttcttcacccactgtaaaggaggagggtccggagccgtggcccgggggtccggaccctgatgtcccaggcactgatgaggccagctcagcctgcagcacagactgggtcatcccagatcccgaagaggaaccagagcgcaagcgaaagaagggcccagccccgaagatgctgggccacgagctttgccgtgtctgtggggacaaggcctccggcttccactacaacgtgctcagctgcgaaggctgcaagggcttcttccggcgcagtgtggtccgtggtggggccaggcgctatgcctgccggggtggcggaacctgccagatggacgctttcatgcggcgcaagtgccagcagtgccggctgcgcaagtgcaaggaggcagggatgagggagcagtgcgtcctttctgaagaacagatccggaagaagaagattcggaaacaacagcagcaggagtcacagtcacagtcgcagtcacctgtggggccgcagggcagcagcagctcagcctctgggcctggggcttcccctggtggatctgaggcaggcagccagggctccggggaaggcgagggtgtccagctaacagcggctcaagaactaatgatccagcagttggtggcggcccaactgcagtgcaacaaacgctccttctccgaccagcccaaagtcacgccctggcccctgggcgcagacccccagtcccgagatgcccgccagcaacgctttgcccacttcacggagctggccatcatctcagtccaggagatcgtggacttcgctaagcaagtgcctggtttcctgcagctgggccgggaggaccagatcgccctcctgaaggcatccactatcgagatcatgctgctagagacagccaggcgctacaaccacgagacagagtgtatcaccttcttgaaggacttcacctacagcaaggacgacttccaccgtgcaggcctgcaggtggagttcatcaaccccatcttcgagttctcgcgggccatgcggcggctgggcctggacgacgctgagtacgccctgctcatcgccatcaacatcttctcggccgaccggcccaacgtgcaggagccgggccgcgtggaggcgttgcagcagccctacgtggaggcgctgctgtcctacacgcgcatcaagaggccgcaggaccagctgcgcttcccgcgcatgctcatgaagctggtgagcctgcgcacgctgagctctgtgcactcggagcaggtcttcgccttgcggctccaggacaagaagctgccgcctctgctgtcggagatctgggacgtccacgagtgaggggctggccacccagccccacagccttgcctgaccaccctccagcagatagacgccggcaccccttcctcttcctagggtggaaggggccctgggccgagcctgtagacctatcggctctcatcccttgggataagccccagtccaggtccaggaggctccctccctgcccagcgagtcttccagaaggggtgaaagggttgcaggtcccgaccactgacccttcccggctgccctccctccccagcttacacctcaagcccagcacgcagtgcaccttgaacagagggaggggaggacccatggctctcccccctagcccgggagaccagggccttcctcttcctctgcttttatttaataaaaactaaaaacagaaacaggaaaataaaatatgaatacaatccaaaaaaaaaaaaaaaaaa

SEQ ID NO: 170457 - DNA, 1383 bp, Artificial Sequence
  derived and/or modified sequence
atgagctcccccactacttccagtctcgataccccactgccaggaaatgggcctccacagcctggagcaccctctagtagccccaccgtcaaggaagaaggcccagagccctggccgggcggccctgatccagacgtccctggtacagacgaagctagcagtgcgtgctctacagattgggtgatccccgatcccgaagaagaacccgagagaaaaaggaagaaaggtcctgccccaaagatgctcggtcacgagctttgccgggtctgcggtgataaagcatctggcttccactataacgtgttgtcctgcgagggctgcaagggcttctttcggaggagcgtagtgaggggcggcgcacgtcgctatgcttgtaggggtggtggcacctgccagatggatgcatttatgagaaggaaatgccagcagtgcagactccggaagtgcaaggaggcaggcatgcgtgaacagtgtgtgctgtctgaagagcagatacggaagaagaagatcagaaagcagcaacaggaatcacagagtcagtcccagagccccgtggggccccagggtagtagttccagcgccagtggcccaggtgcgtcccccggaggcagcgaagccgggagccaaggatctggagagggggagggagtgcagctgaccgcagcacaggagctgatgatccagcaactggtcgcagcccaactgcagtgtaataaaaggagctttagcgatcaacccaaggtgactccttggccactcggagccgacccacagtcaagagatgccaggcaacagcggttcgcgcattttactgaacttgctatcatttctgtccaggaaatcgtcgacttcgctaagcaagtgccgggatttctccagctaggcagagaagaccagattgccctgctgaaggcttccaccatcgaaataatgcttttggaaacggcaagacggtacaaccacgagacagaatgcataacctttctcaaggattttacatactctaaggatgactttcaccgggctgggctgcaggtagagttcatcaaccctattttcgagtttagcagggctatgagacgcttgggtctggacgacgccgagtacgctctgctgattgccattaatatcttctcggccgataggcccaatgtgcaagagcctggaagggttgaagccctccaacagccttacgtggaggctctcctatcatatacccggatcaagagaccacaggatcagctgagattccctaggatgttgatgaaactggttagcttgaggactttgagcagtgtgcatagtgagcaggtcttcgcccttcggttacaggacaagaagctgcccccactgctcagcgaaatttgggacgtgcacgagtag

SEQ ID NO: 170458 - DNA, 1377 bp, Artificial Sequence
  derived and/or modified sequence
atgagctcgccgacaacctctagtctggacacgccgcttcctggaaatggaccaccccagccgggcgccccctctagtagtcctaccgttaaagaagaagggccagagccctggcctggcgggcccgatccagacgtcccgggtaccgacgaggcgtccagcgcctgtagcactgactgggtcatcccggaccccgaagaggaacctgagcggaagcgaaagaagggacctgctccaaagatgctgggacatgagctttgccgagtctgtggggacaaggcttccggattccattacaacgtgctatcttgcgaaggttgcaaagggttcttccgcaggagcgtggtgagagggggcgctcgacgctatgcatgccggggcggaggcacatgccagatggatgccttcatgagaagaaaatgccaacaatgccgtctgcggaaatgcaaggaggccggaatgcgggaacagtgtgtcctctccgaggaacagatccggaagaaaaagatacggaagcaacagcaagagtctcagagtcagagccagtcccccgtcggacctcaggggagttctagtagcgccagtggccccggagcctcacccggcggttctgaggcaggcagccagggatccggggaaggagaaggagtacagctgacagccgcccaggagctcatgatacagcagctggttgccgcccaactccagtgtaacaagaggagcttttcagatcagccaaaagtgaccccttggccactgggagctgaccctcagagccgggatgcccgtcagcagagattcgcccatttcaccgaactcgctatcatttccgtgcaagaaatagtggacttcgccaagcaagtccccggctttctgcagttgggcagagaggaccagattgccctcctgaaggcgagcaccatcgaaatcatgcttctggagaccgcccgtcggtataatcatgagacggagtgcataacctttttgaaggattttacatactcgaaagacgattttcatagagctggcctccaggtcgagtttatcaaccctatttttgaattttctagagctatgagacgcctcggcctcgacgatgccgagtatgcactcttaatcgccattaacattttcagcgcagacagacctaacggcgctggcccccgcgggggtgtggcggctgcactgcgaggcggcgctgctgtgctgcacgcccaccaagaagctgcggatcagcttaggttcccgcgtatgttgatgaaattggtcagccttcgaaccttaagctctgtacactccgaacaggtatttgcgctgcgattacaggacaagaagttaccaccactgttgagcgaaatatgggacgtccatgagtag

SEQ ID NO: 170459 - DNA, 1383 bp, Artificial Sequence
  derived and/or modified sequence
atgagcagccccaccaccagcagcctggacacccccctgcctggaaatggccccccccagcccggggcccccagcagcagccccaccgtgaaggaggagggccctgagccctggccaggcggccctgaccctgatgtgcctggaacagatgaggccagcagcgcctgcagcacagactgggtgatcccagaccctgaggaggagcctgagaggaagaggaagaagggccctgcccccaagatgctgggccacgagctgtgccgggtgtgtggggacaaggccagcggcttccactacaacgtgctgagctgtgagggctgcaagggcttcttccgccgctctgtggtgcggggcggggccaggagatatgcctgccggggcggcggcacctgccagatggatgccttcatgaggaggaagtgccagcagtgccgcctgaggaagtgcaaggaggccggcatgagggagcagtgtgtgctgtctgaggagcagatcaggaagaagaagatcaggaagcagcagcaggagagccagagccagagccagagccctgtgggcccccagggcagcagcagcagcgccagcggccctggggccagccctgggggcagcgaggccggcagccagggcagcggggagggggagggcgtgcagctgacagctgcccaggagctgatgatccagcagctggtggccgcccagctgcagtgcaacaagaggagcttcagtgaccagcccaaggtgaccccctggcccctgggcgctgacccccagagcagagatgcccggcagcagagatttgcccacttcacagagctggccatcatctctgtgcaggagatcgtggactttgccaagcaggtgcccggcttcctgcagctgggccgggaggaccagatcgccctgctgaaggccagcaccatcgagatcatgctgctggagacagcccggcgctacaaccatgaaacagagtgcatcaccttcctgaaggacttcacctacagcaaggatgacttccaccgggccggcctgcaggtggagttcatcaaccccatctttgagttcagccgggccatgaggcggctgggcctggatgatgctgaatatgccctgctgattgccatcaacatcttctctgctgaccggcccaacgtgcaggagcccggccgggtggaggccctgcagcagccctacgtggaggccctgctgagctacacccgcatcaagaggccccaggaccagctgcgcttccccaggatgctgatgaagctggtgtccctgcggaccctgagctctgtgcacagcgagcaggtgtttgccctgcggctgcaggacaagaagctgccccccctgctgtctgagatctgggatgtgcatgaatag

SEQ ID NO: 170460 - DNA, 1377 bp, Artificial Sequence
  derived and/or modified sequence
atgagcagccccaccaccagcagcctggacacccccctgcctggaaatggccccccccagcccggggcccccagcagcagccccaccgtgaaggaggagggccctgagccctggccaggcggccctgaccctgatgtgcctggaacagatgaggccagcagcgcctgcagcacagactgggtgatcccagaccctgaggaggagcctgagaggaagaggaagaagggccctgcccccaagatgctgggccacgagctgtgccgggtgtgtggggacaaggccagcggcttccactacaacgtgctgagctgtgagggctgcaagggcttcttccgccgctctgtggtgcggggcggggccaggagatatgcctgccggggcggcggcacctgccagatggatgccttcatgaggaggaagtgccagcagtgccgcctgaggaagtgcaaggaggccggcatgagggagcagtgtgtgctgtctgaggagcagatcaggaagaagaagatcaggaagcagcagcaggagagccagagccagagccagagccctgtgggcccccagggcagcagcagcagcgccagcggccctggggccagccctgggggcagcgaggccggcagccagggcagcggggagggggagggcgtgcagctgacagctgcccaggagctgatgatccagcagctggtggccgcccagctgcagtgcaacaagaggagcttcagtgaccagcccaaggtgaccccctggcccctgggcgctgacccccagagcagagatgcccggcagcagagatttgcccacttcacagagctggccatcatctctgtgcaggagatcgtggactttgccaagcaggtgcccggcttcctgcagctgggccgggaggaccagatcgccctgctgaaggccagcaccatcgagatcatgctgctggagacagcccggcgctacaaccatgaaacagagtgcatcaccttcctgaaggacttcacctacagcaaggatgacttccaccgggccggcctgcaggtggagttcatcaaccccatctttgagttcagccgggccatgaggcggctgggcctggatgatgctgaatatgccctgctgattgccatcaacatcttctctgctgaccggcccaacggggccggcccccggggcggcgtggccgccgccctgcggggcggcgctgctgtgctgcacgcccaccaggaggccgctgaccagctgcgcttccccaggatgctgatgaagctggtgtccctgcggaccctgagctctgtgcacagcgagcaggtgtttgccctgcggctgcaggacaagaagctgccccccctgctgtctgagatctgggatgtgcatgaatag

SEQ ID NO: 170461 - DNA, 1383 bp, Artificial Sequence
  derived and/or modified sequence
atgagcagccccaccaccagcagcctggacacccccctgcccggcaatggtccacctcaaccaggagcccccagcagttccccgacagtgaaagaagagggtccagaaccctggccaggtgggcccgatcccgatgtgcccggtaccgacgaggctagttcggcctgctccacagactgggtcatccctgaccccgaggaggaacctgaaaggaaaaggaagaaaggacctgctcccaaaatgttgggccacgaactgtgcagggtgtgtggagataaggcaagcggattccactacaatgtgctttcctgcgaaggatgtaaaggatttttccgacggtccgtggtgcgtggcggagcacgaagatatgcatgtcgcggcggtggaacctgccagatggacgcttttatgcgccggaagtgccaacaatgcagattgagaaagtgcaaggaggcaggcatgcgcgagcagtgcgtactgtctgaggaacagatccgcaagaaaaaaattagaaagcagcagcaagagtctcaatcacagtcgcagagtccggtggggccacagggaagcagctcttcagccagcgggcctggggcttcccccgggggtagcgaagcgggatcacaggggtccggggagggagagggggtgcagctaactgctgcacaggagctgatgatccagcagcttgtcgccgcccagctacagtgcaacaagaggagcttctccgatcagccaaaggtgaccccctggccattgggtgcagatccacagagccgcgacgctagacagcagagatttgcccatttcaccgagctggccataatctccgtgcaggagatcgtggacttcgccaagcaagtgcctggtttcttgcaattaggaagggaggaccagatcgctctcctgaaggctagcacaatcgagataatgttgctcgagaccgcacggcggtataatcatgagacggagtgcatcacttttctaaaggactttacatacagcaaagacgacttccaccgggctggactgcaggttgaattcataaatccaattttcgaatttagcagggctatgcggcgcctcggattagacgacgccgagtacgccctgctcatcgccatcaacatctttagtgctgatcgccctaatgtccaggagcccggaagggtagaggctctgcagcagccatacgttgaggccctgctcagttacactaggatcaagcgaccacaagatcaattaaggttcccaaggatgctgatgaaactagtcagtctgcgtaccctttcatccgtccacagcgagcaagtgtttgcgctgcggctgcaagataagaagcttcctccattgctgagcgagatttgggacgtacatgagtag

SEQ ID NO: 170462 - DNA, 1377 bp, Artificial Sequence
  derived and/or modified sequence
atgagcagccccaccaccagcagcctggacacccccctgcccggcaacggccccccacagccaggggcaccctccagctcacccacggtgaaggaggaggggcctgagccatggcccggaggcccagaccccgacgtgccaggaacagacgaggcgtcttctgcttgctctacggattgggtgatcccagatcctgaggaagaacctgaacggaagagaaagaagggtccggctcctaaaatgctgggccatgaactgtgcagggtgtgcggagacaaagcatccggttttcactacaatgtgctgagctgtgaaggttgtaaaggcttcttcaggcgctcggtcgtgcgcggaggtgctcggaggtacgcttgcagaggaggcggaacttgtcaaatggatgcatttatgagacgcaaatgccagcagtgccggctccggaaatgcaaagaggcagggatgcgcgagcagtgtgtgctgtcggaggagcagattcgaaagaaaaaaattcggaagcagcagcaggagtcgcagagccagtctcagagccccgttggacctcaggggtcttccagtagtgcctccggtccaggcgcatcgcccggcggctcggaggcaggctctcagggcagtggcgagggagagggagttcagcttacggctgcccaggagctcatgattcaacaactggtagccgcgcagcttcaatgtaacaagcgatcttttagcgaccagccgaaggtcaccccatggccattgggcgccgaccctcaatctcgggatgctaggcagcagcgctttgcccactttacagagctggcaattatctctgtacaggagattgtggattttgccaaacaggtgccaggcttcttacagcttggtcgagaagatcaaatcgcattgttgaaagcatcgactatcgaaattatgctcctggagaccgctcgtcgctataaccacgaaacagagtgtatcacatttctgaaagattttacttattcgaaagatgattttcacagagccggccttcaggtcgaatttatcaatccaattttcgaattttctcgcgctatgcgacgcctgggactcgacgatgctgaatatgccctgttgatcgccatcaacattttttcagccgatagaccaaatggtgcaggaccacggggtggtgtggctgctgccttgagaggaggcgctgccgttctgcatgctcaccaagaagccgctgatcagctcagatttcccaggatgttaatgaaattggtctctctcagaacactgtcctccgtgcactcagagcaggttttcgccttacgattacaggataagaagttacctcctctgctaagcgagatctgggatgtccatgagtag

SEQ ID NO: 170463 - DNA, 2066 bp, Artificial Sequence
  derived and/or modified sequence
aagtttcacgctccgcccctcttccggacgtgacgcaagggcggggttgccggaagaagtggcgaagttacttttgagggtatttgagtagcggcggtgtgtcaggggctaaagaggaggacgaagaaaagcagagcaagggaacccagggcaacaggagtagttcactccgcgagaggccgtccacgagacccccgcgcgcagccatgagccccgccccccgctgttgcttggagaggggcgggacctggagagaggctgctccgtgaccccaccatgtcctctcctaccacgagttccctggatacccccctgcctggaaatggcccccctcagcctggcgccccttcttcttcacccactgtaaaggaggagggtccggagccgtggcccgggggtccggaccctgatgtcccaggcactgatgaggccagctcagcctgcagcacagactgggtcatcccagatcccgaagaggaaccagagcgcaagcgaaagaagggcccagccccgaagatgctgggccacgagctttgccgtgtctgtggggacaaggcctccggcttccactacaacgtgctcagctgcgaaggctgcaagggcttcttccggcgcagtgtggtccgtggtggggccaggcgctatgcctgccggggtggcggaacctgccagatggacgctttcatgcggcgcaagtgccagcagtgccggctgcgcaagtgcaaggaggcagggatgagggagcagtgcgtcctttctgaagaacagatccggaagaagaagattcggaaacagcagcaggagtcacagtcacagtcgcagtcacctgtggggccgcagggcagcagcagctcagcctctgggcctggggcttcccctggtggatctgaggcaggcagccagggctccggggaaggcgagggtgtccagctaacagcggctcaagaactaatgatccagcagttggtggcggcccaactgcagtgcaacaaacgctccttctccgaccagcccaaagtcacgccctggcccctgggcgcagacccccagtcccgagatgcccgccagcaacgctttgcccacttcacggagctggccatcatctcagtccaggagatcgtggacttcgctaagcaagtgcctggtttcctgcagctgggccgggaggaccagatcgccctcctgaaggcatccactatcgagatcatgctgctagagacagccaggcgctacaaccacgagacagagtgtatcaccttcttgaaggacttcacctacagcaaggacgacttccaccgtgcaggcctgcaggtggagttcatcaaccccatcttcgagttctcgcgggccatgcggcggctgggcctggacgacgctgagtacgccctgctcatcgccatcaacatcttctcggccgaccggcccaacgtgcaggagccgggccgcgtggaggcgttgcagcagccctacgtggaggcgctgctgtcctacacgcgcatcaagaggccgcaggaccagctgcgcttcccgcgcatgctcatgaagctggtgagcctgcgcacgctgagctctgtgcactcggagcaggtcttcgccttgcggctccaggacaagaagctgccgcctctgctgtcggagatctgggacgtccacgagtgaggggctggccacccagccccacagccttgcctgaccaccctccagcagatagacgccggcaccccttcctcttcctagggtggaaggggccctgggccgagcctgtagacctatcggctctcatcccttgggataagccccagtccaggtccaggaggctccctccctgcccagcgagtcttccagaaggggtgaaagggttgcaggtcccgaccactgacccttcccggctgccctccctccccagcttacacctcaagcccagcacgcagtgcaccttgaacagagggaggggaggacccatggctctcccccctagcccgggagaccagggccttcctcttcctctgcttttatttaataaaaactaaaaacagaaacaggaaaataaaatatgaatacaatcc

SEQ ID NO: 170464 - DNA, 1952 bp, Artificial Sequence
  derived and/or modified sequence
ggcgaagttacttttgagggtatttgagtagcggcggtgtgtcaggggctaaagaggaggacgaagaaaagcagagcaagggaacccagggcaacaggagtagttcactccgcgagaggccgtccacgagacccccgcgcgcagccatgagccccgccccccgctgttgcttggagaggggcgggacctggagagaggctgctccgtgaccccaccatgtcctctcctaccacgagttccctggatacccccctgcctggaaatggcccccctcagcctggcgccccttcttcttcacccactgtaaaggaggagggtccggagccgtggcccgggggtccggaccctgatgtcccaggcactgatgaggccagctcagcctgcagcacagactgggtcatcccagatcccgaagaggaaccagagcgcaagcgaaagaagggcccagccccgaagatgctgggccacgagctttgccgtgtctgtggggacaaggcctccggcttccactacaacgtgctcagctgcgaaggctgcaagggcttcttccggcgcagtgtggtccgtggtggggccaggcgctatgcctgccggggtggcggaacctgccagatggacgctttcatgcggcgcaagtgccagcagtgccggctgcgcaagtgcaaggaggcagggatgagggagcagtgcgtcctttctgaagaacagatccggaagaagaagattcggaaacagcagcaggagtcacagtcacagtcgcagtcacctgtggggccgcagggcagcagcagctcagcctctgggcctggggcttcccctggtggatctgaggcaggcagccagggctccggggaaggcgagggtgtccagctaacagcggctcaagaactaatgatccagcagttggtggcggcccaactgcagtgcaacaaacgctccttctccgaccagcccaaagtcacgccctggcccctgggcgcagacccccagtcccgagatgcccgccagcaacgctttgcccacttcacggagctggccatcatctcagtccaggagatcgtggacttcgctaagcaagtgcctggtttcctgcagctgggccgggaggaccagatcgccctcctgaaggcatccactatcgagatcatgctgctagagacagccaggcgctacaaccacgagacagagtgtatcaccttcttgaaggacttcacctacagcaaggacgacttccaccgtgcaggcctgcaggtggagttcatcaaccccatcttcgagttctcgcgggccatgcggcggctgggcctggacgacgctgagtacgccctgctcatcgccatcaacatcttctcggccgaccggcccaacggagccgggccgcgtggaggcgttgcagcagccctacgtggaggcgctgctgtcctacacgcgcatcaagaggccgcagaccagctgcgcttcccgcgcatgctcatgaagctggtgagcctgcgcacgctgagctctgtgcactcggagcaggtcttcgccttgcggctccaggacaagaagctgccgcctctgctgtcggagatctgggacgtccacgagtgaggggctggccacccagccccacagccttgcctgaccaccctccagcagatagacgccggcaccccttcctcttcctagggtggaaggggccctgggccgagcctgtagacctatcggctctcatcccttgggataagccccagtccaggtccaggaggctccctccctgcccagcgagtcttccagaaggggtgaaagggttgcaggtcccgaccactgacccttcccggctgccctccctccccagcttacacctcaagcccagcacgcagtgcaccttgaacagagggaggggaggacccatggctctcccccctagcccgggagaccagggccttcctcttcctctgcttttattt

SEQ ID NO: 170465 - DNA, 1383 bp, Artificial Sequence
  derived and/or modified sequence
atgtcctccccaacaaccagtagcttggacacccctttgccaggtaatggtcctccccagcccggagcccctagtagctctcccaccgtgaaggaggagggcccagagccttggcctggaggacctgatccagatgttcccggaaccgatgaggcgtctagtgcctgcagcacggactgggtgattccagatcctgaagaggagcctgaaagaaaacggaagaagggtccagctcctaagatgcttgggcatgagttatgtagagtttgcggggataaagcatcaggcttccattataatgttcttagctgtgagggctgtaaggggttcttcaggcggagcgtggtgagaggcggtgccaggaggtacgcgtgccgtggcggtgggacctgtcagatggatgcttttatgcgccgtaaatgtcagcaatgccggctgcgaaaatgcaaggaggcagggatgcgggagcagtgtgtgttgtcagaagaacagattcggaagaagaagattagaaaacagcagcaagagtcgcaatcacagtctcagtctccagtgggcccacaggggagtagttcgtctgcatcaggcccaggcgcttcccccggtgggtccgaggcagggtcgcagggctcaggagagggagagggcgtccagctgacagccgctcaggagctgatgattcagcagttagttgcagcacagctccagtgtaacaaacgttcctttagcgatcagccaaaggtaacaccttggcctctgggtgccgatccacaaagcagagacgcgaggcagcagcggtttgcccactttactgagcttgcgattattagcgttcaagaaattgttgactttgcgaaacaggtccctgggtttcttcagctggggagagaggaccagattgccctgttgaaggctagcactattgaaatcatgctcctggagacagccagacgttataatcatgagacagaatgtatcaccttcctaaaggatttcacctacagtaaggacgattttcatcgagccggtctccaggttgaattcatcaaccctatattcgagttttccagggcaatgagaagactagggctggacgacgccgagtacgcattgctgatcgctatcaacattttctcagcagataggcccaatgtgcaggaacccggtcgggttgaagcacttcagcagccgtatgtggaggcattgctgtcatacacaagaattaagagacctcaggatcaactgcggttccctcgcatgctaatgaaattagtgtctctgaggaccctctcttctgtgcactctgagcaggtttttgcccttaggctccaggataaaaaactgccgccactgctgtctgaaatctgggacgtacatgagtag

SEQ ID NO: 170466 - DNA, 1377 bp, Artificial Sequence
  derived and/or modified sequence
atgagctctcctactaccagcagcctggacaccccactgccaggcaacggaccaccacagcccggagcccctagctccagtcccaccgtcaaggaagaggggccagaaccatggccaggagggccagacccagatgtgcccggaactgacgaagccagctctgcctgctctaccgactgggttatccctgatcctgaagaggaacccgaacggaaacgcaaaaaaggcccagccccaaagatgctggggcatgaactgtgccgtgtgtgtggtgataaagcatcaggatttcattacaatgtgctgtcctgtgagggttgtaagggctttttccgtaggtctgtggtgcgtggaggggctcgcaggtatgcatgtaggggtggcggtacatgtcagatggacgctttcatgaggagaaaatgtcagcaatgcaggctccgcaagtgtaaggaagccggaatgcgagaacaatgcgtgctgtccgaagaacagatacggaagaaaaagatcagaaagcagcaacaggaaagccagtcacagtctcagagcccagttggtccacagggatcatcttcttctgcctctggaccaggcgcaagtccgggaggttctgaagccggtagtcagggctcaggcgagggtgaaggcgtccagctaactgctgctcaggagctgatgatccagcagttggtggccgctcaactgcagtgcaataagcgcagcttttctgaccagccaaaagtgaccccctggcctctcggagcagatccacagagcagggacgctagacagcagcggtttgcacacttcacggagcttgccatcatttcagtccaggaaatcgtcgattttgccaaacaggttccagggttcttgcaactgggtcgggaagatcagattgctttactgaaggcaagtaccatcgagataatgctgcttgagacggctaggaggtataatcacgagaccgagtgcatcactttcctcaaggattttacttattcaaaagacgattttcaccgagcagggctccaggtcgagtttattaatcccatatttgaattcagccgcgcaatgcggaggctaggcctggacgatgccgaatacgccctgctcattgccatcaacattttcagcgcagaccgacctaatggggctgggccacgcggaggggtagcggctgcactccgcggtggtgcagcagttcttcacgcccatcaagaagctgctgatcagctgagattccctcgaatgctgatgaaattagtgtcccttcgcacccttagctccgtccactctgaacaggtgttcgctctgaggctacaggacaaaaagctgcctccactactgtcggaaatctgggatgtgcacgaatag

SEQ ID NO: 170467 - DNA, 1383 bp, Artificial Sequence
  derived and/or modified sequence
atgagcagccccaccaccagcagcctggacacccccctgcccggcaacggccccccccagcccggcgcccccagcagcagccccaccgtgaaggaggagggccccgagccctggcccggcggccccgaccccgacgtgcccggcaccgacgaggccagcagcgcctgcagcaccgactgggtgatccccgaccccgaggaggagcccgagagaaagagaaagaagggccccgcccccaagatgctgggccacgagctgtgcagagtgtgcggcgacaaggccagcggcttccactacaacgtgctgagctgcgagggctgcaagggcttcttcagaagaagcgtggtgagaggcggcgccagaagatacgcctgcagaggcggcggcacctgccagatggacgccttcatgagaagaaagtgccagcagtgcagactgagaaagtgcaaggaggccggcatgagagagcagtgcgtgctgagcgaggagcagatcagaaagaagaagatcagaaagcagcagcaggagagccagagccagagccagagccccgtgggcccccagggcagcagcagcagcgccagcggccccggcgccagccccggcggcagcgaggccggcagccagggcagcggcgagggcgagggcgtgcagctgaccgccgcccaggagctgatgatccagcagctggtggccgcccagctgcagtgcaacaagagaagcttcagcgaccagcccaaggtgaccccctggcccctgggcgccgacccccagagcagagacgccagacagcagagattcgcccacttcaccgagctggccatcatcagcgtgcaggagatcgtggacttcgccaagcaggtgcccggcttcctgcagctgggcagagaggaccagatcgccctgctgaaggccagcaccatcgagatcatgctgctggagaccgccagaagatacaaccacgagaccgagtgcatcaccttcctgaaggacttcacctacagcaaggacgacttccacagagccggcctgcaggtggagttcatcaaccccatcttcgagttcagcagagccatgagaagactgggcctggacgacgccgagtacgccctgctgatcgccatcaacatcttcagcgccgacagacccaacgtgcaggagcccggcagagtggaggccctgcagcagccctacgtggaggccctgctgagctacaccagaatcaagagaccccaggaccagctgagattccccagaatgctgatgaagctggtgagcctgagaaccctgagcagcgtgcacagcgagcaggtgttcgccctgagactgcaggacaagaagctgccccccctgctgagcgagatctgggacgtgcacgagtag

SEQ ID NO: 170468 - DNA, 1377 bp, Artificial Sequence
  derived and/or modified sequence
atgagcagccccaccaccagcagcctggacacccccctgcccggcaacggccccccccagcccggcgcccccagcagcagccccaccgtgaaggaggagggccccgagccctggcccggcggccccgaccccgacgtgcccggcaccgacgaggccagcagcgcctgcagcaccgactgggtgatccccgaccccgaggaggagcccgagagaaagagaaagaagggccccgcccccaagatgctgggccacgagctgtgcagagtgtgcggcgacaaggccagcggcttccactacaacgtgctgagctgcgagggctgcaagggcttcttcagaagaagcgtggtgagaggcggcgccagaagatacgcctgcagaggcggcggcacctgccagatggacgccttcatgagaagaaagtgccagcagtgcagactgagaaagtgcaaggaggccggcatgagagagcagtgcgtgctgagcgaggagcagatcagaaagaagaagatcagaaagcagcagcaggagagccagagccagagccagagccccgtgggcccccagggcagcagcagcagcgccagcggccccggcgccagccccggcggcagcgaggccggcagccagggcagcggcgagggcgagggcgtgcagctgaccgccgcccaggagctgatgatccagcagctggtggccgcccagctgcagtgcaacaagagaagcttcagcgaccagcccaaggtgaccccctggcccctgggcgccgacccccagagcagagacgccagacagcagagattcgcccacttcaccgagctggccatcatcagcgtgcaggagatcgtggacttcgccaagcaggtgcccggcttcctgcagctgggcagagaggaccagatcgccctgctgaaggccagcaccatcgagatcatgctgctggagaccgccagaagatacaaccacgagaccgagtgcatcaccttcctgaaggacttcacctacagcaaggacgacttccacagagccggcctgcaggtggagttcatcaaccccatcttcgagttcagcagagccatgagaagactgggcctggacgacgccgagtacgccctgctgatcgccatcaacatcttcagcgccgacagacccaacggcgccggccccagaggcggcgtggccgccgccctgagaggcggcgccgccgtgctgcacgcccaccaggaggccgccgaccagctgagattccccagaatgctgatgaagctggtgagcctgagaaccctgagcagcgtgcacagcgagcaggtgttcgccctgagactgcaggacaagaagctgccccccctgctgagcgagatctgggacgtgcacgagtag

SEQ ID NO: 170469 - DNA, 4641 bp, Artificial Sequence
  derived and/or modified sequence
atgaactgccccgtgctgagcctgggcagcggcttcctgttccaggtgatcgagatgctgatcttcgcctacttcgccagcatcagcctgaccgagagcagaggcctgttccccagactggagaacgtgggcgccttcaagaaggtgagcatcgtgcccacccaggccgtgtgcggcctgcccgacagaagcaccttctgccacagcagcgccgccgccgagagcatccagttctgcacccagagattctgcatccaggactgcccctacagaagcagccaccccacctacaccgccctgttcagcgccggcctgagcagctgcatcacccccgacaagaacgacctgcaccccaacgcccacagcaacagcgccagcttcatcttcggcaaccacaagagctgcttcagcagcccccccagccccaagctgatggccagcttcaccctggccgtgtggctgaagcccgagcagcagggcgtgatgtgcgtgatcgagaagaccgtggacggccagatcgtgttcaagctgaccatcagcgagaaggagaccatgttctactacagaaccgtgaacggcctgcagccccccatcaaggtgatgaccctgggcagaatcctggtgaagaagtggatccacctgagcgtgcaggtgcaccagaccaagatcagcttcttcatcaacggcgtggagaaggaccacacccccttcaacgccagaaccctgagcggcagcatcaccgacttcgccagcggcaccgtgcagatcggccagagcctgaacggcctggagcagttcgtgggcagaatgcaggacttcagactgtaccaggtggccctgaccaacagagagatcctggaggtgttcagcggcgacctgctgagactgcacgcccagagccactgcagatgccccggcagccaccccagagtgcaccccctggcccagagatactgcatccccaacgacgccggcgacaccgccgacaacagagtgagcagactgaaccccgaggcccaccccctgagcttcgtgaacgacaacgacgtgggcaccagctgggtgagcaacgtgttcaccaacatcacccagctgaaccagggcgtgaccatcagcgtggacctggagaacggccagtaccaggtgttctacatcatcatccagttcttcagcccccagcccaccgagatcagaatccagagaaagaaggagaacagcctggactgggaggactggcagtacttcgccagaaactgcggcgccttcggcatgaagaacaacggcgacctggagaagcccgacagcgtgaactgcctgcagctgagcaacttcaccccctacagcagaggcaacgtgaccttcagcatcctgacccccggccccaactacagacccggctacaacaacttctacaacacccccagcctgcaggagttcgtgaaggccacccagatcagattccacttccacggccagtactacaccaccgagaccgccgtgaacctgagacacagatactacgccgtggacgagatcaccatcagcggcagatgccagtgccacggccacgccgacaactgcgacaccaccagccagccctacagatgcctgtgcagccaggagagcttcaccgagggcctgcactgcgacagatgcctgcccctgtacaacgacaagcccttcagacagggcgaccaggtgtacgccttcaactgcaagccctgccagtgcaacagccacagcaagagctgccactacaacatcagcgtggaccccttccccttcgagcacttcagaggcggcggcggcgtgtgcgacgactgcgagcacaacaccaccggcagaaactgcgagctgtgcaaggactacttcttcagacaggtgggcgccgaccccagcgccatcgacgtgtgcaagccctgcgactgcgacaccgtgggcaccagaaacggcagcatcctgtgcgaccagatcggcggccagtgcaactgcaagagacacgtgagcggcagacagtgcaaccagtgccagaacggcttctacaacctgcaggagctggaccccgacggctgcagcccctgcaactgcaacaccagcggcaccgtggacggcgacatcacctgccaccagaacagcggccagtgcaagtgcaaggccaacgtgatcggcctgagatgcgaccactgcaacttcggcttcaagttcctgagaagcttcaacgacgtgggctgcgagccctgccagtgcaacctgcacggcagcgtgaacaagttctgcaacccccacagcggccagtgcgagtgcaagaaggaggccaagggcctgcagtgcgacacctgcagagagaacttctacggcctggacgtgaccaactgcaaggcctgcgactgcgacaccgccggcagcctgcccggcaccgtgtgcaacgccaagaccggccagtgcatctgcaagcccaacgtggagggcagacagtgcaacaagtgcctggagggcaacttctacctgagacagaacaacagcttcctgtgcctgccctgcaactgcgacaagaccggcaccatcaacggcagcctgctgtgcaacaagagcaccggccagtgcccctgcaagctgggcgtgaccggcctgagatgcaaccagtgcgagccccacagatacaacctgaccatcgacaacttccagcactgccagatgtgcgagtgcgacagcctgggcaccctgcccggcaccatctgcgaccccatcagcggccagtgcctgtgcgtgcccaacagacagggcagaagatgcaaccagtgccagcccggcttctacatcagccccggcaacgccaccggctgcctgccctgcagctgccacaccaccggcgccgtgaaccacatctgcaacagcctgaccggccagtgcgtgtgccaggacgccagcatcgccggccagagatgcgaccagtgcaaggaccactacttcggcttcgacccccagaccggcagatgccagccctgcaactgccacctgagcggcgccctgaacgagacctgccacctggtgaccggccagtgcttctgcaagcagttcgtgaccggcagcaagtgcgacgcctgcgtgcccagcgccagccacctggacgtgaacaacctgctgggctgcagcaagacccccttccagcagcccccccccagaggccaggtgcagagcagcagcgccatcaacctgagctggagcccccccgacagccccaacgcccactggctgacctacagcctgctgagagacggcttcgagatctacaccaccgaggaccagtacccctacagcatccagtacttcctggacaccgacctgctgccctacaccaagtacagctactacatcgagaccaccaacgtgcacggcagcaccagaagcgtggccgtgacctacaagaccaagcccggcgtgcccgagggcaacctgaccctgagctacatcatccccatcggcagcgacagcgtgaccctgacctggaccaccctgagcaaccagagcggccccatcgagaagtacatcctgagctgcgcccccctggccggcggccagccctgcgtgagctacgagggccacgagaccagcgccaccatctggaacctggtgcccttcgccaagtacgacttcagcgtgcaggcctgcaccagcggcggctgcctgcacagcctgcccatcaccgtgaccaccgcccaggcccccccccagagactgagcccccccaagatgcagaagatcagcagcaccgagctgcacgtggagtggagcccccccgccgagctgaacggcatcatcatcagatacgagctgtacatgagaagactgagaagcaccaaggagaccaccagcgaggagagcagagtgttccagagcagcggctggctgagcccccacagcttcgtggagagcgccaacgagaacgccctgaagcccccccagaccatgaccaccatcaccggcctggagccctacaccaagtacgagttcagagtgctggccgtgaacatggccggcagcgtgagcagcgcctgggtgagcgagagaaccggcgagagcgcccccgtgttcatgatcccccccagcgtgttccccctgagcagctacagcctgaacatcagctgggagaagcccgccgacaacgtgaccagaggcaaggtggtgggctacgacatcaacatgctgagcgagcagagcccccagcagagcatccccatggccttcagccagctgctgcacaccgccaagagccaggagctgagctacaccgtggagggcctgaagccctacagaatctacgagttcaccatcaccctgtgcaacagcgtgggctgcgtgaccagcgccagcggcgccggccagaccctggccgccgcccccgcccagctgagaccccccctggtgaagggcatcaacagcaccaccatccacctgagatggttcccccccgaggagctgaacggccccagccccatctaccagctggagagaagagagagcagcctgcccgccctgatgaccaccatgatgaagggcatcagattcatcggcaacggctactgcaagttccccagcagcacccaccccgtgaacaccgacttcaccggcaagtgcgtgtag

SEQ ID NO: 170470 - DNA, 4641 bp, Artificial Sequence
  derived and/or modified sequence
atgaactgtccagtgttatcacttggctcaggttttctcttccaggtgattgagatgctgatcttcgcttattttgccagcatcagcttgaccgagtctagaggactattccctcgccttgaaaacgtaggggcctttaaaaaggtttctatcgtccctactcaggcagtctgtgggctgccagaccgctccactttttgtcatagcagcgctgcagccgagagtatacaattctgcactcagcgcttttgcattcaagactgtccctacagaagttctcatcctacatatacagccttgttttcagcaggcctttcatcttgcatcacacccgataagaatgacttacacccgaacgcacattccaattcagcctccttcatctttggaaatcacaaaagctgtttttcctctcctccatcaccgaagttaatggccagcttcacgcttgctgtgtggttaaaaccagagcaacagggagtgatgtgtgtcatcgagaagactgtggacggccaaatagttttcaagctgaccatctcagaaaaggagaccatgttttactatcggacggtcaacggcttgcaaccacccataaaagttatgacattaggaagaatcctggttaagaagtggatacatttgtccgtgcaggtccaccaaacaaagatatctttctttataaacggcgtcgaaaaggaccatactccctttaacgcaaggaccctgtctggcagtatcacagatttcgcctcagggacagtgcaaataggacagtccctcaacggccttgagcaattcgtggggagaatgcaggactttaggctgtaccaggtggcgcttacaaatcgcgagattcttgaagtcttttccggagacttgctgaggctccacgcccagtcacactgccgatgccccgggtcccacccacgggtacaccctttagcccagcggtactgtataccaaatgacgcaggggacactgcagataatcgggtatctcgactcaatccggaggcccatccattaagctttgtaaatgacaatgatgttgggactagttgggtgagtaatgtatttaccaatatcacgcagctgaaccagggcgtgacaatttcggtagatctcgaaaatgggcagtatcaggtgttttatatcatcatccagttcttctctccccagcctactgagatacgaattcagagaaagaaagagaactcactcgactgggaagactggcagtacttcgccaggaactgcggcgcttttggaatgaagaataacggcgacctcgagaaaccagacagcgtcaactgtctgcagctctccaattttaccccttacagccgcggtaacgttacattcagtattctgacaccaggccctaactatcgccctggatacaacaatttctataatacgccttctctccaggagtttgtcaaggccacccagatccggttccattttcatggacagtactacacgacagaaactgcggttaatctgcgacaccgctactacgcagtggacgaaatcacaatcagtggtcgctgtcagtgccatggccacgcagataattgtgacacaaccagccagccttacagatgtctgtgctctcaggaatcctttactgaggggttgcactgtgacaggtgtctgcccctgtacaacgacaagccattccgccagggggatcaggtgtacgcctttaactgcaaaccttgtcagtgtaattcacatagcaagtcatgccattataatatcagcgtggatccttttccttttgaacatttcaggggggggggaggggtctgcgacgactgtgaacataatacaaccggtcgtaattgcgagctgtgcaaggactatttcttccgccaggtgggcgccgaccctagcgctattgatgtctgtaaaccttgcgactgcgacaccgtagggactcgcaacggatccatactgtgtgatcagattgggggtcagtgcaattgtaagcggcacgtgtcgggccgacagtgcaatcagtgtcagaatggattttacaatttacaggagctggacccggacggctgctcaccttgtaactgcaacacttccggcactgtggacggcgacatcacatgtcatcagaactcagggcagtgcaaatgcaaggctaacgttatcggcctgagatgcgaccattgcaacttcgggtttaaattcctccggagcttcaacgacgtcggttgcgagccttgtcagtgtaacctccatggttcagtcaacaagttctgcaacccccactccggccaatgcgaatgtaagaaagaggccaagggactgcaatgcgacacatgtagagagaacttctacggccttgatgtgactaattgcaaggcgtgcgattgtgacaccgccggctctcttccaggaacggtatgtaacgctaagaccgggcagtgtatatgcaagcccaatgtggagggccgccagtgtaacaaatgcttggaaggcaacttctacctgagacagaacaattctttcctgtgcttaccctgtaattgcgataagacagggacaatcaacggttctcttctgtgcaacaagagcaccggacagtgtccatgcaagctcggagttactggcctgcgatgtaaccagtgcgagccccacagatataatttgacaatcgacaactttcagcactgtcagatgtgtgaatgtgactcccttggaacccttcctgggactatctgtgaccccataagcgggcagtgcctatgtgttcccaatcggcagggtcgccggtgcaatcagtgtcagccaggattctatataagccccggaaatgctacagggtgtctgccctgtagctgccacacgaccggcgcggttaaccatatttgcaattcacttaccggacagtgcgtgtgccaggacgccagcatcgcgggccagcggtgtgaccaatgtaaggatcactacttcggatttgacccccagacgggtagatgtcaaccatgtaactgtcatttgtccggcgctttgaatgaaacatgtcacctcgttaccggccagtgcttctgcaaacagtttgtcaccgggtccaagtgcgacgcctgcgttccttcagcctctcatcttgacgtaaataacttgcttggttgttctaaaacacccttccagcagccaccaccgagaggtcaggttcaatcttcaagcgcgattaatctgtcctggtcgccaccggatagcccgaatgctcattggctcacctattcacttctccgagatggctttgagatctacacgactgaagaccagtacccctacagcatacagtatttcctggacactgaccttctaccatataccaaatactcttactacatcgaaacaaccaacgtgcacggatctactagatccgtcgccgtgacgtacaaaaccaaaccgggcgtgccggagggtaatctgacattgtcatatataattccaattggctcagattcagtcaccctcacgtggacaacactgagcaatcagtccggtcccatcgaaaaatacattcttagctgcgcaccactggccggggggcagccatgtgtctcctatgaagggcatgaaacaagcgcgacgatctggaacttggtcccctttgctaagtacgacttcagcgtccaagcttgtacctccggtggatgccttcatagcttgcctatcacagtgacaaccgcacaagctccacctcagaggctctctccccctaagatgcaaaagatcagttcaaccgagctgcatgtagagtggtctccaccagccgagctgaatggaattattattcggtatgagctctatatgcggaggttgagaagcacgaaagagaccaccagtgaagagtcacgcgtgtttcaatcttccgggtggctgagcccgcactccttcgtcgaatcagctaatgaaaatgcactgaagccaccccaaactatgaccaccatcaccgggctcgagccctataccaagtatgagtttcgagtgctagcggtcaatatggcagggtccgtaagtagcgcctgggtcagcgagaggacaggagaaagcgctcctgtcttcatgataccaccctctgtgtttcctctgtcttcttactcattgaatattagttgggaaaaaccagcggataacgttacccggggaaaggtcgtcggttatgacattaatatgctctccgaacagtcgccccagcagtctatcccaatggccttttcacagttgcttcacactgctaagtcacaagaactttcttacactgtggaagggctgaagccttaccggatctacgagttcacgattaccctatgtaacagtgttggctgtgtgacaagtgcctcaggcgccggccagaccctcgctgctgcccccgctcaattgagaccccctttggtcaaaggcatcaactctacaaccattcatctacgctggtttcctccagaggagctgaatggcccctctcctatttaccaactagagcggcgcgaatcctcgctgcctgccctgatgaccactatgatgaagggtatccggttcatcgggaatggctattgcaagtttccaagttctacccacccagttaatacggattttactggaaagtgtgtctag

SEQ ID NO: 170471 - DNA, 4641 bp, Artificial Sequence
  derived and/or modified sequence
atgaactgccctgtgctgagcctgggcagcggcttcctgttccaggtgattgagatgctgatctttgcctactttgccagcatcagcctgacagagagccggggcctcttcccccggctggagaatgtgggcgccttcaagaaggtgtccatcgtgcccacccaggccgtgtgtggcctgcctgacaggagcaccttctgccacagcagcgctgctgctgagagcatccagttctgcacccagcgcttctgcatccaggactgcccctaccgcagcagccaccccacctacacagccctcttctctgctggcctgagcagctgcatcaccccagacaagaatgacctgcaccccaatgcccacagcaacagcgccagcttcatctttggaaaccacaagagctgcttcagcagcccccccagccccaagctgatggccagcttcaccctggccgtgtggctgaagccagagcagcagggcgtgatgtgtgtgattgagaagacagtggatggccagatcgtgttcaagctgaccatcagcgagaaggagaccatgttctactacagaacagtgaatggcctgcagccccccatcaaggtgatgaccctgggccgcatcctggtgaagaagtggatccacctgtctgtgcaggtgcaccagaccaagatctccttcttcatcaacggggtggagaaggaccacacccccttcaatgcccggaccctgagcggcagcatcacagactttgccagcggcaccgtgcagatcggccagagcctgaatggcctggagcagtttgtgggccgcatgcaggacttccggctgtaccaggtggccctgaccaaccgggagatcctggaggtgttcagcggggacctgctgcggctgcacgcccagagccactgccgctgccccggcagccacccccgggtgcaccccctggcccagcgctactgcatccccaatgatgctggggacacagctgacaacagagtgtcccggctgaaccctgaggcccaccccctgagctttgtgaatgacaatgatgtgggcacctcctgggtgtccaatgtgttcaccaacatcacccagctgaaccagggcgtgaccatctctgtggacctggagaatggccagtaccaggtgttctacatcatcatccagttcttcagcccccagcccacagagatccgcatccagaggaagaaggagaacagcctggactgggaggactggcagtactttgccaggaactgtggggccttcggcatgaagaacaatggagacctggagaagccagattctgtgaactgcctgcagctgagcaacttcaccccctacagcagaggaaatgtgaccttcagcatcctgaccccaggccccaactacagacctggctacaacaacttctacaacacccccagcctgcaggagtttgtgaaggccacccagatccgcttccacttccacggccagtactacaccacagaaacagctgtgaacctgcggcaccgctactatgctgtggatgagatcaccatcagcggccgctgccagtgccacggccacgccgacaactgtgacaccaccagccagccctaccgctgcctgtgcagccaggagagcttcacagagggcctgcactgtgaccgctgcctgcccctgtacaatgacaagcccttccggcagggcgaccaggtgtatgccttcaactgcaagccctgccagtgcaacagccacagcaagagctgccactacaacatctctgtggaccccttcccctttgagcacttccggggcggcggcggcgtgtgtgatgactgtgagcacaacaccactggaagaaactgtgagctgtgcaaggactacttcttccggcaggtgggcgctgaccccagcgccattgatgtgtgcaagccctgtgactgtgacacagtgggcaccagaaatggcagcatcctgtgtgaccagatcggcggccagtgcaactgcaagagacatgtgtctggccggcagtgcaaccagtgccagaatggcttctacaacctgcaggagctggaccctgatggctgcagcccctgcaactgcaacaccagcggcaccgtggatggagacatcacctgccaccagaacagcggccagtgcaagtgcaaggccaacgtcatcggcctgcgctgtgaccactgcaactttggcttcaagttcctgcggagcttcaatgatgtgggctgtgagccctgccagtgcaacctgcacggctctgtgaacaagttctgcaacccccacagcggccagtgtgagtgcaagaaggaggccaagggcctgcagtgtgacacctgccgggagaacttctacggcctggatgtgaccaactgcaaggcctgtgactgtgacacagctggcagcctgcccggcaccgtgtgcaatgccaagacaggccagtgcatctgcaagcccaacgtggagggccggcagtgcaacaagtgcctggagggcaacttctacctgcggcagaacaacagcttcctgtgcctgccctgcaactgtgacaagacaggcaccatcaatggcagcctgctgtgcaacaagagcacaggccagtgcccctgcaagctgggcgtgacaggcctgcgctgcaaccagtgtgagccccaccgctacaacctgaccatcgacaacttccagcactgccagatgtgtgaatgtgacagcctgggcaccctgcccggcaccatctgtgaccccatcagcggccagtgcctgtgtgtgcccaaccggcagggccgccgctgcaaccagtgccagcccggcttctacatcagccctggaaatgccaccggctgcctgccctgcagctgccacaccaccggggctgtgaaccacatctgcaacagcctgaccggccagtgtgtgtgccaggatgccagcattgctggccagagatgtgaccagtgcaaggaccactacttcggctttgacccccagacaggccgctgccagccctgcaactgccacctgagcggggccctgaatgagacctgccacctggtgacaggccagtgcttctgcaagcagtttgtgacaggcagcaaatgtgatgcctgtgtgcccagcgccagccacctggatgtgaacaacctgctgggctgcagcaagacccccttccagcagcccccaccccggggccaggtgcagagcagcagcgccatcaacctgtcctggagccccccagacagccccaatgcccactggctgacctacagcctgctgagagatggctttgagatctacaccacagaggaccagtacccctacagcatccagtacttcctggacacagacctgctgccctacaccaagtacagctactacatcgagaccaccaacgtgcacggcagcaccaggtctgtggccgtgacctacaagaccaagccaggagtgcctgagggcaacctgaccctgagctacatcatccccatcggcagtgacagcgtgaccctgacctggaccaccctgagcaaccagagcggccccatcgagaagtacatcctgagctgtgcccccctggccggcggccagccctgtgtgtcctatgagggccacgagaccagcgccaccatctggaacctggtgccctttgccaagtatgacttctctgtgcaggcctgcaccagcggcggctgcctgcacagcctgcccatcaccgtgaccacagcccaggccccaccccagaggctgagcccccccaagatgcagaagatcagcagcacagagctgcacgtggagtggagccccccagctgagctgaatggcatcatcatccgctatgagctgtacatgaggcggctgcggagcaccaaggagaccaccagcgaggagagcagggtcttccagagcagcggctggctgagcccccacagctttgtggagagcgccaatgaaaatgccctgaagccaccccagaccatgaccaccatcaccggcctggagccctacaccaagtatgagttccgggtgctggccgtgaacatggccggctctgtgagcagcgcctgggtgtctgagaggactggagagagcgcccctgtgttcatgatccccccatctgtgttccccctgagcagctacagcctgaacatctcctgggagaagccagctgacaacgtgacccggggcaaggtggtgggctatgacatcaacatgctgtctgagcagagcccccagcagagcatccccatggccttcagccagctgctgcacacagccaagagccaggagctgagctacacagtggagggcctgaagccctaccgcatctatgagttcaccatcaccctgtgcaacagcgtgggctgtgtgaccagcgccagcggggccggccagaccctggccgccgccccagcccagctgcggccccccctggtgaagggcatcaacagcaccaccatccacctgcgctggttccccccagaggagctgaatggccccagccccatctaccagctggagcggcgggagagcagcctgcctgccctgatgaccaccatgatgaagggcatccgcttcatcggaaatggctactgcaagttccccagcagcacccaccctgtgaacacagacttcaccggaaaatgtgtgtag

SEQ ID NO: 170472 - DNA, 4641 bp, Artificial Sequence
  derived and/or modified sequence
atgaactgccccgtgctgagcctgggcagcggcttcctgttccaggtgatagaaatgttaatattcgcctatttcgcttctattagccttacagaaagtaggggtttgttccccaggctggagaacgtcggagcctttaagaaagttagcattgtgccaacacaggctgtttgcgggctccctgataggtcgaccttttgccacagcagcgctgccgcagaatccattcaattctgtacccaacggttctgtatccaagattgtccgtaccgaagttctcatccgacatacacagctctgtttagcgcaggacttagctcatgcatcactcccgataaaaatgatctgcaccctaatgcccattcaaactctgcaagttttatctttggcaatcacaagagctgcttctctagcccacctagcccaaaactcatggcatctttcacactcgctgtgtggctgaagcctgagcagcagggtgtgatgtgcgtcatcgagaaaacagtggacggacagatcgtgtttaaactcactatctctgaaaaggagacaatgttctactatcgcaccgtcaacgggctacaaccccctatcaaggtaatgactctggggagaatcctggttaagaagtggatccaccttagcgtgcaggtgcatcagaccaaaatctcattcttcattaatggagttgaaaaggaccacactcctttcaatgcgcggaccttatcagggagcataactgatttcgcgtccggaacggtgcagatcgggcagagcctcaacggactggaacagttcgtagggcgtatgcaagatttccggctgtaccaggtcgcattgaccaaccgggagatcctagaggtctttagcggcgacttactccgacttcacgcccagtcccattgcaggtgcccaggctcacacccccgggtgcatccattggctcagcgctactgcattcctaatgacgcaggggacaccgctgataatagggtgagtcggttgaatcctgaggcccacccgctctcctttgtgaatgataatgacgtgggtaccagttgggtatccaacgtgtttacaaacattacacaattgaaccaaggcgttacaattagcgtggatttagagaacggccaataccaggttttctatatcataattcagttcttcagtcctcaaccgacagaaattaggatccaaagaaaaaaggagaattccctggactgggaagattggcagtattttgccagaaattgtggagcattcggaatgaaaaataatggcgacctggaaaagccagattcagtcaattgtttacagcttagcaatttcacaccctactcccgaggcaatgtgactttctctattctgacgcccggccccaattacaggcccggctacaataacttctataataccccctccctccaagaatttgtaaaagccactcagattcgcttccatttccacggtcagtattatactacagagacagcggtcaatcttagacaccgctactacgcggtcgatgagatcactataagcggaagatgtcagtgtcatgggcatgctgacaattgtgacacaacatcacagccttatagatgtctatgcagccaagagagttttaccgagggactgcactgcgaccgatgcctgccgctctacaacgataaaccatttcggcagggcgatcaggtctacgcatttaattgtaaaccatgtcagtgcaattcccacagtaaatcgtgtcactataatattagtgtcgacccatttcccttcgaacatttcagaggtggtggcggggtgtgcgacgattgtgagcacaacacaacaggcagaaactgtgagctgtgcaaagactatttttttcggcaggttggcgccgacccatcagccattgacgtatgcaaaccatgcgattgtgatactgtgggcaccagaaatggatctattttgtgtgaccagatcgggggccaatgtaactgcaaacggcatgtaagcgggagacagtgcaatcagtgtcagaacggtttctacaatctccaagaactggaccctgatggttgcagtccatgtaactgcaatacctctgggactgttgatggtgacattacatgtcaccaaaattccggacagtgtaaatgcaaagcaaatgtcattggcctgagatgtgaccactgcaatttcggatttaaatttctccgctcattcaacgatgtgggctgtgagccctgtcagtgtaaccttcacggatccgtgaacaaattctgcaacccgcacagcgggcaatgtgagtgtaagaaagaagccaaaggacttcagtgcgatacgtgcagggagaatttttacggattagacgttacgaattgcaaagcctgcgattgtgacacagctggttccctccccggaacagtgtgcaatgcaaaaacgggccagtgcatttgcaagccgaatgtggagggcagacagtgcaataagtgcctcgagggaaacttttacctgaggcagaacaatagttttctatgtttaccttgtaactgtgacaaaactggaaccatcaacggctcgctgctctgtaacaagagcactggtcaatgcccctgcaagctgggagtaaccggactgcgctgcaaccaatgcgaaccacatcggtataacctgaccatagacaactttcagcattgccagatgtgcgaatgtgactccctgggtaccctgcccgggacgatttgcgatcctatcagtgggcagtgcctctgcgtgcctaaccgtcagggtagacgttgcaaccaatgtcaacccggcttctatatcagtcctggcaatgccaccggatgcctgccttgctcctgtcacaccactggcgccgtgaaccatatctgcaacagcctgaccggacagtgtgtctgccaggatgcctctattgcaggccaaaggtgcgaccaatgcaaagaccactatttcgggtttgaccctcagaccggccgttgtcaaccgtgcaactgtcacctatccggtgctttgaatgaaacctgccatctcgttactggacagtgcttctgcaaacagttcgtgacggggtctaagtgcgacgcctgcgtcccaagtgcctctcaccttgacgtcaacaaccttctcggttgttcaaagaccccttttcagcagccaccccccagagggcaggtacagtcgtccagcgctattaacctgtcctggagtcctcccgattcacctaatgcccattggctcacatacagtctgttgcgcgacggtttcgaaatctataccacggaggatcaatatccttattcaatccaatacttcctggacactgatttgcttccttataccaaatatagctactacattgagacaactaatgtgcacgggtctactaggtcagtggcagtcacgtataaaaccaaaccaggtgtgccagaaggaaacttaactctctcctatatcattcctatcggaagtgacagcgtgacacttacctggaccacactcagtaaccagtctgggcccatcgaaaagtacatactctcctgcgctccacttgccggaggacagccttgtgtgagctatgagggacacgagacatctgccacaatttggaatcttgtgccttttgcaaaatatgatttcagcgtgcaggcctgcacttcgggtggttgcctccacagcctgcctatcacagtgacgacagcgcaggcacccccacagaggctgtccccacccaaaatgcaaaagattagcagtacagagctccacgtggagtggtcaccacctgctgagctgaatggtattattatcaggtatgagctttacatgcgaaggcttagatccacaaaggagacgacatccgaggagtctcgtgtctttcagagctccggctggctcagtccacatagctttgtcgagtctgccaatgaaaacgcactgaagccgccacaaacaatgactaccattactggtctagagccttacactaaatacgaattcagggtgctggcagtgaacatggccggaagcgtgagcagcgcttgggtctctgagagaactggagagagcgctccggtgtttatgataccaccctccgtttttccactctcgtcctattccctgaatatatcctgggagaagccagccgataatgttacaaggggaaaggtagtcggttacgacattaacatgctctccgaacagtctcctcagcagagtatccccatggctttctctcaactcctccatactgcaaaatcccaagagctaagctatactgtggagggcttaaagccctatcgtatttatgagtttactatcacgttgtgcaacagcgtgggttgcgttacgtctgcatctggggcggggcaaacgctagcagccgcgcccgcgcagctgcggccccctctcgtaaagggtattaattctactaccatacacctgcggtggtttccccccgaggagctcaatgggccttcaccaatttaccagctggaaagaagggaaagctctctgccagcgttgatgaccacgatgatgaagggcattagatttataggcaacggctattgtaaatttccatcaagtacacaccccgttaataccgacttcaccggcaagtgtgtctag

SEQ ID NO: 170473 - DNA, 4641 bp, Artificial Sequence
  derived and/or modified sequence
atgaattgtcctgtgttgtctctcggcagcgggtttcttttccaggtgatagagatgctgattttcgcctattttgccagtatctctctgaccgaatcccggggactttttccacgcttagaaaacgtgggtgctttcaaaaaagtaagcattgtccctacgcaggccgtctgtgggctgcccgatcgaagtacattctgtcattccagcgctgccgcagaaagcatccagttctgtacacagcgtttctgtatccaagattgtccatatagatctagtcatcccacgtatactgctctcttcagcgctggactatccagttgcattacacctgataagaatgacctccaccccaatgctcattcaaacagtgcttcgtttatctttggaaatcacaagtcatgcttctctagccccccaagccctaagctcatggccagctttacactggccgtgtggctcaagccagagcagcagggagttatgtgcgtcatcgaaaaaacagttgatggacagatcgtgtttaaattgaccatatctgaaaaggagacaatgttttactaccgtactgtgaacggactgcagcccccaattaaagtgatgacattgggtaggatcttggtgaaaaaatggatccacctcagtgttcaagtccaccagaccaaaatctcattcttcatcaatggcgtggagaaagaccacacacccttcaatgctcgtaccctctccggaagtatcaccgactttgcttctggcaccgtacagataggccagtcgttaaacggtttggagcagtttgtggggcgaatgcaggattttcggctataccaagttgcgttaacaaatcgggagatcctggaagtcttctcaggggacttactccggctgcatgcacagtcgcattgcaggtgtccgggaagccatcccagagtgcatccacttgctcaacgctattgtatccccaacgacgcgggtgacaccgctgacaatagggtaagcaggctgaaccccgaggcccacccactctctttcgtgaacgacaatgacgtggggaccagctgggtgagcaacgtcttcaccaacatcactcaactgaatcagggagtcacaatctctgtggatctcgaaaatggtcaatatcaggtgttctacattattattcagttcttttctccacaaccaactgagatccgcattcagcgtaagaaagaaaattcactggattgggaagactggcagtatttcgctagaaattgcggagccttcggcatgaagaataacggcgacttggaaaagcctgatagtgttaactgtctccagctgtccaatttcacaccttactctcgtgggaacgtcacattttcaatcctgactcctgggcctaattataggcccggttacaataatttttataacactcccagtctacaagagttcgttaaagccacgcagatccgcttccattttcacggtcagtattacacgacggagacagcagttaatttgagacatagatattatgccgtggatgagatcacaatcagcggacggtgccaatgtcatggccacgctgataactgcgacactacttcccaaccgtatagatgtctttgttcgcaggagagcttcactgaaggcctgcactgcgaccggtgcctgcctctatataatgataagccctttcgccaaggtgaccaggtgtatgcttttaactgtaagccctgccagtgtaattctcattctaagagctgtcactacaatatctccgtcgatccatttccgtttgagcactttagaggcggtgggggagtttgtgatgactgcgaacacaatacaacaggccgaaattgcgaactgtgcaaggactatttctttaggcaggttggtgcagaccctagtgctattgacgtgtgtaaaccttgtgattgcgatacggtggggacaaggaatggaagcatcctttgtgatcagatcgggggacaatgcaattgcaaaaggcatgtgtccggccgacagtgtaaccagtgtcagaacgggttttataatctgcaagaattagacccggatggatgcagtccttgtaactgcaacacttcagggactgttgatggcgacataacttgccaccaaaattccggacagtgcaagtgtaaggccaatgtgattgggttgagatgcgatcactgcaactttggattcaaattcttgcggtcattcaatgacgtgggatgtgagccttgtcagtgtaacctccatgggagtgttaataagttctgtaatccccatagtggccagtgcgagtgcaagaaggaagcaaaaggactgcagtgcgacacctgtcgagaaaacttttatggattggatgtaactaattgtaaagcttgtgactgcgacactgcaggaagcttgcctgggacagtctgtaacgcaaaaactgggcagtgtatctgcaaaccaaacgttgaaggtcggcagtgcaacaagtgcctcgagggcaatttctacctgcgacagaacaattcttttctgtgcctgccatgtaattgtgataaaactggtaccatcaacggcagcctgttgtgcaacaagtctacaggccagtgcccttgtaagctcggggttacaggactgcgctgcaatcagtgtgaaccacatagatacaacctcacgattgataattttcagcattgtcagatgtgtgaatgtgacagcctgggaacactcccgggaacaatttgcgaccctattagcgggcaatgtctctgtgtgcccaatcgtcaaggtcgacgctgtaaccagtgccagcccggtttctatatcagccccggaaatgctaccgggtgtctcccctgctcttgccacacaactggcgctgtgaatcacatttgtaattctctcacaggtcagtgtgtctgccaagatgccagcattgctggccagcgttgtgaccaatgtaaggaccactacttcggatttgatccacaaactgggagatgccagccctgtaactgccacctcagtggggcattaaacgaaacatgtcacctcgtgacaggtcagtgcttctgtaaacagtttgtgaccggatctaagtgcgacgcatgtgtgccaagcgcttctcatctcgatgtgaacaatcttctgggttgttccaagacgccctttcagcagccaccacctcggggacaggtccagtcaagtagtgcaatcaatctgtcatggagccctccagacagccctaacgcccactggttaacctatagtttgctccgtgacgggttcgaaatatatacaacagaggatcagtacccctatagcatccagtactttcttgacacagacctgttgccttacacaaaatactcctattatatcgagaccacaaatgtacacggctccaccaggtcagtggctgtcacctataagacgaagcccggagtcccggaaggcaacttaaccctttcttatatcattcccatcggctccgatagcgtgaccctgacttggacgaccctcagtaaccagtccggccctatcgagaaatatatcctttcatgcgctcctctagccggaggacaaccctgcgtgtcctacgaggggcacgagactagcgccaccatctggaacctggtgcccttcgcaaagtacgacttctctgttcaggcctgcaccagcggaggatgcctgcactccctgccaatcactgtgaccaccgcacaggctcccccacagcggttgtcacccccaaagatgcaaaagatctcttctaccgaacttcacgtcgagtggtcgcctccggctgaattgaatgggatcattataaggtatgaactttatatgcgacgtctgcgtagcacaaaagagaccacatctgaagaatcacgtgtgttccaaagctccgggtggctgagccctcatagcttcgtggagtcagcaaacgagaatgcccttaagcctcctcaaaccatgaccacaattacggggctcgagccctatacaaagtacgaattccgcgtgctggctgtgaacatggccggtagcgtctcctcagcctgggtctctgaacggacaggcgaaagcgctccagtgttcatgattccaccctctgtctttcccctttcttcttattcattgaatatttcgtgggagaagcccgcagataatgtgacgagaggcaaagtggtcgggtatgacattaatatgctatccgagcagagtcctcagcagtccattcccatggcattctcccaactgttacacacagccaaatctcaggaattgtcatatacagtcgaggggctcaagccttacaggatatatgagtttaccatcacactctgcaatagtgttggctgtgtgacttctgccagtggagccggacagacgctggccgctgcaccggctcaattaaggcctccccttgtgaaaggcatcaactccaccaccatccacctgcggtggttccctcctgaagagctgaatggcccatcccccatctaccagttggagcggcgagagtcaagtctgcccgcactgatgactaccatgatgaaagggatacgattcatagggaacggctactgtaagtttcccagttctacccatccagtgaacaccgatttcaccggtaagtgcgtatag

SEQ ID NO: 170474 - DNA, 6320 bp, Artificial Sequence
  derived and/or modified sequence
tgtttgctctgcagaatactttacctgggcacccaagtcttccttccagcattcctgctgctacagcctatttgctgagtaaccaggggttacagcagcgttgccaggcaacgagggacagcggtcctgttgaagagccatttgtcacactgaggggactggttgaaatgcaataaagaaatgataccagcagctactcatgtcttcgccattgctaagaacgtcgttggtattaccttactctgagaacgtgtctgcagtttccagaaaatggagtatcgcaacatcacttaaagtaccctgcttcaaagtattgctggcaagtggcgtgggcctgattatttatttagaaatgctttatcaggaggagaatgcttttttgtaaacatgaattgcccagttctttcattgggctctggcttcttgtttcaggtcattgaaatgttgatctttgcctattttgcttcaatatccttgactgagtcacgaggtcttttcccaaggctggagaacgtgggagctttcaagaaagtttccatcgtgccaacccaagcagtatgtggactcccagaccgaagcactttttgtcacagctctgctgctgctgaaagtattcagttctgtacccagcggttttgtattcaggattgcccatacagatcttcacaccctacctacactgcccttttctcagcaggcctcagtagctgcatcacaccagacaagaatgatctgcatcctaacgcccatagcaattctgcaagttttatttttggaaatcacaagagctgcttttcttctcctccttctccaaagctgatggcatcatttaccttagctgtatggctgaaacctgagcaacaaggtgtaatgtgtgttatagaaaagacagtagatgggcagattgtgttcaaacttacaatatctgagaaagagaccatgttttattatcgcacagtaaatggtttgcaacctccaataaaagtaatgacactggggagaattcttgtgaagaaatggattcatcttagtgtgcaggtgcatcagacaaaaatcagcttctttatcaatggcgtggagaaggatcatacacctttcaatgcaagaactctaagtggttcaattacagattttgcatctggtactgtgcaaataggacagagtttaaatggtttagagcagtttgtcggaagaatgcaagattttcgattataccaagtggcacttacaaacagagagattctggaagtcttctctggagatcttctcagattgcatgcccaatcacattgccgttgccctggcagccacccgcgggtccaccctttggcacagcggtactgcattcctaatgatgcaggagacacagctgataatagagtgtcacggttgaatcctgaagcccatcctctctcttttgtcaatgataatgatgttggtacttcatgggtttcaaatgtgtttacaaacattacacagcttaatcaaggagtgactatttcagttgatttggaaaatggacagtatcaggtgttttatattatcattcagttctttagtccacaaccaacggaaataaggattcaaaggaagaaggaaaatagtttagattgggaggactggcaatattttgccaggaattgtggtgcttttggaatgaaaaacaatggagatttggaaaaacctgattctgtcaactgtcttcagctttccaattttactccatattcccgtggcaatgtcacatttagcatcctgacacctggaccaaattatcgtcctggatacaataacttctataataccccatctcttcaagagttcgtaaaagccacgcaaataaggtttcattttcatgggcagtactatacaactgagactgctgttaacctcagacacagatattatgcagtggacgaaatcaccattagtgggagatgtcagtgccatggtcatgccgataactgcgacacaacaagccagccatatagatgcctctgctcccaggagagcttcactgaaggacttcattgtgatcgctgcttgcctctttataatgacaagcctttccgccaaggtgatcaagtttacgctttcaattgtaaaccttgtcaatgcaacagccattccaaaagctgccattacaacatctctgtagacccatttccttttgagcacttcagagggggaggaggagtttgtgatgattgtgagcataacactacaggaaggaactgtgagctgtgcaaggattactttttccgacaagttggtgcagatccttcggccatagatgtttgcaaaccctgtgactgtgatacagttggcactagaaatggtagcattctttgtgatcagattggaggacagtgtaattgtaagagacacgtgtctggcaggcagtgcaatcagtgccagaatggattctacaatctacaagagttggatcctgatggctgcagtccctgtaactgcaatacctctgggacagtggatggagatattacctgtcaccaaaattcaggccagtgcaagtgcaaagcaaacgttattgggcttaggtgtgatcattgcaattttggatttaaatttctccgaagctttaatgatgttggatgtgagccctgccagtgtaacctccatggctcagtgaacaaattctgcaatcctcactctgggcagtgtgagtgcaaaaaagaagccaaaggacttcagtgtgacacctgcagagaaaacttttatgggttagatgtcaccaattgtaaggcctgtgactgtgacacagctggatccctccctgggactgtctgtaatgctaagacagggcagtgcatctgcaagcccaatgttgaagggagacagtgcaataaatgtttggagggaaacttctacctacggcaaaataattctttcctctgtctgccttgcaactgtgataagactgggacaataaatggctctctgctgtgtaacaaatcaacaggacaatgtccttgcaaattaggggtaacaggtcttcgctgtaatcagtgtgagcctcacaggtacaatttgaccattgacaattttcaacactgccagatgtgtgagtgtgattccttggggacattacctgggaccatttgtgacccaatcagtggccagtgcctgtgtgtgcctaatcgtcaaggaagaaggtgtaatcagtgtcaaccaggtttttatatttctccaggcaatgccactggctgcctgccatgctcatgccatacaactggtgcagttaatcacatctgtaatagcctgactggtcagtgtgtttgccaagatgcttccattgctgggcaacgttgtgaccaatgcaaagaccattactttggatttgatcctcagactggaagatgtcagccttgtaattgtcatctctcaggagccttgaatgaaacctgtcacttggtcacaggccagtgtttctgtaaacaatttgtcactggctcaaagtgtgatgcttgtgttcccagtgcaagccacttggatgtcaacaatctattgggttgcagcaaaactccattccagcaacctccgcccagaggacaagttcaaagttcttctgctatcaatctctcctggagtccacctgattctccaaatgcccactggcttacttacagtttactcagggatggttttgaaatctacacaacagaggatcaatacccatacagtattcaatacttcttagacacagacctgttaccatataccaaatattcctattacattgagaccaccaatgtgcatggttcaacaaggagtgtagctgtcacttacaagacaaaaccaggggtcccagagggaaacttgactttaagttatatcattcctattggctcagactctgtgacacttacctggacaacactctcaaatcaatctggtcccatagagaaatatattttgtcctgtgcccctttggctggtggtcagccatgtgtttcctacgaaggtcatgaaacctcagctaccatctggaatctggttccatttgccaagtacgatttttctgtacaggcgtgtactagcgggggctgtttacacagcttgcccattacagtgaccacagcccaggcccctccccaaagactaagtccacctaagatgcagaaaatcagttctacagaacttcatgtagaatggtctccaccagcggaactaaatggaataattataagatatgaactatacatgagaagactgagatctactaaagaaaccacatctgaggaaagtcgagtttttcagagcagtggttggctcagtcctcattcatttgtagaatcggccaatgaaaatgcattaaaacctcctcaaacaatgacaaccatcactggcttggagccatacaccaagtatgagttcagagtcttagctgtgaatatggctggaagtgtgtcttctgcctgggtctcagaaagaacgggagaatcagcacctgtattcatgatccctccttcagtctttcccctctcttcgtactctctcaatatctcctgggagaagccagcagataatgttacaagaggaaaagttgtggggtatgacatcaatatgctttctgaacaatcacctcaacagtctattcccatggcgttttcacagctgttgcacactgctaaatcccaagaactatcttacactgtagaaggactgaaaccttataggatatatgagtttactattactctctgcaattcagttggttgtgtgaccagtgcttcgggagcaggacaaactttagcagcagcaccagcacaactgaggccacctctggttaaaggaatcaacagcacaacaatccatcttaggtggtttccacctgaagaactgaatggaccctctcctatatatcagctggaaaggagagagtcatctctaccagctctgatgaccacgatgatgaaaggaatccgtttcataggaaatgggtattgtaaatttcccagctccactcacccagtcaatacagacttcactggtaagtgtgtttgacattgctttatttaggagacacgaagctccaaaatgttttctatattttcatatccctttacaatgaatttttattatacctacttagagaaatactaattcagccctttgatagcttttgcctgattgtttcagcatgtccatctttttagaattctggggaaaaaagtcaggtaagtgaaggaaaggaaaaataaaagatgaagatgaagaagcagccttattggatcaaagtatgtgctttgtatttgtctttttgtgaagtatgtgccaggacatgtttcttgaaatattattcactgtgttctctgagcaaatgagtttgcaaaatgccctcatgctattggagattctcagtatgcaccccgttactgaaactccaaaaagcattgtaagaaagctattcaactttgcttagctaatcatgcctaacagatatttgatgtaatgttttctttttctttctcttgctgtttccttcttctttttttcactgtgacaacttaatatctcatgttctatgaagaacattgtggggaaaactaatcccagggaaaagataacttctctaagccaggactatggtaaagcaagtgaggctcttgtttcggtcacaaaatttaaaggcactaaaaaactcagtgttaatgtaaattttaatgcaatatttttaaaaatgaaaatcaatgtgaaagcactataaaaatattatcaaaagcttaaataaagacagattgaactctgtaccagcacaatcctgcctcactggccttaccctcctcctggccttactagtaccgcaatattttggaagtcccatgacctctgtgacttacagcttctaatagcatgatttcaatatagctgtaaaaaaactctacttatggtacaccatttttccaatttttaaaaaaatttacaaagtataagatatatattattatgtaaactcataaagatgttcatttaatcatccatgagaaagtcattttggagcaaatagctagtctttaaaatattgcatatgtgaagacaatgaaatggaattcgagctataaaaatttgtattgttttatttttacttaaaatagtaaatagtttgcttttcattgagactggctgctgatgcaccttggtaatgaatcatgattatattctaactgagatatattgagattaatgcatgattaactactctctcagtacatcaaaatcattgcagagtattagaaattgaaccattgagctaaaaatgctcaacttctgctttatattcttaaaatggcaaaaaa

SEQ ID NO: 170475 - protein, 1022 aa, Artificial Sequence
  derived and/or modified sequence
MAKYGEHEASPDNGQNEFSDIIKSRSDEHNDVQKKTFTKWINARFSKSGKPPINDMFTDLKDGRKLLDLLEGLTGTSLPKERGSTRVHALNNVNRVLQVLHQNNVELVNIGGTDIVDGNHKLTLGLLWSIILHWQVKDVMKDVMSDLQQTNSEKILLSWVRQTTRPYSQVNVLNFTTSWTDGLAFNAVLHRHKPDLFSWDKVVKMSPIERLEHAFSKAQTYLGIEKLLDPEDVAVQLPDKKSIIMYLTSLFEVLPQQVTIDAIREVETLPRKYKKECEEEAINIQSTAPEEEHESPRAETPSTVTEVDMDLDSYQIALEEVLTWLLSAEDTFQEQDDISDDVEEVKDQFATHEAFMMELTAHQSSVGSVLQAGNQLITQGTLSDEEEFEIQEQMTLLNARWEALRVESMDRQSRLHDVLMELQKKQLQQLSAWLTLTEERIQKMETCPLDDDVKSLQKLLEEHKSLQSDLEAEQVKVNSLTHMVVIVDENSGESATAILEDQLQKLGERWTAVCRWTEERWNRLQEINILWQELLEEQCLLKAWLTEKEEALNKVQTSNFKDQKELSVSVRRLAILKEDMEMKRQTLDQLSEIGQDVGQLLDNSKASKKINSDSEELTQRWDSLVQRLEDSSNQVTQAVAKLGMSQIPQKDLLETVRVREQAITKKSKQELPPPPPPKKRQIHVDIEAKKKFDAISAELLNWILKWKTAIQTTEIKEYMKMQDTSEMKKKLKALEKEQRERIPRADELNQTGQILVEQMGKEGLPTEEIKNVLEKVSSEWKNVSQHLEDLERKIQLQEDINAYFKQLDELEKVIKTKEEWVKHTSISESSRQSLPSLKDSCQRELTNLLGLHPKIEMARASCSALMSQPSAPDFVQRGFDSFLGRYQAVQEAVEDRQQHLENELKGQPGHAYLETLKTLKDVLNDSENKAQVSLNVLNDLAKVEKALQEKKTLDEILENQKPALHKLAEETKALEKNVHPDVEKLYKQEFDDVQGKWNKLKVLVSKDLHLLEEIALTLRAFE

SEQ ID NO: 170476 - protein, 3433 aa, Artificial Sequence
  derived and/or modified sequence
MAKYGEHEASPDNGQNEFSDIIKSRSDEHNDVQKKTFTKWINARFSKSGKPPINDMFTDLKDGRKLLDLLEGLTGTSLPKERGSTRVHALNNVNRVLQVLHQNNVELVNIGGTDIVDGNHKLTLGLLWSIILHWQVKDVMKDVMSDLQQTNSEKILLSWVRQTTRPYSQVNVLNFTTSWTDGLAFNAVLHRHKPDLFSWDKVVKMSPIERLEHAFSKAQTYLGIEKLLDPEDVAVQLPDKKSIIMYLTSLFEVLPQQVTIDAIREVETLPRKYKKECEEEAINIQSTAPEEEHESPRAETPSTVTEVDMDLDSYQIALEEVLTWLLSAEDTFQEQDDISDDVEEVKDQFATHEAFMMELTAHQSSVGSVLQAGNQLITQGTLSDEEEFEIQEQMTLLNARWEALRVESMDRQSRLHDVLMELQKKQLQQLSAWLTLTEERIQKMETCPLDDDVKSLQKLLEEHKSLQSDLEAEQVKVNSLTHMVVIVDENSGESATAILEDQLQKLGERWTAVCRWTEERWNRLQEINILWQELLEEQCLLKAWLTEKEEALNKVQTSNFKDQKELSVSVRRLAILKEDMEMKRQTLDQLSEIGQDVGQLLDNSKASKKINSDSEELTQRWDSLVQRLEDSSNQVTQAVAKLGMSQIPQKDLLETVRVREQAITKKSKQELPPPPPPKKRQIHVDIEAKKKFDAISAELLNWILKWKTAIQTTEIKEYMKMQDTSEMKKKLKALEKEQRERIPRADELNQTGQILVEQMGKEGLPTEEIKNVLEKVSSEWKNVSQHLEDLERKIQLQEDINAYFKQLDELEKVIKTKEEWVKHTSISESSRQSLPSLKDSCQRELTNLLGLHPKIEMARASCSALMSQPSAPDFVQRGFDSFLGRYQAVQEAVEDRQQHLENELKGQPGHAYLETLKTLKDVLNDSENKAQVSLNVLNDLAKVEKALQEKKTLDEILENQKPALHKLAEETKALEKNVHPDVEKLYKQEFDDVQGKWNKLKVLVSKDLHLLEEIALTLRAFEADSTVIEKWMDGVKDFLMKQQAAQGDDAGLQRQLDQCSAFVNEIETIESSLKNMKEIETNLRSGPVAGIKTWVQTRLGDYQTQLEKLSKEIATQKSRLSESQEKAANLKKDLAEMQEWMTQAEEEYLERDFEYKSPEELESAVEEMKRAKEDVLQKEVRVKILKDNIKLLAAKVPSGGQELTSELNVVLENYQLLCNRIRGKCHTLEEVWSCWIELLHYLDLETTWLNTLEERMKSTEVLPEKTDAVNEALESLESVLRHPADNRTQIRELGQTLIDGGILDDIISEKLEAFNSRYEDLSHLAESKQISLEKQLQVLRETDQMLQVLQESLGELDKQLTTYLTDRIDAFQVPQEAQKIQAEISAHELTLEELRRNMRSQPLTSPESRTARGGSQMDVLQRKLREVSTKFQLFQKPANFEQRMLDCKRVLDGVKAELHVLDVKDVDPDVIQTHLDKCMKLYKTLSEVKLEVETVIKTGRHIVQKQQTDNPKGMDEQLTSLKVLYNDLGAQVTEGKQDLERASQLARKMKKEAASLSEWLSATETELVQKSTSEGLLGDLDTEISWAKNVLKDLEKRKADLNTITESSAALQNLIEGSEPILEERLCVLNAGWSRVRTWTEDWCNTLMNHQNQLEIFDGNVAHISTWLYQAEALLDEIEKKPTSKQEEIVKRLVSELDDANLQVENVRDQALILMNARGSSSRELVEPKLAELNRNFEKVSQHIKSAKLLIAQEPLYQCLVTTETFETGVPFSDLEKLENDIENMLKFVEKHLESSDEDEKMDEESAQIEEVLQRGEEMLHQPMEDNKKEKIRLQLLLLHTRYNKIKAIPIQQRKMGQLASGIRSSLLPTDYLVEINKILLCMDDVELSLNVPELNTAIYEDFSFQEDSLKNIKDQLDKLGEQIAVIHEKQPDVILEASGPEAIQIRDTLTQLNAKWDRINRMYSDRKGCFDRAMEEWRQFHCDLNDLTQWITEAEELLVDTCAPGGSLDLEKARIHQQELEVGISSHQPSFAALNRTGDGIVQKLSQADGSFLKEKLAGLNQRWDAIVAEVKDRQPRLKGESKQVMKYRHQLDEIICWLTKAEHAMQKRSTTELGENLQELRDLTQEMEVHAEKLKWLNRTELEMLSDKSLSLPERDKISESLRTVNMTWNKICREVPTTLKECIQEPSSVSQTRIAAHPNVQKVVLVSSASDIPVQSHRTSEISIPADLDKTITELADWLVLIDQMLKSNIVTVGDVEEINKTVSRMKITKADLEQRHPQLDYVFTLAQNLKNKASSSDMRTAITEKLERVKNQWDGTQHGVELRQQQLEDMIIDSLQWDDHREETEELMRKYEARLYILQQARRDPLTKQISDNQILLQELGPGDGIVMAFDNVLQKLLEEYGSDDTRNVKETTEYLKTSWINLKQSIADRQNALEAEWRTVQASRRDLENFLKWIQEAETTVNVLVDASHRENALQDSILARELKQQMQDIQAEIDAHNDIFKSIDGNRQKMVKALGNSEEATMLQHRLDDMNQRWNDLKAKSASIRAHLEASAEKWNRLLMSLEELIKWLNMKDEELKKQMPIGGDVPALQLQYDHCKALRRELKEKEYSVLNAVDQARVFLADQPIEAPEEPRRNLQSKTELTPEERAQKIAKAMRKQSSEVKEKWESLNAVTSNWQKQVDKALEKLRDLQGAMDDLDADMKEAESVRNGWKPVGDLLIDSLQDHIEKIMAFREEIAPINFKVKTVNDLSSQLSPLDLHPSLKMSRQLDDLNMRWKLLQVSVDDRLKQLQEAHRDFGPSSQHFLSTSVQLPWQRSISHNKVPYYINHQTQTTCWDHPKMTELFQSLADLNNVRFSAYRTAIKIRRLQKALCLDLLELSTTNEIFKQHKLNQNDQLLSVPDVINCLTTTYDGLEQMHKDLVNVPLCVDMCLNWLLNVYDTGRTGKIRVQSLKIGLMSLSKGLLEEKYRYLFKEVAGPTEMCDQRQLGLLLHDAIQIPRQLGEVAAFGGSNIEPSVRSCFQQNNNKPEISVKEFIDWMHLEPQSMVWLPVLHRVAAAETAKHQAKCNICKECPIVGFRYRSLKHFNYDVCQSCFFSGRTAKGHKLHYPMVEYCIPTTSGEDVRDFTKVLKNKFRSKKYFAKHPRLGYLPVQTVLEGDNLETPITLISMWPEHYDPSQSPQLFHDDTHSRIEQYATRLAQMERTNGSFLTDSSSTTGSVEDEHALIQQYCQTLGGESPVSQPQSPAQILKSVEREERGELERIIADLEEEQRNLQVEYEQLKDQHLRRGLPVGSPPESIISPHHTSEDSELIAEAKLLRQHKGRLEARMQILEDHNKQLESQLHRLRQLLEQPESDSRINGVSPWASPQHSALSYSLDPDASGPQFHQAAGEDLLAPPHDTSTDLTEVMEQIHSTFPSCCPNVPSRPQAM

SEQ ID NO: 170477 - protein, 181 aa, Artificial Sequence
  derived and/or modified sequence
MHLEPQSMVWLPVLHRVAAAETAKHQAKCNICKECPIVGFRYRSLKHFNYDVCQSCFFSGRTAKGHKLHYPMVEYCIPTTSGEDVRDFTKVLKNKFRSKKYFAKHPRLGYLPVQTVLEGDNLETPITLISMWPEHYDPSQSPQLFHDDTHSRIEQYATRLAQMERTNGSFLTDSSSTTGSV

SEQ ID NO: 170478 - protein, 47 aa, Artificial Sequence
  derived and/or modified sequence
MAKYGEHEASPDNGQNEFSDIIKSRSDEHNDVQKKTFTKWINARFSK

SEQ ID NO: 170479 - DNA, 3069 bp, Artificial Sequence
  derived and/or modified sequence
atggccaagtacggcgagcacgaggccagccccgacaacggccagaacgagttcagcgacatcatcaagagcagaagcgacgagcacaacgacgtgcagaagaagaccttcaccaagtggatcaacgccagattcagcaagagcggcaagccccccatcaacgacatgttcaccgacctgaaggacggcagaaagctgctggacctgctggagggcctgaccggcaccagcctgcccaaggagagaggcagcaccagagtgcacgccctgaacaacgtgaacagagtgctgcaggtgctgcaccagaacaacgtggagctggtgaacatcggcggcaccgacatcgtggacggcaaccacaagctgaccctgggcctgctgtggagcatcatcctgcactggcaggtgaaggacgtgatgaaggacgtgatgagcgacctgcagcagaccaacagcgagaagatcctgctgagctgggtgagacagaccaccagaccctacagccaggtgaacgtgctgaacttcaccaccagctggaccgacggcctggccttcaacgccgtgctgcacagacacaagcccgacctgttcagctgggacaaggtggtgaagatgagccccatcgagagactggagcacgccttcagcaaggcccagacctacctgggcatcgagaagctgctggaccccgaggacgtggccgtgcagctgcccgacaagaagagcatcatcatgtacctgaccagcctgttcgaggtgctgccccagcaggtgaccatcgacgccatcagagaggtggagaccctgcccagaaagtacaagaaggagtgcgaggaggaggccatcaacatccagagcaccgcccccgaggaggagcacgagagccccagagccgagacccccagcaccgtgaccgaggtggacatggacctggacagctaccagatcgccctggaggaggtgctgacctggctgctgagcgccgaggacaccttccaggagcaggacgacatcagcgacgacgtggaggaggtgaaggaccagttcgccacccacgaggccttcatgatggagctgaccgcccaccagagcagcgtgggcagcgtgctgcaggccggcaaccagctgatcacccagggcaccctgagcgacgaggaggagttcgagatccaggagcagatgaccctgctgaacgccagatgggaggccctgagagtggagagcatggacagacagagcagactgcacgacgtgctgatggagctgcagaagaagcagctgcagcagctgagcgcctggctgaccctgaccgaggagagaatccagaagatggagacctgccccctggacgacgacgtgaagagcctgcagaagctgctggaggagcacaagagcctgcagagcgacctggaggccgagcaggtgaaggtgaacagcctgacccacatggtggtgatcgtggacgagaacagcggcgagagcgccaccgccatcctggaggaccagctgcagaagctgggcgagagatggaccgccgtgtgcagatggaccgaggagagatggaacagactgcaggagatcaacatcctgtggcaggagctgctggaggagcagtgcctgctgaaggcctggctgaccgagaaggaggaggccctgaacaaggtgcagaccagcaacttcaaggaccagaaggagctgagcgtgagcgtgagaagactggccatcctgaaggaggacatggagatgaagagacagaccctggaccagctgagcgagatcggccaggacgtgggccagctgctggacaacagcaaggccagcaagaagatcaacagcgacagcgaggagctgacccagagatgggacagcctggtgcagagactggaggacagcagcaaccaggtgacccaggccgtggccaagctgggcatgagccagatcccccagaaggacctgctggagaccgtgagagtgagagagcaggccatcaccaagaagagcaagcaggagctgccccccccccccccccccaagaagagacagatccacgtggacatcgaggccaagaagaagttcgacgccatcagcgccgagctgctgaactggatcctgaagtggaagaccgccatccagaccaccgagatcaaggagtacatgaagatgcaggacaccagcgagatgaagaagaagctgaaggccctggagaaggagcagagagagagaatccccagagccgacgagctgaaccagaccggccagatcctggtggagcagatgggcaaggagggcctgcccaccgaggagatcaagaacgtgctggagaaggtgagcagcgagtggaagaacgtgagccagcacctggaggacctggagagaaagatccagctgcaggaggacatcaacgcctacttcaagcagctggacgagctggagaaggtgatcaagaccaaggaggagtgggtgaagcacaccagcatcagcgagagcagcagacagagcctgcccagcctgaaggacagctgccagagagagctgaccaacctgctgggcctgcaccccaagatcgagatggccagagccagctgcagcgccctgatgagccagcccagcgcccccgacttcgtgcagagaggcttcgacagcttcctgggcagataccaggccgtgcaggaggccgtggaggacagacagcagcacctggagaacgagctgaagggccagcccggccacgcctacctggagaccctgaagaccctgaaggacgtgctgaacgacagcgagaacaaggcccaggtgagcctgaacgtgctgaacgacctggccaaggtggagaaggccctgcaggagaagaagaccctggacgagatcctggagaaccagaagcccgccctgcacaagctggccgaggagaccaaggccctggagaagaacgtgcaccccgacgtggagaagctgtacaagcaggagttcgacgacgtgcagggcaagtggaacaagctgaaggtgctggtgagcaaggacctgcacctgctggaggagatcgccctgaccctgagagccttcgagtag

SEQ ID NO: 170480 - DNA, 10302 bp, Artificial Sequence
  derived and/or modified sequence
atggccaagtacggcgagcacgaggccagccccgacaacggccagaacgagttcagcgacatcatcaagagcagaagcgacgagcacaacgacgtgcagaagaagaccttcaccaagtggatcaacgccagattcagcaagagcggcaagccccccatcaacgacatgttcaccgacctgaaggacggcagaaagctgctggacctgctggagggcctgaccggcaccagcctgcccaaggagagaggcagcaccagagtgcacgccctgaacaacgtgaacagagtgctgcaggtgctgcaccagaacaacgtggagctggtgaacatcggcggcaccgacatcgtggacggcaaccacaagctgaccctgggcctgctgtggagcatcatcctgcactggcaggtgaaggacgtgatgaaggacgtgatgagcgacctgcagcagaccaacagcgagaagatcctgctgagctgggtgagacagaccaccagaccctacagccaggtgaacgtgctgaacttcaccaccagctggaccgacggcctggccttcaacgccgtgctgcacagacacaagcccgacctgttcagctgggacaaggtggtgaagatgagccccatcgagagactggagcacgccttcagcaaggcccagacctacctgggcatcgagaagctgctggaccccgaggacgtggccgtgcagctgcccgacaagaagagcatcatcatgtacctgaccagcctgttcgaggtgctgccccagcaggtgaccatcgacgccatcagagaggtggagaccctgcccagaaagtacaagaaggagtgcgaggaggaggccatcaacatccagagcaccgcccccgaggaggagcacgagagccccagagccgagacccccagcaccgtgaccgaggtggacatggacctggacagctaccagatcgccctggaggaggtgctgacctggctgctgagcgccgaggacaccttccaggagcaggacgacatcagcgacgacgtggaggaggtgaaggaccagttcgccacccacgaggccttcatgatggagctgaccgcccaccagagcagcgtgggcagcgtgctgcaggccggcaaccagctgatcacccagggcaccctgagcgacgaggaggagttcgagatccaggagcagatgaccctgctgaacgccagatgggaggccctgagagtggagagcatggacagacagagcagactgcacgacgtgctgatggagctgcagaagaagcagctgcagcagctgagcgcctggctgaccctgaccgaggagagaatccagaagatggagacctgccccctggacgacgacgtgaagagcctgcagaagctgctggaggagcacaagagcctgcagagcgacctggaggccgagcaggtgaaggtgaacagcctgacccacatggtggtgatcgtggacgagaacagcggcgagagcgccaccgccatcctggaggaccagctgcagaagctgggcgagagatggaccgccgtgtgcagatggaccgaggagagatggaacagactgcaggagatcaacatcctgtggcaggagctgctggaggagcagtgcctgctgaaggcctggctgaccgagaaggaggaggccctgaacaaggtgcagaccagcaacttcaaggaccagaaggagctgagcgtgagcgtgagaagactggccatcctgaaggaggacatggagatgaagagacagaccctggaccagctgagcgagatcggccaggacgtgggccagctgctggacaacagcaaggccagcaagaagatcaacagcgacagcgaggagctgacccagagatgggacagcctggtgcagagactggaggacagcagcaaccaggtgacccaggccgtggccaagctgggcatgagccagatcccccagaaggacctgctggagaccgtgagagtgagagagcaggccatcaccaagaagagcaagcaggagctgccccccccccccccccccaagaagagacagatccacgtggacatcgaggccaagaagaagttcgacgccatcagcgccgagctgctgaactggatcctgaagtggaagaccgccatccagaccaccgagatcaaggagtacatgaagatgcaggacaccagcgagatgaagaagaagctgaaggccctggagaaggagcagagagagagaatccccagagccgacgagctgaaccagaccggccagatcctggtggagcagatgggcaaggagggcctgcccaccgaggagatcaagaacgtgctggagaaggtgagcagcgagtggaagaacgtgagccagcacctggaggacctggagagaaagatccagctgcaggaggacatcaacgcctacttcaagcagctggacgagctggagaaggtgatcaagaccaaggaggagtgggtgaagcacaccagcatcagcgagagcagcagacagagcctgcccagcctgaaggacagctgccagagagagctgaccaacctgctgggcctgcaccccaagatcgagatggccagagccagctgcagcgccctgatgagccagcccagcgcccccgacttcgtgcagagaggcttcgacagcttcctgggcagataccaggccgtgcaggaggccgtggaggacagacagcagcacctggagaacgagctgaagggccagcccggccacgcctacctggagaccctgaagaccctgaaggacgtgctgaacgacagcgagaacaaggcccaggtgagcctgaacgtgctgaacgacctggccaaggtggagaaggccctgcaggagaagaagaccctggacgagatcctggagaaccagaagcccgccctgcacaagctggccgaggagaccaaggccctggagaagaacgtgcaccccgacgtggagaagctgtacaagcaggagttcgacgacgtgcagggcaagtggaacaagctgaaggtgctggtgagcaaggacctgcacctgctggaggagatcgccctgaccctgagagccttcgaggccgacagcaccgtgatcgagaagtggatggacggcgtgaaggacttcctgatgaagcagcaggccgcccagggcgacgacgccggcctgcagagacagctggaccagtgcagcgccttcgtgaacgagatcgagaccatcgagagcagcctgaagaacatgaaggagatcgagaccaacctgagaagcggccccgtggccggcatcaagacctgggtgcagaccagactgggcgactaccagacccagctggagaagctgagcaaggagatcgccacccagaagagcagactgagcgagagccaggagaaggccgccaacctgaagaaggacctggccgagatgcaggagtggatgacccaggccgaggaggagtacctggagagagacttcgagtacaagagccccgaggagctggagagcgccgtggaggagatgaagagagccaaggaggacgtgctgcagaaggaggtgagagtgaagatcctgaaggacaacatcaagctgctggccgccaaggtgcccagcggcggccaggagctgaccagcgagctgaacgtggtgctggagaactaccagctgctgtgcaacagaatcagaggcaagtgccacaccctggaggaggtgtggagctgctggatcgagctgctgcactacctggacctggagaccacctggctgaacaccctggaggagagaatgaagagcaccgaggtgctgcccgagaagaccgacgccgtgaacgaggccctggagagcctggagagcgtgctgagacaccccgccgacaacagaacccagatcagagagctgggccagaccctgatcgacggcggcatcctggacgacatcatcagcgagaagctggaggccttcaacagcagatacgaggacctgagccacctggccgagagcaagcagatcagcctggagaagcagctgcaggtgctgagagagaccgaccagatgctgcaggtgctgcaggagagcctgggcgagctggacaagcagctgaccacctacctgaccgacagaatcgacgccttccaggtgccccaggaggcccagaagatccaggccgagatcagcgcccacgagctgaccctggaggagctgagaagaaacatgagaagccagcccctgaccagccccgagagcagaaccgccagaggcggcagccagatggacgtgctgcagagaaagctgagagaggtgagcaccaagttccagctgttccagaagcccgccaacttcgagcagagaatgctggactgcaagagagtgctggacggcgtgaaggccgagctgcacgtgctggacgtgaaggacgtggaccccgacgtgatccagacccacctggacaagtgcatgaagctgtacaagaccctgagcgaggtgaagctggaggtggagaccgtgatcaagaccggcagacacatcgtgcagaagcagcagaccgacaaccccaagggcatggacgagcagctgaccagcctgaaggtgctgtacaacgacctgggcgcccaggtgaccgagggcaagcaggacctggagagagccagccagctggccagaaagatgaagaaggaggccgccagcctgagcgagtggctgagcgccaccgagaccgagctggtgcagaagagcaccagcgagggcctgctgggcgacctggacaccgagatcagctgggccaagaacgtgctgaaggacctggagaagagaaaggccgacctgaacaccatcaccgagagcagcgccgccctgcagaacctgatcgagggcagcgagcccatcctggaggagagactgtgcgtgctgaacgccggctggagcagagtgagaacctggaccgaggactggtgcaacaccctgatgaaccaccagaaccagctggagatcttcgacggcaacgtggcccacatcagcacctggctgtaccaggccgaggccctgctggacgagatcgagaagaagcccaccagcaagcaggaggagatcgtgaagagactggtgagcgagctggacgacgccaacctgcaggtggagaacgtgagagaccaggccctgatcctgatgaacgccagaggcagcagcagcagagagctggtggagcccaagctggccgagctgaacagaaacttcgagaaggtgagccagcacatcaagagcgccaagctgctgatcgcccaggagcccctgtaccagtgcctggtgaccaccgagaccttcgagaccggcgtgcccttcagcgacctggagaagctggagaacgacatcgagaacatgctgaagttcgtggagaagcacctggagagcagcgacgaggacgagaagatggacgaggagagcgcccagatcgaggaggtgctgcagagaggcgaggagatgctgcaccagcccatggaggacaacaagaaggagaagatcagactgcagctgctgctgctgcacaccagatacaacaagatcaaggccatccccatccagcagagaaagatgggccagctggccagcggcatcagaagcagcctgctgcccaccgactacctggtggagatcaacaagatcctgctgtgcatggacgacgtggagctgagcctgaacgtgcccgagctgaacaccgccatctacgaggacttcagcttccaggaggacagcctgaagaacatcaaggaccagctggacaagctgggcgagcagatcgccgtgatccacgagaagcagcccgacgtgatcctggaggccagcggccccgaggccatccagatcagagacaccctgacccagctgaacgccaagtgggacagaatcaacagaatgtacagcgacagaaagggctgcttcgacagagccatggaggagtggagacagttccactgcgacctgaacgacctgacccagtggatcaccgaggccgaggagctgctggtggacacctgcgcccccggcggcagcctggacctggagaaggccagaatccaccagcaggagctggaggtgggcatcagcagccaccagcccagcttcgccgccctgaacagaaccggcgacggcatcgtgcagaagctgagccaggccgacggcagcttcctgaaggagaagctggccggcctgaaccagagatgggacgccatcgtggccgaggtgaaggacagacagcccagactgaagggcgagagcaagcaggtgatgaagtacagacaccagctggacgagatcatctgctggctgaccaaggccgagcacgccatgcagaagagaagcaccaccgagctgggcgagaacctgcaggagctgagagacctgacccaggagatggaggtgcacgccgagaagctgaagtggctgaacagaaccgagctggagatgctgagcgacaagagcctgagcctgcccgagagagacaagatcagcgagagcctgagaaccgtgaacatgacctggaacaagatctgcagagaggtgcccaccaccctgaaggagtgcatccaggagcccagcagcgtgagccagaccagaatcgccgcccaccccaacgtgcagaaggtggtgctggtgagcagcgccagcgacatccccgtgcagagccacagaaccagcgagatcagcatccccgccgacctggacaagaccatcaccgagctggccgactggctggtgctgatcgaccagatgctgaagagcaacatcgtgaccgtgggcgacgtggaggagatcaacaagaccgtgagcagaatgaagatcaccaaggccgacctggagcagagacacccccagctggactacgtgttcaccctggcccagaacctgaagaacaaggccagcagcagcgacatgagaaccgccatcaccgagaagctggagagagtgaagaaccagtgggacggcacccagcacggcgtggagctgagacagcagcagctggaggacatgatcatcgacagcctgcagtgggacgaccacagagaggagaccgaggagctgatgagaaagtacgaggccagactgtacatcctgcagcaggccagaagagaccccctgaccaagcagatcagcgacaaccagatcctgctgcaggagctgggccccggcgacggcatcgtgatggccttcgacaacgtgctgcagaagctgctggaggagtacggcagcgacgacaccagaaacgtgaaggagaccaccgagtacctgaagaccagctggatcaacctgaagcagagcatcgccgacagacagaacgccctggaggccgagtggagaaccgtgcaggccagcagaagagacctggagaacttcctgaagtggatccaggaggccgagaccaccgtgaacgtgctggtggacgccagccacagagagaacgccctgcaggacagcatcctggccagagagctgaagcagcagatgcaggacatccaggccgagatcgacgcccacaacgacatcttcaagagcatcgacggcaacagacagaagatggtgaaggccctgggcaacagcgaggaggccaccatgctgcagcacagactggacgacatgaaccagagatggaacgacctgaaggccaagagcgccagcatcagagcccacctggaggccagcgccgagaagtggaacagactgctgatgagcctggaggagctgatcaagtggctgaacatgaaggacgaggagctgaagaagcagatgcccatcggcggcgacgtgcccgccctgcagctgcagtacgaccactgcaaggccctgagaagagagctgaaggagaaggagtacagcgtgctgaacgccgtggaccaggccagagtgttcctggccgaccagcccatcgaggcccccgaggagcccagaagaaacctgcagagcaagaccgagctgacccccgaggagagagcccagaagatcgccaaggccatgagaaagcagagcagcgaggtgaaggagaagtgggagagcctgaacgccgtgaccagcaactggcagaagcaggtggacaaggccctggagaagctgagagacctgcagggcgccatggacgacctggacgccgacatgaaggaggccgagagcgtgagaaacggctggaagcccgtgggcgacctgctgatcgacagcctgcaggaccacatcgagaagatcatggccttcagagaggagatcgcccccatcaacttcaaggtgaagaccgtgaacgacctgagcagccagctgagccccctggacctgcaccccagcctgaagatgagcagacagctggacgacctgaacatgagatggaagctgctgcaggtgagcgtggacgacagactgaagcagctgcaggaggcccacagagacttcggccccagcagccagcacttcctgagcaccagcgtgcagctgccctggcagagaagcatcagccacaacaaggtgccctactacatcaaccaccagacccagaccacctgctgggaccaccccaagatgaccgagctgttccagagcctggccgacctgaacaacgtgagattcagcgcctacagaaccgccatcaagatcagaagactgcagaaggccctgtgcctggacctgctggagctgagcaccaccaacgagatcttcaagcagcacaagctgaaccagaacgaccagctgctgagcgtgcccgacgtgatcaactgcctgaccaccacctacgacggcctggagcagatgcacaaggacctggtgaacgtgcccctgtgcgtggacatgtgcctgaactggctgctgaacgtgtacgacaccggcagaaccggcaagatcagagtgcagagcctgaagatcggcctgatgagcctgagcaagggcctgctggaggagaagtacagatacctgttcaaggaggtggccggccccaccgagatgtgcgaccagagacagctgggcctgctgctgcacgacgccatccagatccccagacagctgggcgaggtggccgccttcggcggcagcaacatcgagcccagcgtgagaagctgcttccagcagaacaacaacaagcccgagatcagcgtgaaggagttcatcgactggatgcacctggagccccagagcatggtgtggctgcccgtgctgcacagagtggccgccgccgagaccgccaagcaccaggccaagtgcaacatctgcaaggagtgccccatcgtgggcttcagatacagaagcctgaagcacttcaactacgacgtgtgccagagctgcttcttcagcggcagaaccgccaagggccacaagctgcactaccccatggtggagtactgcatccccaccaccagcggcgaggacgtgagagacttcaccaaggtgctgaagaacaagttcagaagcaagaagtacttcgccaagcaccccagactgggctacctgcccgtgcagaccgtgctggagggcgacaacctggagacccccatcaccctgatcagcatgtggcccgagcactacgaccccagccagagcccccagctgttccacgacgacacccacagcagaatcgagcagtacgccaccagactggcccagatggagagaaccaacggcagcttcctgaccgacagcagcagcaccaccggcagcgtggaggacgagcacgccctgatccagcagtactgccagaccctgggcggcgagagccccgtgagccagccccagagccccgcccagatcctgaagagcgtggagagagaggagagaggcgagctggagagaatcatcgccgacctggaggaggagcagagaaacctgcaggtggagtacgagcagctgaaggaccagcacctgagaagaggcctgcccgtgggcagcccccccgagagcatcatcagcccccaccacaccagcgaggacagcgagctgatcgccgaggccaagctgctgagacagcacaagggcagactggaggccagaatgcagatcctggaggaccacaacaagcagctggagagccagctgcacagactgagacagctgctggagcagcccgagagcgacagcagaatcaacggcgtgagcccctgggccagcccccagcacagcgccctgagctacagcctggaccccgacgccagcggcccccagttccaccaggccgccggcgaggacctgctggcccccccccacgacaccagcaccgacctgaccgaggtgatggagcagatccacagcaccttccccagctgctgccccaacgtgcccagcagaccccaggccatgtag

SEQ ID NO: 170481 - DNA, 144 bp, Artificial Sequence
  derived and/or modified sequence
atggccaagtacggcgagcacgaggccagccccgacaacggccagaacgagttcagcgacatcatcaagagcagaagcgacgagcacaacgacgtgcagaagaagaccttcaccaagtggatcaacgccagattcagcaagtag

SEQ ID NO: 170482 - DNA, 3069 bp, Artificial Sequence
  derived and/or modified sequence
atggctaagtacggagagcacgaggcgagtcccgacaacggtcagaatgagttttctgatattatcaaatccagaagtgacgagcacaatgacgtacaaaaaaaaacctttaccaaatggatcaacgccagatttagtaaatcagggaaacctcccatcaacgacatgttcactgacctgaaagacggcaggaagttgctcgatctgctggaaggcctcaccggcacatctctgcctaaggagcgcggaagcacaagagtgcatgccctaaacaatgttaatcgcgtattacaagtcctgcaccagaataacgtggagctcgttaatattggaggcaccgacattgtcgatggcaaccataagctgactctaggacttctttggtcaattatccttcactggcaagtgaaggacgtgatgaaggacgtgatgtcggatctgcagcaaacaaactctgaaaagattttgctttcatgggtcagacagactacccggccgtactcacaggtcaatgtgctgaatttcaccaccagttggactgatggcctggcttttaacgccgtactgcatcggcacaaacctgatctgttttcctgggataaagttgtcaagatgtctcctattgaacgactcgagcacgcattctcaaaggctcaaacatatctcggaatcgaaaagctactagatcctgaagacgttgccgtacaattgcctgataaaaagtctattatcatgtacctgacatccctttttgaagtcctgcctcagcaagttaccattgatgcaattagggaggtggaaacactcccaaggaagtataagaaggagtgcgaagaagaggccatcaacatccaaagcacggcccctgaagaggaacatgagtccccccgtgcggagacgccatccacagtcactgaggtggatatggacctggattcttaccaaatagcactggaagaagttctgacatggctgctgagcgccgaggataccttccaagagcaggatgatatctctgacgatgtggaagaggtgaaagatcagtttgctacacatgaggctttcatgatggaactgacggctcaccagtcctctgtggggtccgttctacaggctgggaatcagcttatcacacagggcactctaagcgacgaggaggagtttgagatccaggaacagatgaccctgctcaacgctaggtgggaggccctgcgcgttgagtcgatggaccgccagagccggctacatgacgtcctcatggagctgcaaaagaaacaactgcagcagctctctgcctggctaacattgaccgaggaacgaattcagaagatggagacttgccccttagatgacgatgtcaagtctctccaaaagctcttggaagagcacaagagtctgcagtcggacctggaagcagagcaagttaaggttaacagtttaacacatatggtcgtcatcgtagacgagaacagcggcgaatcggccaccgcaatcctagaagaccaacttcaaaagctaggagaaaggtggacggcggtctgtaggtggactgaggagcgatggaaccgattgcaagagattaacattctctggcaagaacttcttgaggagcaatgtctgctgaaagcctggctgaccgagaaagaggaagctcttaataaggtgcaaacatccaactttaaagaccaaaaggagctgtccgtttctgtgcggcggcttgcgattctaaaagaagacatggagatgaagcgccaaacgttagatcaactctctgaaatcggccaggacgtaggacagttactcgacaacagtaaagcctccaaaaagataaattccgactctgaggagttgactcagcggtgggactcccttgtccagagactggaagatagtagtaatcaagtgacgcaggcagttgcgaagctgggtatgtcccagatcccccagaaagacctactcgagaccgtgcgggtaagggagcaggctatcacaaagaaatccaaacaggaactgccacccccgcccccacccaaaaaacgacaaatacacgttgacattgaagccaagaaaaagttcgacgccatctcagccgaactgctgaattggattctcaagtggaaaactgcaatacagaccactgaaattaaagagtacatgaaaatgcaagacacatctgagatgaaaaagaagctcaaggcattggagaaggaacaaagagagcggatcccccgtgccgacgagctcaaccaaacagggcagatcttggtcgaacagatgggcaaagagggattaccaacagaggaaattaaaaacgtgctggaaaaggtgagcagcgagtggaaaaacgtgtcccagcacctggaagacctcgaacgaaagatccagctgcaggaagatatcaacgcttacttcaaacagcttgacgagctggaaaaagtaatcaagaccaaggaggagtgggtgaagcatacatcaatttcagagtcttctcggcaatctctgcccagcttgaaggactcctgtcagcgtgaactgactaacctcctgggactgcaccctaaaatagagatggcaagagcatcgtgtagcgctctgatgtcccagccaagtgctcccgactttgtgcagcgcggctttgactccttcctcggtaggtaccaggctgttcaagaggccgttgaggatcgccagcagcatctagaaaatgagctaaagggccaaccgggccatgcttatctggaaacattgaaaacactgaaggatgtgctgaacgacagcgagaacaaagcccaggtgagtctcaatgtgctgaacgatctggccaaggttgagaaagccctgcaagaaaaaaagacccttgatgagattctggaaaaccagaaacccgctctgcacaaattagctgaagagaccaaagcactggagaagaacgtgcaccccgatgtggagaagttgtacaagcaggaatttgatgatgtgcaaggaaagtggaacaagctcaaagtgcttgtcagcaaagacttacatttgcttgaagagattgcattgactctaagggctttcgagtag

SEQ ID NO: 170483 - DNA, 10302 bp, Artificial Sequence
  derived and/or modified sequence
atggccaaatacggagaacatgaagcctccccggacaacggtcagaatgaattctcggacattatcaagtctcgcagcgacgaacataacgacgtccagaagaaaacctttactaaatggatcaatgctcggttcagcaagtccggcaagcctccgatcaatgacatgttcacggatctgaaagatggccgcaaactactggacctgctggaggggctcaccggaacatccctcccaaaagaacgcggatcaacacgcgtacacgcccttaacaacgtcaaccgtgtccttcaggtactgcatcagaacaatgttgaactcgttaacattggagggaccgatattgttgacggcaatcacaaactcaccctgggcttactttggtcaatcattctgcattggcaggtgaaagacgtgatgaaggatgtcatgtctgatctccagcagactaattctgaaaagatactgttgagttgggtgcgccagacaactaggccatatagccaagttaacgttctgaatttcactacctcatggacggatgggctcgccttcaacgccgtcctacacagacacaaacctgacctctttagctgggacaaagtcgtcaaaatgtccccaattgagaggctggagcacgcattctccaaagcacagacctacctggggatagagaagctcttggacccagaggatgtcgctgtgcagttacccgacaagaaaagcattattatgtaccttacctctctgttcgaggtactacctcagcaggtaaccattgacgccattcgggaagtggagacgctgcctaggaaatataagaaagagtgcgaagaggaggccatcaacattcagtctacagctcccgaagaggaacatgagagtccacgtgccgaaaccccgagtaccgtcaccgaggtagatatggatctggattcgtatcagattgcactggaggaagtgctcacgtggttactcagtgccgaagacacctttcaggagcaggacgacatctcggatgacgtggaggaagtcaaagaccagtttgccacgcacgaggcatttatgatggaattgacggcccaccagagttccgtgggctctgtgctgcaggcagggaaccagctgattactcagggaaccttgagcgacgaggaagaattcgaaattcaggagcagatgacgctgctcaatgccaggtgggaagctctgcgcgtggaatcaatggatagacagagtcgattgcacgacgtactcatggaactgcagaaaaagcaactgcaacagctgtcagcatggttaacacttactgaggagagaatccagaaaatggagacatgccccttagacgatgacgtcaaatccttgcagaagctactggaagagcacaaatccctgcaatctgatctagaggccgagcaggtgaaggtgaatagtcttacccacatggtcgtgatcgtggatgaaaacagtggggaatctgccacagccatcctcgaggaccagctgcaaaaactgggggaacgctggaccgctgtctgccgctggactgaggagagatggaaccggctccaggagattaacattctctggcaggaactgctggaggagcaatgcctgctgaaggcctggctaacagagaaggaggaagccttaaataaggtgcagacaagcaactttaaggatcagaaggagttgagcgtttctgtgcggaggctcgccatcctgaaagaggatatggaaatgaagcgccaaaccttagatcagttgagtgaaatcggacaggatgtaggacagctgcttgacaattccaaagctagtaaaaagatcaattcagacagtgaggaactgacccagagatgggactcattggttcagagactggaagattcgagtaatcaagtcacacaggccgtagctaaacttgggatgtcacagatcccccagaaggacctgctcgaaactgtgcgggtgcgggagcaggccatcactaagaagagcaaacaggagcttcctccccctcctccccccaaaaagaggcagatacacgtggatatcgaagcaaagaagaaattcgacgccattagcgctgagctgctgaactggatcctgaaatggaaaacagccattcaaacgaccgagatcaaagagtatatgaagatgcaggatacctcggagatgaagaagaaattaaaagcacttgaaaaggagcaacgagagcgtatacccagggcagacgaactgaaccaaacaggacagatactggttgagcagatgggcaaggagggcctccccacagaggaaataaagaacgtgcttgagaaggttagctctgagtggaagaatgtttcacagcacttggaagacctcgaaaggaagatacagctgcaggaggatattaacgcctactttaagcagctggacgagctggagaaagtgattaagactaaggaggaatgggtaaaacacacgagcattagtgaatcttcccgacagagtcttccgtctctgaaggattcatgccagagggagctgactaacctgcttggcttacatccaaagatcgaaatggccagagctagttgcagcgcactgatgagtcagcctagcgctcccgatttcgtgcaacggggattcgacagctttctgggtcggtatcaggctgtccaggaggccgtggaagacaggcagcagcacttggaaaatgaactgaagggccaaccaggccatgcttatctggaaacccttaagacactgaaggacgtgctcaacgattccgaaaataaggcacaggtgtcattgaacgttctgaatgacctcgccaaggtcgaaaaggctcttcaggagaagaagaccttagacgagattttggagaaccagaagcctgctctgcacaagttggcagaagaaaccaaagccctcgaaaagaatgtgcatcccgacgtagagaaactgtacaagcaggaattcgacgatgtgcaagggaagtggaataaactcaaagttcttgtgagcaaagacctccacctgctggaggagatcgccctgacactgagagcttttgaggccgactcaacagtgatcgaaaaatggatggacggcgtcaaggatttccttatgaaacagcaggccgcccagggagatgacgccggcctgcagagacagctcgatcagtgttccgccttcgtgaatgagattgagacaattgaaagcagtctgaaaaatatgaaggagatagaaacgaatttgcggtccggccccgttgccggaattaagacatgggtacagacaaggcttggagactatcaaacccagctggagaaactctcaaaagagattgcaacccaaaagtcccggttaagtgaatcacaggagaaggcagccaatctgaagaaagatctggcagaaatgcaggagtggatgactcaagccgaagaagagtacctggagcgggacttcgagtacaaaagtccagaggagctcgaatcagctgtggaagagatgaagagggccaaggaagacgtcctccagaaagaggttagagtgaaaatcctgaaagacaacatcaaactcctggccgcaaaggtgccttctgggggtcaggagcttacaagtgagttgaatgtagtgcttgaaaactatcagctgctgtgtaaccgtattagaggaaagtgccacacattggaggaggtctggtcctgttggattgaactactgcactacctagatctcgagacaacttggctgaacacactagaggaaaggatgaagtcaactgaagtcctccccgagaagacggatgcggtgaatgaggcgcttgagtcacttgaaagcgtactgagacacccagctgacaacaggacacagatccgtgagttaggacaaaccctgatcgatggtgggattttagatgacattatctctgagaagctcgaggcgtttaactcgcgctatgaagatttatcccacctggccgagtcgaaacagatttccctggaaaaacaactgcaggtgttgcgtgagaccgatcagatgttacaggtgctgcaggaaagcctgggcgagcttgataaacagcttaccacttacttgactgatagaattgatgctttccaagttccccaggaggcgcaaaaaattcaggccgagataagcgcccacgagctcacattagaggagttgaggaggaatatgaggtcacagccattaacctcccccgagagccggacggctcgggggggcagccagatggacgttctacagcggaagcttagagaggtatcgaccaaattccagctcttccagaaaccagccaattttgagcagcggatgctggactgtaaaagggtgttggatggggttaaggccgagctacacgtcctggacgtaaaggatgtggaccccgatgtaatccaaacgcacctggacaaatgcatgaagctttacaagacacttagtgaggtgaaactggaggtcgagacggtcatcaaaaccggaagacacatcgttcagaaacagcaaactgacaatcctaaaggtatggacgagcagttgaccagcttaaaagtgctgtataacgatctcggagctcaggtaactgaaggaaaacaggatcttgaacgagccagccaactcgctcggaagatgaaaaaagaagccgcctctctctccgagtggctatctgccacagagaccgagctggtgcaaaagtccaccagcgaaggtcttctgggggacttagataccgagattagttgggccaaaaacgtgctgaaggacctggaaaaacggaaggcagatctgaatacaattacggaatcatccgctgctctccaaaacctgattgaaggcagcgaacctatactggaggaaagactgtgtgtgctgaacgcaggatggtcccgggtgcgtacctggaccgaggattggtgtaatacgctgatgaatcaccaaaaccagttagagatattcgacggtaacgttgcccatatcagcacgtggttgtaccaggctgaggcccttcttgatgaaatcgagaagaaacccactagcaagcaggaggagatagttaagcggctggtcagcgaactcgatgacgcaaacttgcaggttgagaacgtgagagaccaggccctgatcctgatgaacgctcgcggttcatcctcgcgtgagttggtggagcctaaacttgcggagctaaaccggaattttgaaaaggtatcccagcacataaaatcagcgaaactgctcatagcacaggagcccctgtatcaatgtttggtgacaaccgagacctttgagaccggtgtaccttttagtgacctcgaaaagctcgaaaatgacatcgagaacatgttgaagtttgtagagaaacaccttgagtctagcgatgaggatgagaaaatggatgaagagtctgctcaaattgaggaggtgttacaaaggggtgaggagatgctgcaccagcctatggaggacaacaagaaagagaaaattcgcctgcagcttctccttttgcacacgagatacaataagatcaaggccatcccaatccagcaacggaaaatgggccagctggccagcggcatccgatcctccctgttgccaacggactacttggtggagataaataaaattctgctgtgcatggatgacgtcgaattatctctgaacgtgccagagttgaatacggcaatttacgaggattttagtttccaggaggattcactgaaaaatatcaaagaccagctggacaagttaggcgagcagattgcggtcattcatgagaagcagcccgatgtcattctagaggcctccggaccggaagccatacaaattcgcgatactcttactcagctcaacgctaaatgggatcgcattaatcgtatgtattcggaccggaaggggtgtttcgatcgagcgatggaggagtggcgccaattccactgcgacctgaacgatttaactcagtggattacagaggcagaggagttactggtggatacctgtgctccagggggctcactagatctcgaaaaggcaaggatccaccagcaggagctcgaagtcgggataagttcacatcaaccatctttcgccgcactaaacaggactggagacggcatcgtacagaagttatctcaggccgatggtagcttcctgaaagaaaaactggctggcctcaaccagaggtgggatgccatcgtcgccgaggtcaaggatcgtcaacctaggctgaaaggggaaagtaagcaggtgatgaagtaccggcaccaactcgatgagattatctgttggttgactaaagcagaacatgctatgcagaaaaggtccacgacggagcttggcgagaatctacaggagctacgagacctgacacaagagatggaggttcatgccgagaagttgaagtggttgaaccgcacagaactggaaatgctgtccgacaagtcgttgagcctcccggagcgcgataaaattagtgaatccctgcgcactgttaatatgacctggaacaaaatctgccgagaggtccccaccactcttaaggaatgcattcaagagcctagttcagtgtctcagactcggattgccgcccaccccaatgttcagaaagtggtcctggtgtccagcgcatccgatatacccgtgcagagtcatagaactagcgaaattagcattcccgcagacctggataagactataacagagctggccgactggctggttctgatcgatcagatgctaaagtctaacatcgtgaccgtgggcgatgtcgaagaaataaataagaccgtctctaggatgaagattactaaagccgatcttgagcagcggcatccccagcttgactatgtgtttactctggctcagaacttgaaaaacaaggcttcttcttctgatatgcgtaccgccattacagagaaacttgaaagagtgaaaaaccagtgggacggcacccaacatggtgttgaactcaggcagcagcagctcgaagatatgattattgattccctgcaatgggacgaccatcgggaagaaacagaggagctgatgcgcaagtacgaagctcgactatacatactgcagcaagctcgccgtgaccccttaaccaagcaaatttcagacaatcagattctactgcaggagctcggaccaggagatggaatcgtgatggctttcgataatgtgctccagaaactgctggaagagtacggctctgacgatacccggaatgtaaaggagactacagagtacctgaaaacttcatggatcaatctcaaacagtcaatcgcagaccgccaaaacgctctcgaggccgaatggcgcaccgtgcaggccagccgccgtgacctcgagaattttctcaagtggattcaggaggccgaaactacagtcaacgtgctcgtagacgctagtcaccgggagaacgctctgcaggatagtatcttggctcgcgagttgaagcagcagatgcaggatatccaagcagagattgatgctcacaatgatatcttcaaaagtatcgacgggaaccgacagaaaatggtgaaggcactggggaactcagaagaggctacgatgctgcagcaccggctggatgacatgaaccagcgctggaatgatctaaaggcaaagtcagccagtatcagagctcacctggaggcaagcgccgagaagtggaacaggcttctgatgtccctggaggaactgatcaagtggctgaacatgaaagatgaagaactgaagaagcaaatgccaataggcggagatgtgcccgccctgcagctgcagtatgaccattgtaaagccctgagacgagagctgaaggaaaaggagtattccgtgctcaacgcagtcgaccaggctagagtgttcctggcagaccagcctatagaagccccagaggaacctcgccgtaatttacaatctaagactgagttgacaccggaggagagagcacagaaaatagcgaaagccatgaggaagcagtccagtgaggtaaaagaaaagtgggaatccttaaacgcagtgacgtctaactggcaaaagcaagtagacaaggcgttagaaaaactacgcgacctgcaaggtgcgatggacgatttggatgctgacatgaaagaagccgagagtgttcggaacggctggaagccagttggagacttgctcatcgactctttgcaggaccacattgaaaagattatggcctttagagaggagattgcccctattaattttaaggtgaagaccgtgaacgacctaagttcccagctgagtcccctcgatttgcaccctagtctgaaaatgtctaggcagctggatgatctcaacatgcgttggaaactcctgcaggtgagcgtagacgacagactcaaacaactgcaagaggctcatcgcgatttcggacctagttcccagcactttttatcaaccagtgtccagctgccatggcagcggtctatttctcacaacaaagttccatactacataaatcatcagacacagaccacatgctgggaccaccccaaaatgaccgagctgtttcagagcttggccgacctgaacaatgtgcgcttcagtgcttacagaacagctataaaaatccgcaggctacagaaagccctttgcctcgacctcttggagctcagcactactaacgagatattcaagcagcataaacttaatcagaacgaccagctgctcagtgtcccagacgtgatcaactgccttactaccacctacgacggactcgagcagatgcacaaggatttagtgaacgtgcctctctgtgtagacatgtgtctgaattggctcctgaatgtgtacgacacaggaagaaccggaaagattcgggtgcagagcctgaagatcggtctgatgagtctgtctaagggcttgctggaggaaaagtataggtacctcttcaaagaggtggctggccccactgagatgtgcgaccaacggcagcttggcttactcctccatgatgctattcagattccacgccagctgggggaagtggccgccttcggtggctcaaatatcgaaccaagtgtgcgctcatgcttccaacaaaacaataataaacccgaaatcagcgttaaggaatttattgattggatgcacctcgaaccccaatctatggtttggctgccagtcctacaccgcgtcgccgccgcagaaacagccaagcatcaagctaaatgcaatatctgtaaggaatgtcccatcgtcggattccgctaccgctctctgaaacactttaattacgacgtgtgccagagctgtttcttcagcggcagaaccgcaaagggacataagctccactaccccatggtggaatactgtatcccaacaacctccggggaagacgtgagggattttaccaaggtgcttaaaaataaatttcgttctaagaaatacttcgccaagcacccccgccttggctacctgcctgtacagaccgtcctcgagggtgacaatctggaaaccccaatcacgctgatttcaatgtggcccgagcactacgaccctagtcagagcccacaactgttccacgacgatacccactcaaggatagaacaatatgcaacaaggttggcccagatggagcgtactaacgggtcctttttgaccgacagctcttctactaccggatccgttgaggatgagcatgccctaatacaacaatattgccagactttaggcggagagtctcctgtgtcacaacctcagagtccagctcagattctaaagtcagtcgaacgtgaggaaaggggtgaacttgaaaggataatcgccgatcttgaggaagagcagcgaaacttacaagtggagtacgagcaacttaaggatcaacatctccgacgggggctaccggtaggcagcccaccagaatcgattatttctccacatcacacatccgaggattcggagcttattgccgaagccaagttgttgaggcagcacaagggcagactggaggctcgaatgcagatcctcgaggaccacaacaaacaactggagtctcagctgcataggttgagacaactgctcgagcaacctgaaagtgattctcggattaacggagtgagtccttgggcctccccccagcactcagcactttcttattcattggacccggatgccagcggaccacaattccatcaggccgccggtgaggacctgctggcaccgccccacgacacttcgaccgatctgaccgaggtaatggaacagatccatagcacatttccatcttgttgtccaaacgtcccatcccgtccccaggccatgtag

SEQ ID NO: 170484 - DNA, 144 bp, Artificial Sequence
  derived and/or modified sequence
atggctaaatatggagagcacgaagccagccctgataatgggcagaacgaattttccgacatcataaaatctagatcggatgaacataatgacgtgcaaaagaaaacatttaccaaatggatcaacgctcgctttagcaagtag

SEQ ID NO: 170485 - DNA, 3069 bp, Artificial Sequence
  derived and/or modified sequence
atggccaagtacggggagcacgaggccagcccagacaatggccagaatgagttcagtgacatcatcaagagcagaagtgatgagcacaatgatgtgcagaagaagaccttcaccaagtggatcaatgcccgcttcagcaagagcggcaagccacccatcaatgacatgttcacagacctgaaggatggcaggaagctgctggacctgctggagggcctgaccggcaccagcctgcccaaggagcggggcagcaccagggtgcacgccctgaacaacgtgaacagagtgctgcaggtgctgcaccagaacaacgtggagctggtgaacatcggcggcacagacatcgtggatggcaaccacaagctgaccctgggcctgctgtggagcatcatcctgcactggcaggtgaaggatgtgatgaaggatgtgatgtctgacctgcagcagaccaacagcgagaagatcctgctgtcctgggtgcggcagaccacccggccctacagccaggtgaatgtgctgaacttcaccacctcctggacagatggcctggccttcaatgctgtgctgcaccgccacaagccagacctcttctcctgggacaaggtggtgaagatgagccccatcgagcggctggagcacgccttcagcaaggcccagacctacctgggcatcgagaagctgctggaccctgaagatgtggccgtgcagctgcctgacaagaagagcatcatcatgtacctgaccagcctgtttgaggtgctgccccagcaggtgaccattgatgccatccgggaggtggagaccctgcccaggaagtacaagaaggaatgtgaggaggaggccatcaacatccagagcacagcccctgaggaggagcacgagagccccagggctgagacccccagcacagtgacagaggtggacatggacctggacagctaccagatcgccctggaggaggtgctgacctggctgctgtctgctgaggacaccttccaggagcaggatgacatcagtgatgatgtggaggaggtgaaggaccagtttgccacccatgaggccttcatgatggagctgacagcccaccagagctctgtgggctctgtgctgcaggccggcaaccagctgatcacccagggcaccctgagtgatgaggaggagtttgagatccaggagcagatgaccctgctgaatgcccgctgggaggccctgcgggtggagagcatggaccggcagagccggctgcatgatgtgctgatggagctgcagaagaagcagctgcagcagctgagcgcctggctgaccctgacagaggagcgcatccagaagatggagacctgccccctggatgatgatgtgaagagcctgcagaagctgctggaggagcacaagagcctgcagagcgacctggaggccgagcaggtgaaggtgaacagcctgacccacatggtggtgattgtggatgaaaattctggagagagcgccacagccatcctggaggaccagctgcagaagctgggggagcgctggacagctgtgtgccgctggacagaggagcgctggaaccggctgcaggagatcaacatcctgtggcaggagctgctggaggagcagtgcctgctgaaggcctggctgacagagaaggaggaggccctgaacaaggtgcagaccagcaacttcaaggaccagaaggagctgtctgtgtctgtgcggcggctggccatcctgaaggaggacatggagatgaagaggcagaccctggaccagctgtctgaaattggccaggatgtgggccagctgctggacaacagcaaggccagcaagaagatcaacagcgacagcgaggagctgacccagcgctgggacagcctggtgcagaggctggaggacagcagcaaccaggtgacccaggccgtggccaagctgggcatgagccagatcccccagaaggacctgctggagaccgtgcgggtgcgggagcaggccatcaccaagaagagcaagcaggagctgcccccacctcctccacccaagaagaggcagatccacgtggacatcgaggccaagaagaagtttgatgccatctctgctgagctgctgaactggatcctgaagtggaagacagccatccagaccacagagatcaaggagtacatgaagatgcaggacaccagcgagatgaagaagaagctgaaggccctggagaaggagcagcgggagcgcatccccagggcagatgagctgaaccagacaggccagatcctggtggagcagatgggcaaggagggcctgcccacagaggagatcaagaatgtgctggagaaggtgagcagcgagtggaagaatgtgtcccagcacctggaggacctggagaggaagatccagctgcaggaggacatcaatgcctacttcaagcagctggatgagctggagaaggtgatcaagaccaaggaggagtgggtgaagcacaccagcatcagcgagagcagccggcagagcctgcccagcctgaaggacagctgccagcgggagctgaccaacctgctgggcctgcaccccaagattgagatggcccgggccagctgcagcgccctgatgagccagcccagcgccccagactttgtgcagaggggctttgacagcttcctgggccgctaccaggccgtgcaggaggccgtggaggaccggcagcagcacctggagaatgagctgaagggccagcccggccacgcctacctggagaccctgaagaccctgaaggatgtgctgaatgacagcgagaacaaggcccaggtgtccctgaatgtgctgaatgacctggccaaggtggagaaggccctgcaggagaagaagaccctggatgagatcctggagaaccagaagccagccctgcacaagctggccgaggagaccaaggccctggagaagaatgtgcacccagatgtggagaagctgtacaagcaggagtttgatgatgtgcagggcaagtggaacaagctgaaggtgctggtgtccaaggacctgcacctgctggaggagatcgccctgaccctgcgggcctttgaatag

SEQ ID NO: 170486 - DNA, 10302 bp, Artificial Sequence
  derived and/or modified sequence
atggccaagtacggggagcacgaggccagcccagacaatggccagaatgagttcagtgacatcatcaagagcagaagtgatgagcacaatgatgtgcagaagaagaccttcaccaagtggatcaatgcccgcttcagcaagagcggcaagccacccatcaatgacatgttcacagacctgaaggatggcaggaagctgctggacctgctggagggcctgaccggcaccagcctgcccaaggagcggggcagcaccagggtgcacgccctgaacaacgtgaacagagtgctgcaggtgctgcaccagaacaacgtggagctggtgaacatcggcggcacagacatcgtggatggcaaccacaagctgaccctgggcctgctgtggagcatcatcctgcactggcaggtgaaggatgtgatgaaggatgtgatgtctgacctgcagcagaccaacagcgagaagatcctgctgtcctgggtgcggcagaccacccggccctacagccaggtgaatgtgctgaacttcaccacctcctggacagatggcctggccttcaatgctgtgctgcaccgccacaagccagacctcttctcctgggacaaggtggtgaagatgagccccatcgagcggctggagcacgccttcagcaaggcccagacctacctgggcatcgagaagctgctggaccctgaagatgtggccgtgcagctgcctgacaagaagagcatcatcatgtacctgaccagcctgtttgaggtgctgccccagcaggtgaccattgatgccatccgggaggtggagaccctgcccaggaagtacaagaaggaatgtgaggaggaggccatcaacatccagagcacagcccctgaggaggagcacgagagccccagggctgagacccccagcacagtgacagaggtggacatggacctggacagctaccagatcgccctggaggaggtgctgacctggctgctgtctgctgaggacaccttccaggagcaggatgacatcagtgatgatgtggaggaggtgaaggaccagtttgccacccatgaggccttcatgatggagctgacagcccaccagagctctgtgggctctgtgctgcaggccggcaaccagctgatcacccagggcaccctgagtgatgaggaggagtttgagatccaggagcagatgaccctgctgaatgcccgctgggaggccctgcgggtggagagcatggaccggcagagccggctgcatgatgtgctgatggagctgcagaagaagcagctgcagcagctgagcgcctggctgaccctgacagaggagcgcatccagaagatggagacctgccccctggatgatgatgtgaagagcctgcagaagctgctggaggagcacaagagcctgcagagcgacctggaggccgagcaggtgaaggtgaacagcctgacccacatggtggtgattgtggatgaaaattctggagagagcgccacagccatcctggaggaccagctgcagaagctgggggagcgctggacagctgtgtgccgctggacagaggagcgctggaaccggctgcaggagatcaacatcctgtggcaggagctgctggaggagcagtgcctgctgaaggcctggctgacagagaaggaggaggccctgaacaaggtgcagaccagcaacttcaaggaccagaaggagctgtctgtgtctgtgcggcggctggccatcctgaaggaggacatggagatgaagaggcagaccctggaccagctgtctgaaattggccaggatgtgggccagctgctggacaacagcaaggccagcaagaagatcaacagcgacagcgaggagctgacccagcgctgggacagcctggtgcagaggctggaggacagcagcaaccaggtgacccaggccgtggccaagctgggcatgagccagatcccccagaaggacctgctggagaccgtgcgggtgcgggagcaggccatcaccaagaagagcaagcaggagctgcccccacctcctccacccaagaagaggcagatccacgtggacatcgaggccaagaagaagtttgatgccatctctgctgagctgctgaactggatcctgaagtggaagacagccatccagaccacagagatcaaggagtacatgaagatgcaggacaccagcgagatgaagaagaagctgaaggccctggagaaggagcagcgggagcgcatccccagggcagatgagctgaaccagacaggccagatcctggtggagcagatgggcaaggagggcctgcccacagaggagatcaagaatgtgctggagaaggtgagcagcgagtggaagaatgtgtcccagcacctggaggacctggagaggaagatccagctgcaggaggacatcaatgcctacttcaagcagctggatgagctggagaaggtgatcaagaccaaggaggagtgggtgaagcacaccagcatcagcgagagcagccggcagagcctgcccagcctgaaggacagctgccagcgggagctgaccaacctgctgggcctgcaccccaagattgagatggcccgggccagctgcagcgccctgatgagccagcccagcgccccagactttgtgcagaggggctttgacagcttcctgggccgctaccaggccgtgcaggaggccgtggaggaccggcagcagcacctggagaatgagctgaagggccagcccggccacgcctacctggagaccctgaagaccctgaaggatgtgctgaatgacagcgagaacaaggcccaggtgtccctgaatgtgctgaatgacctggccaaggtggagaaggccctgcaggagaagaagaccctggatgagatcctggagaaccagaagccagccctgcacaagctggccgaggagaccaaggccctggagaagaatgtgcacccagatgtggagaagctgtacaagcaggagtttgatgatgtgcagggcaagtggaacaagctgaaggtgctggtgtccaaggacctgcacctgctggaggagatcgccctgaccctgcgggcctttgaagctgacagcaccgtcatcgagaagtggatggatggagtgaaggacttcctgatgaagcagcaggccgcccagggagatgatgctggcctgcagaggcagctggaccagtgcagcgcctttgtgaatgaaattgagaccatcgagagcagcctgaagaacatgaaggagattgagaccaacctgcggagcggccctgtggccggcatcaagacctgggtgcagacccggctgggggactaccagacccagctggagaagctgagcaaggagatcgccacccagaagagccggctgtctgagagccaggagaaggccgccaacctgaagaaggacctggccgagatgcaggagtggatgacccaggccgaggaggagtacctggagcgggactttgagtacaagagccctgaggagctggagagcgctgtggaggagatgaagagggccaaggaggatgtgctgcagaaggaggtgcgggtgaagatcctgaaggacaacatcaagctgctggccgccaaggtgcccagcggcggccaggagctgaccagcgagctgaatgtggtgctggagaactaccagctgctgtgcaaccgcatccggggcaagtgccacaccctggaggaggtgtggagctgctggattgagctgctgcactacctggacctggagaccacctggctgaacaccctggaggagaggatgaagagcacagaggtgctgcctgagaagacagatgctgtgaatgaggccctggagagcctggagagcgtgctgcggcaccctgctgacaacagaacccagatccgggagctgggccagaccctgattgatggcggcatcctggatgacatcatcagcgagaagctggaggccttcaacagccgctatgaggacctgagccacctggccgagagcaagcagatcagcctggagaagcagctgcaggtgctgcgggagacagaccagatgctgcaggtgctgcaggagagcctgggggagctggacaagcagctgaccacctacctgacagacagaattgatgccttccaggtgccccaggaggcccagaagatccaggccgagatcagcgcccacgagctgaccctggaggagctgcggaggaacatgaggagccagcccctgaccagccctgagagcaggacagcccggggcggcagccagatggatgtgctgcagaggaagctgcgggaggtgtccaccaagttccagctgttccagaagccagccaactttgagcagaggatgctggactgcaagagggtgctggatggagtgaaggccgagctgcacgtgctggatgtgaaggatgtggaccctgatgtgatccagacccacctggacaagtgcatgaagctgtacaagaccctgtctgaggtgaagctggaggtggagaccgtcatcaagacaggccgccacatcgtgcagaagcagcagacagacaaccccaagggcatggatgagcagctgaccagcctgaaggtgctgtacaatgacctgggcgcccaggtgacagagggcaagcaggacctggagcgggccagccagctggccaggaagatgaagaaggaggccgccagcctgtctgagtggctgagcgccacagaaacagagctggtgcagaagagcaccagcgagggcctgctgggggacctggacacagagatctcctgggccaagaatgtgctgaaggacctggagaagaggaaggctgacctgaacaccatcacagagagcagcgctgccctgcagaacctgattgagggcagcgagcccatcctggaggagcggctgtgtgtgctgaatgccggctggagccgggtgaggacctggacagaggactggtgcaacaccctgatgaaccaccagaaccagctggagatctttgatggaaatgtggcccacatcagcacctggctgtaccaggccgaggccctgctggatgaaattgagaagaagcccaccagcaagcaggaggagatcgtgaagaggctggtgtctgagctggatgatgccaacctgcaggtggagaatgtgcgggaccaggccctgatcctgatgaatgcccggggcagcagcagccgggagctggtggagcccaagctggccgagctgaacagaaactttgagaaggtgtcccagcacatcaagagcgccaagctgctgattgcccaggagcccctgtaccagtgcctggtgaccacagagacctttgagaccggggtgcccttcagtgacctggagaagctggagaatgacatcgagaacatgctgaagtttgtggagaagcacctggagagcagtgatgaagatgagaagatggatgaggagagcgcccagatcgaggaggtgctgcagagaggagaggagatgctgcaccagcccatggaggacaacaagaaggagaagatccggctgcagctgctgctgctgcacacccgctacaacaagatcaaggccatccccatccagcagaggaagatgggccagctggccagcggcatccgcagcagcctgctgcccacagactacctggtggagatcaacaagatcctgctgtgcatggatgatgtggagctgagcctgaatgtgcctgagctgaacacagccatctatgaggacttctccttccaggaggacagcctgaagaacatcaaggaccagctggacaagctgggggagcagattgctgtgatccacgagaagcagccagatgtgatcctggaggccagcggccctgaggccatccagatccgggacaccctgacccagctgaatgccaagtgggaccgcatcaacaggatgtacagcgacaggaagggctgctttgaccgggccatggaggagtggaggcagttccactgtgacctgaatgacctgacccagtggatcacagaagctgaggagctgctggtggacacctgtgcccctgggggcagcctggacctggagaaggcccgcatccaccagcaggagctggaggtgggcatcagcagccaccagcccagctttgctgccctgaacagaactggagatggcatcgtgcagaagctgagccaggctgatggcagcttcctgaaggagaagctggccggcctgaaccagcgctgggatgccatcgtggccgaggtgaaggaccggcagccccggctgaagggggagagcaagcaggtgatgaagtaccgccaccagctggatgagatcatctgctggctgaccaaggccgagcacgccatgcagaagaggagcaccacagagctgggggagaacctgcaggagctgcgggacctgacccaggagatggaggtgcatgctgagaagctgaagtggctgaacagaacagagctggagatgctgagtgacaagagcctgagcctgcctgagcgggacaagatcagcgagagcctgaggacagtgaacatgacctggaacaagatctgccgggaggtgcccaccaccctgaaggagtgcatccaggagcccagctctgtgtcccagaccagaattgctgcccaccccaacgtgcagaaggtggtgctggtgtcctctgccagtgacatccctgtgcagagccacaggaccagcgagatcagcatcccagctgacctggacaagaccatcacagagctggccgactggctggtgctgattgaccagatgctgaagagcaacatcgtgacagtgggagatgtggaggagatcaacaagacagtgtccaggatgaagatcaccaaggctgacctggagcagaggcacccccagctggactatgtgttcaccctggcccagaacctgaagaacaaggccagcagcagtgacatgaggacagccatcacagagaagctggagcgggtgaagaaccagtgggatggcacccagcacggcgtggagctgcggcagcagcagctggaggacatgatcatcgacagcctgcagtgggatgaccaccgggaggagacagaggagctgatgaggaaatatgaggcccggctgtacatcctgcagcaggcccggcgggaccccctgaccaagcagatcagtgacaaccagatcctgctgcaggagctgggccctggagatggcatcgtgatggcctttgacaacgtgctgcagaagctgctggaggagtatggcagtgatgacaccagaaatgtgaaggagaccacagagtacctgaagacctcctggatcaacctgaagcagagcattgctgaccggcagaatgccctggaggccgagtggaggacagtgcaggccagcagaagagacctggagaacttcctgaagtggatccaggaggccgagaccaccgtgaatgtgctggtggatgccagccaccgggagaatgccctgcaggacagcatcctggcccgggagctgaagcagcagatgcaggacatccaggccgagattgatgcccacaatgacatcttcaagagcattgatggcaaccggcagaagatggtgaaggccctgggcaacagcgaggaggccaccatgctgcagcaccggctggatgacatgaaccagcgctggaatgacctgaaggccaagagcgccagcatccgggcccacctggaggccagcgctgagaagtggaaccggctgctgatgagcctggaggagctgatcaagtggctgaacatgaaggatgaggagctgaagaagcagatgcccatcggaggagatgtgcctgccctgcagctgcagtatgaccactgcaaggccctgcggcgggagctgaaggagaaggagtacagcgtgctgaatgctgtggaccaggcccgggtcttcctggccgaccagcccatcgaggcccctgaggagcccaggaggaacctgcagagcaagacagagctgaccccagaggagcgggcccagaagatcgccaaggccatgaggaagcagagcagcgaggtgaaggagaagtgggagagcctgaatgctgtgaccagcaactggcagaagcaggtggacaaggccctggagaagctgcgggacctgcagggcgccatggatgacctggatgctgacatgaaggaggccgagagcgtgagaaatggctggaagcctgtgggggacctgctgattgacagcctgcaggaccacatcgagaagatcatggccttccgggaggagatcgcccccatcaacttcaaggtgaagacagtgaatgacctgagcagccagctgagccccctggacctgcaccccagcctgaagatgagccggcagctggatgacctgaacatgcgctggaagctgctgcaggtgtctgtggatgaccggctgaagcagctgcaggaggcccaccgggactttggccccagcagccagcacttcctgagcacctctgtgcagctgccctggcagaggagcatcagccacaacaaggtgccctactacatcaaccaccagacccagaccacctgctgggaccaccccaagatgacagagctgttccagagcctggccgacctgaacaacgtgcgcttcagcgcctacagaacagccatcaagatccggcggctgcagaaggccctgtgcctggacctgctggagctgagcaccaccaatgagatcttcaagcagcacaagctgaaccagaatgaccagctgctgtctgtgcctgatgtgatcaactgcctgaccaccacctatgatggcctggagcagatgcacaaggacctggtgaatgtgcccctgtgtgtggacatgtgcctgaactggctgctgaatgtgtatgacaccggccgcacaggcaagatccgggtgcagagcctgaagattggcctgatgagcctgagcaagggcctgctggaggagaagtaccgctacctgttcaaggaggtggccggccccacagagatgtgtgaccagaggcagctgggcctgctgctgcatgatgccatccagatcccccggcagctgggggaggtggccgcctttggaggcagcaacatcgagcccagcgtgcgcagctgcttccagcagaacaacaacaagccagagatctctgtgaaggagttcatcgactggatgcacctggagccccagagcatggtgtggctgcctgtgctgcaccgggtggccgctgctgagacagccaagcaccaggccaagtgcaacatctgcaaggaatgtcccatcgtgggcttccgctaccgcagcctgaagcacttcaactatgatgtgtgccagagctgcttcttcagcggccgcacagccaagggccacaagctgcactaccccatggtggagtactgcatccccaccaccagcggggaggatgtgcgggacttcaccaaggtgctgaagaacaagttccgcagcaagaagtactttgccaagcacccccggctgggctacctgcctgtgcagacagtgctggagggggacaacctggagacccccatcaccctcatctccatgtggccagagcactatgaccccagccagagcccccagctgttccatgatgacacccacagccgcatcgagcagtatgccacccggctggcccagatggagaggaccaacggcagcttcctgacagacagcagcagcaccactggatctgtggaggatgagcacgccctgatccagcagtactgccagaccctgggcggggagagccctgtgtcccagccccagagccctgcccagatcctgaagtctgtggagcgggaggagcggggggagctggagcgcatcatcgctgacctggaggaggagcagaggaacctgcaggtggagtatgagcagctgaaggaccagcacctgcggcggggcctgcctgtgggcagccccccagagagcatcatcagcccccaccacaccagcgaggacagcgagctgattgctgaggccaagctgctgcggcagcacaagggccgcctggaggccaggatgcagatcctggaggaccacaacaagcagctggagagccagctgcaccggctgcggcagctgctggagcagcctgagagtgacagccgcatcaatggagtgagcccctgggccagcccccagcacagcgccctgagctacagcctggaccctgatgccagcggcccccagttccaccaggccgccggggaggacctgctggcccctcctcatgacaccagcacagacctgacagaggtgatggagcagatccacagcaccttccccagctgctgccccaacgtgcccagccggccccaggccatgtag

SEQ ID NO: 170487 - DNA, 144 bp, Artificial Sequence
  derived and/or modified sequence
atggccaagtacggggagcacgaggccagcccagacaatggccagaatgagttcagtgacatcatcaagagcagaagtgatgagcacaatgatgtgcagaagaagaccttcaccaagtggatcaatgcccgcttcagcaagtag

SEQ ID NO: 170488 - DNA, 3069 bp, Artificial Sequence
  derived and/or modified sequence
atggccaagtacggcgagcacgaggccagccccgacaacggccagaatgaattctccgacataatcaagagcaggtccgatgaacataacgacgtgcagaaaaagacattcacaaagtggatcaacgcccgtttctcgaagtcgggcaaacccccgatcaacgacatgttcactgacctcaaggacgggcgtaagctactggacttgctggagggtctgacaggcacgagcttacccaaagaaaggggaagtacccgggtccacgctctaaacaatgtgaatcgggtgttacaggtattgcatcagaataacgtcgagttggtgaatataggtggaactgacatcgtggacggaaatcacaaattgacactgggcctgctatggtctatcattctgcattggcaggtgaaagacgtgatgaaagatgttatgtcggacctacagcagactaattcagagaagatattactgtcctgggtcaggcagacaaccagaccatattcacaggtgaacgtcctaaacttcactacctcttggacagacggattggctttcaacgccgtgttgcaccggcacaagccagatctttttagctgggataaagtggtgaagatgtccccaatagaacgactggagcacgcgttctcaaaggcgcagacgtatctcggaatcgagaagctcctcgatcctgaggacgtagctgtgcaacttccagacaagaaaagtatcataatgtatctcacaagcctgttcgaggtcctcccccagcaggtgaccattgacgccataagggaggtagagaccctgccccgtaagtataagaaggagtgtgaggaggaggctatcaacatccagtccactgcaccggaggaggagcacgagagcccccgcgctgaaacgccatctactgtgactgaagtggacatggacctggattcctaccagatcgccttggaggaggtgctgacctggctgctgagcgcagaagacacatttcaggagcaggatgacatcagcgatgacgtggaagaggtaaaggatcagttcgcaacccacgaggcgttcatgatggaacttacagcccaccagagcagcgtcggatcagtcctgcaggccggcaaccagttaattacgcagggtacactgagtgatgaggaagagtttgagatccaggagcagatgactttgctgaacgcccggtgggaagctctgagggtggagtcaatggataggcagtcccggctgcatgacgtgctaatggagcttcaaaagaaacagctgcaacagctgtcagcttggctcaccctcacggaggagagaatccagaagatggagacctgcccgttagacgacgacgttaaaagcttacagaaattgctggaggagcacaaatctctgcaatccgatctcgaggccgaacaagtgaaggtgaactcgctaacccacatggtcgtgattgtggacgaaaacagcggagagagcgcaactgccatcttagaggaccagctgcagaaactaggggaacgctggacggcagtgtgcaggtggactgaggaaagatggaacaggctgcaggagattaacatactgtggcaagaactactggaagagcagtgtctcctcaaggcctggctgacggagaaggaggaagctctgaacaaagtacagacatctaacttcaaggaccagaaagaactctccgtcagcgtgcgcaggctagccatattaaaagaagatatggagatgaaaagacagacactcgatcagctcagtgagatcggccaggatgtcggacagttacttgataactctaaggcttccaagaagatcaatagtgacagcgaggagctgacccagcgctgggacagtctagtgcagcgccttgaagactcctctaatcaagtgacacaggcagtcgcaaagctaggcatgagccagataccacaaaaggacctcctcgaaacggttcgtgttagggaacaggctatcaccaagaaatcaaagcaggaactgcctcctccacctcctccaaaaaaaaggcagatccatgtggacattgaggctaagaaaaagttcgatgccatcagcgccgagttgctaaattggatcttgaaatggaagaccgcaattcagaccactgaaatcaaagagtacatgaaaatgcaggataccagcgagatgaagaaaaagctcaaggcactggagaaagaacaacgcgaacgcatccctagggccgacgagttaaatcaaaccgggcagattctcgttgaacagatgggtaaggaaggcctgcccaccgaggagattaaaaacgtccttgaaaaggtgtccagtgagtggaagaacgtctctcagcacctcgaagacctcgaaaggaagattcagctgcaagaggacattaatgcatacttcaaacagctcgacgagctggagaaggtgatcaaaactaaagaagagtgggtcaagcacacttccatcagcgagagctcaaggcaaagcctgccgtcacttaaagattcatgccagcgcgagctaactaatctgctgggactccatccaaagattgaaatggcccgggcttcttgttcagctctcatgtctcagcctagcgccccagacttcgtccagcgtggctttgactctttccttgggcgatatcaggcggttcaggaagcagttgaggacagacagcaacaccttgagaatgagctcaagggacagcctggccacgcctatttggagactctgaaaacacttaaggacgtgcttaacgattccgagaataaggcacaagtaagtctcaacgtcctgaatgacctggccaaggtggaaaaagcccttcaggaaaagaagactttagatgagatcctggagaatcagaagcccgccctgcataaactagcagaagaaactaaggctttggagaaaaacgtgcatccggacgtggaaaagctctataagcaggaatttgatgatgttcaaggaaagtggaacaagctgaaagtgctagtctcaaaggacttacatctgctagaggaaatcgctctaacactgagagcattcgagtag

SEQ ID NO: 170489 - DNA, 10302 bp, Artificial Sequence
  derived and/or modified sequence
atggccaagtacggcgagcacgaggccagccccgacaacggccagaatgaatttagcgacatcatcaaatccagaagtgatgaacacaatgacgttcagaaaaagacgttcactaagtggattaatgctaggttttctaagtcaggcaagccgcccattaatgacatgttcaccgacctgaaagacgggagaaagttactggacttgcttgaaggactgacaggtacatccctgcctaaggagcgtggcagcaccagagttcatgccctaaacaatgtcaatagagtactgcaggtcctacaccagaacaatgtggaactagtcaatatcggagggactgatatagtggatggcaatcataaactgacactgggccttctctggagtatcattctccactggcaggtaaaagatgtgatgaaagatgtgatgagcgacctacaacagaccaactcagagaaaattcttctgtcttgggtgagacagactactaggccttactcccaggtgaatgttctcaatttcaccacttcttggaccgacggcttggcctttaacgctgtgcttcacaggcataagccagatttgttctcgtgggacaaggtcgtgaagatgagtccaattgagcgcctcgagcatgcattttctaaagcacagacttatttgggtattgaaaaacttttagaccctgaggatgtcgcagtgcagctcccggataagaaatctatcatcatgtacctcactagcttatttgaggtgctcccccagcaagtgacaatcgacgccattcgggaggtggaaactcttccaagaaaatataagaaggaatgcgaggaagaggccattaacatccaatccacagcgccggaggaagagcacgagagccctcgcgcagaaactccttcgacagtgacagaagtcgatatggatcttgattcgtaccagatagcccttgaggaggtactgacctggctgctgtctgcagaagacacctttcaggagcaagacgatatcagcgatgacgttgaagaagtgaaggaccagttcgccacacatgaagcatttatgatggaactaaccgcacatcagagctcagtaggcagcgtcctccaggcaggaaaccagcttatcacccagggtaccctcagcgatgaggaggagttcgaaatacaagaacagatgactctcctgaacgctagatgggaagcactgcgtgtagagtccatggaccggcagtcccgattacatgacgtgcttatggaacttcagaagaaacagcttcagcagttgagcgcatggctcacacttacagaagaacgcatccagaagatggaaacttgcccgcttgatgacgatgtaaagtccttgcagaagttgttagaagagcacaagtcactgcagtctgatctggaagcagagcaggttaaagtgaacagcctgacccatatggtcgtgatcgtagacgagaattccggtgaatctgccactgccatactggaggaccagctacagaagctgggcgaacgatggacagccgtgtgtcgctggaccgaggaaaggtggaataggttgcaggaaataaatattctgtggcaggagctgctggaggagcagtgtttgctcaaggcatggctgaccgaaaaggaggaagctctaaataaggtacaaactagcaatttcaaggatcagaaagagctctccgtgtcagtgcgcagactggcaatattgaaagaggatatggaaatgaaacggcaaactcttgatcagctgtccgaaattgggcaggacgtcgggcagctcctggacaactcaaaggcatctaaaaagattaattccgactcagaggagctgacccaacggtgggacagcctcgttcagaggttggaggacagctccaatcaagtcacccaggccgttgcaaagcttggcatgagccaaatcccccaaaaggatttgttggagaccgtgcgggttcgtgaacaggcaataactaaaaagtcaaagcaagaacttccgccaccccctcccccaaaaaagcggcagatccatgtggacatcgaagccaagaaaaaatttgatgccatcagcgcggaactgctgaattggatattgaaatggaagactgcgatccagaccaccgaaataaaagaatatatgaagatgcaggatacctcagagatgaaaaaaaagctaaaagcactggagaaagaacagagggagaggattccacgcgctgacgagctcaatcagacaggacagattctcgtcgaacagatggggaaggaaggtctgccaaccgaggagatcaaaaatgttttagaaaaagtgtcttcagagtggaaaaacgtctctcagcacctcgaagacctggaacggaaaatccagctgcaggaggatatcaatgcctattttaagcagctggacgaactggaaaaggtcataaagaccaaggaggagtgggtgaaacacacctccataagcgagtcctctcgacaatcactgccctcactcaaggactcctgccagcgcgaactcaccaatctactagggttacatcctaagattgagatggcacgcgcttcttgttcagcccttatgtcgcaaccctctgccccggactttgtccagcgtggttttgacagtttcttgggccgttatcaggccgtccaagaagcagtcgaagaccgacagcagcacctggagaacgagctgaaggggcagccgggtcatgcttatcttgagacactcaagaccttaaaggacgtgctgaatgactccgaaaataaggcgcaggtttctctcaacgtgttaaacgacttggccaaggtggaaaaggcactccaagagaaaaagaccttagatgagattcttgaaaatcagaagccggctctgcacaagctggcagaagagaccaaggcactggaaaagaatgtgcatcctgacgtggaaaaattgtataaacaggaattcgatgacgtgcaggggaaatggaacaaattgaaagtgctagtcagtaaggacctgcacttgctggaagaaatcgcgctgaccctgcgcgcctttgaggctgattctaccgtgattgagaaatggatggatggtgtgaaagatttcctcatgaaacagcaagccgcccagggggatgatgccgggcttcagcggcagctcgaccaatgcagcgccttcgtgaacgaaattgagacaattgagtcgtctcttaaaaacatgaaagaaattgaaacaaacctccgatcaggccccgtggctggtattaagacctgggtccagacaaggctgggggactatcaaacacagctggagaaactgtccaaagagattgcgacccagaagtctcgcttgtccgagtctcaggagaaagccgccaatctgaaaaaagaccttgccgagatgcaggaatggatgacccaggcagaggaagagtacctagagcgcgacttcgaatataagtcccccgaggagctggaatccgccgtggaagagatgaagcgcgcaaaagaggacgtgctgcaaaaagaggtccgcgtgaagatccttaaagataacatcaagctgctggcagccaaggtcccctctggaggccaggaacttacatcggagttgaacgtggttctggagaactatcaattactctgtaatagaattcgcgggaagtgccacactctagaggaggtgtggtcctgttggatcgagcttctacactacctggatctggaaacaacatggctgaacactctggaggagaggatgaagagtaccgaagtcctgcccgagaaaacagacgccgttaacgaggccctcgaaagtttggagtcagtgttgcgccaccccgcagacaacaggactcagatccgagagctcggccaaacactcatcgacggcggcatcctagatgatatcatcagcgaaaagttggaagctttcaacagccggtatgaggacctgtcacacctggcagaatctaagcagatctcactggagaaacagctgcaagtcctgcgggagaccgatcaaatgttgcaagtgcttcaagagagtttgggcgagttagacaagcagctgaccacgtacctgaccgatagaatcgacgccttccaggtaccccaggaagcccagaaaattcaagctgagatttccgcccatgaactgaccctggaggagttgcgacgaaatatgagatcacagcccttgaccagcccagagtctaggacagccagaggcggatcacagatggacgttctgcagcgaaaactgagggaggtgagtaccaagttccagctgttccagaaaccagcaaacttcgaacagcgaatgctggactgcaagagggtgctcgatggcgtcaaagcagagttgcatgtcctggatgtaaaagacgtggatcctgacgtgatccagactcatctggacaaatgcatgaaactctacaagactctgagtgaggtgaaactagaggtggaaaccgtcattaagaccggacggcacattgtgcagaagcagcagaccgacaatcccaaggggatggatgagcaattaacttccctgaaagtgctctacaacgacctaggcgcgcaggtgaccgaaggcaaacaggatctggaaagggcctcacagctggcaaggaagatgaaaaaagaggccgctagtcttagcgagtggctgtccgcaacagagaccgaactggtgcagaaatcaacatccgaaggtctgctgggcgacttggatacagagatatcatgggcaaaaaacgtcctcaaggatctggaaaaaagaaaagctgacttgaacacaatcacagaatcttctgctgctttacagaatctgatagaaggttctgaaccaattcttgaagagagactgtgcgtcctcaacgctggctggtcccgagtcagaacatggactgaagattggtgcaatacactgatgaatcaccaaaatcagctcgagatttttgacggcaatgttgctcacattagtacttggctataccaagctgaggcgctgttagatgagatcgaaaaaaagcccaccagtaagcaagaggaaatagtgaagaggttggtgtctgagctcgatgacgccaatttgcaggtggagaacgtccgtgaccaggcccttattctgatgaacgccaggggcagctctagccgcgagctggtcgagcccaagctggcagagctgaaccgaaacttcgagaaggttagccagcacattaagtcagcaaagctgttaattgcacaagaacctctctaccagtgccttgtcaccaccgagaccttcgagaccggcgtaccattcagcgatctagagaagcttgagaatgatatcgagaacatgctgaaatttgtggagaagcacctggagtctagtgacgaggatgagaaaatggacgaggagagcgcacagatcgaagaggtgcttcagcggggagaagagatgctgcaccaaccaatggaagacaacaaaaaagagaaaatcaggctgcagttacttttgcttcatacgcggtacaacaagattaaggcgatccctattcaacaacgcaagatggggcaactggcgtcaggaatccgctcctccctgctgcccacagattacctagtggaaataaacaaaatcctactgtgtatggatgacgtggaactgtctctcaatgtgcccgaactcaacacggccatttatgaagatttttcttttcaggaagattctctgaagaacatcaaggaccagttagacaaactaggagaacagattgctgtcattcacgagaaacaacccgacgttatcctggaagcctctgggccggaggctatacagatacgcgataccctgactcaattgaatgccaagtgggaccggataaatcgcatgtactcagatcgcaagggatgcttcgaccgagccatggaggagtggcgccagtttcactgcgaccttaacgatctcacccagtggattacggaggcagaagaactcttggtcgacacctgtgcaccgggtggttcgctcgacttggaaaaggctaggattcaccagcaggaactagaagtgggcatctccagtcaccaaccaagtttcgcagccttgaacagaacaggagacgggattgtgcagaagctttcccaggccgatggatcttttctaaaagagaaactagccggactgaaccagaggtgggatgctatagtggcagaggtgaaggaccgtcagccgagactcaagggggaaagcaagcaagtaatgaaatatcgccaccagctcgacgagattatttgctggctcactaaagcagagcatgcgatgcagaaacgcagtacgaccgaattaggtgagaatttgcaagagctgcgcgatctgacacaggagatggaagtgcatgcagaaaaactgaagtggctgaatcggacagaattagaaatgctgtcagacaagtcactgagtcttccagagagggataaaatctctgaatctttgaggacagtgaacatgacctggaacaaaatatgccgcgaggtgccaactaccctgaaggagtgtattcaggaaccatcatctgtgagtcagacaagaattgcagctcaccccaacgtccagaaggtcgtactggtgagctctgcctcagacatccccgtgcagtcccacaggacctcggaaataagtatacctgcagacctggacaaaaccatcaccgagctggcagattggctggtgctgattgaccaaatgttgaaaagcaatatcgtgaccgtgggcgatgtggaagagattaacaagaccgtctcccgtatgaagataaccaaggctgacctggagcagaggcatccgcagctagattatgtctttaccctagcccagaatctgaagaacaaggccagttccagcgatatgcggaccgcaataacagaaaaactggagcgggtcaagaatcagtgggacggtacacagcacggtgtggaactccgccagcagcagctcgaagatatgataatcgactcattacagtgggacgatcaccgggaagagactgaggagttgatgaggaaatacgaagccagactctatattctgcagcaggcaaggcgcgaccctctgacgaagcaaatttcggataatcagattcttttgcaggaactgggccctggtgacgggatcgtgatggccttcgataatgtgttacagaagctgcttgaggaatacggatctgatgatacacgtaatgtaaaggaaacgaccgaatatcttaaaaccagttggattaacctcaaacaatctatcgccgacagacagaatgctttagaagcggagtggagaactgtgcaggccagtagacgcgacctggagaattttctcaagtggatccaggaggccgaaactactgtcaacgtcctcgtagacgccagtcatagggagaacgctctgcaggattccatactggcccgggagcttaaacagcaaatgcaggatattcaggccgagatcgatgcccacaatgacatattcaaatctatcgacggcaaccggcaaaaaatggtcaaggccctcggaaactctgaggaagccacaatgcttcagcacaggcttgacgacatgaaccagcgctggaacgaccttaaggccaagagtgcttcaataagagcacacttggaagcctccgctgagaagtggaaccgacttctcatgagtttggaagagctgatcaagtggttgaacatgaaggacgaggaattgaagaagcagatgcccatcggaggtgacgtccctgctctgcaactccagtacgatcattgtaaggccctgcggcgggagcttaaagagaaggagtactcagttctgaatgctgtggaccaggctcgcgtttttctcgccgatcaaccaattgaagcacccgaagagcccaggagaaacctccaaagcaaaaccgaactgacccctgaggagagagcccagaagatcgcgaaggctatgcgcaaacagagttccgaggtaaaagagaagtgggaatctctcaacgccgtcacctctaattggcagaaacaggtggataaggccttagagaagctgcgcgatcttcagggcgctatggatgacctggatgctgatatgaaggaggctgaatcagttcggaatggctggaaacccgtcggcgacctccttattgatagtttacaagatcatattgagaaaatcatggcttttcgagaagagatcgccccaatcaacttcaaggtgaaaacagttaatgacctgtcctctcagctatctcccctggatctgcacccgtctttaaaaatgagtaggcagctggacgatttgaatatgagatggaaacttttacaggtatcagtggacgacagattgaagcagctgcaggaggcacatcgagattttggtcctagtagccagcacttcttaagtacttctgtgcagttgccatggcagcgatccatttcccacaacaaagtgccctattatataaaccaccagacccagacaacctgttgggatcatcccaaaatgaccgagctatttcagagtctcgccgacctgaataacgtgagatttagcgcatacagaaccgcaattaaaattcgtcggcttcaaaaggcactctgcttggatctgttagaactctccaccactaacgaaatcttcaaacagcataagctgaaccaaaacgaccaattgctctctgtgcccgacgtgatcaactgtctcactaccacttacgacggactcgagcagatgcataaagatctcgtgaacgtgcccctttgtgtcgatatgtgtctgaactggcttcttaatgtctatgacactggccgcactggaaaaatcagagtccagtccttgaaaatcggcctcatgtccctgagtaaaggcttattagaggaaaagtatcgctatcttttcaaagaggtcgcagggcccaccgagatgtgcgaccagcgccagcttgggctactgttgcacgacgccattcagattccacgccagctaggagaagtagccgcatttggaggctctaatatcgaaccatcagtccgctcttgcttccagcaaaataacaataagcctgaaatctccgtaaaagagtttattgactggatgcatttagagccgcagtccatggtatggttacctgtcctccatcgagttgcagcagctgaaaccgccaagcaccaggccaaatgcaatatttgtaaagaatgtcctatcgttggattcaggtacaggagcttgaaacatttcaattacgatgtgtgtcagtcttgttttttctctggaagaaccgccaagggccacaaactgcactatcctatggttgagtattgcatacctacaaccagcggcgaagacgtgcgagacttcacaaaagtcctgaagaacaagttcaggagtaagaagtattttgccaagcacccccgcctgggctacctgcccgttcagacagtcttagagggcgataacttggagactcctattaccctcatctctatgtggcccgagcactatgacccatcacagagcccacaactgttccatgatgacacgcattcacggatcgagcaatatgcaaccaggctcgcccaaatggaacgtactaatggctccttcctcacggattcctcaagcaccaccggctcagttgaggacgagcacgctctgatacaacaatattgtcagacgctcggaggtgagtctcccgtgagccagccccagtcgcccgctcagatcctgaagtctgttgagagggaggagcggggggagttggagaggatcatcgccgacctagaggaagagcaacgaaacttgcaggtcgagtatgagcagcttaaggatcaacacctgcgccggggactacctgttggaagtcccccagagtcgattatctcccctcaccatacttctgaagatagtgagctcattgctgaagcaaagctcctgcgccagcataagggccgtcttgaggcaaggatgcaaatcctggaagaccacaacaagcagctggaaagccagttgcataggctgcggcagctgctcgaacaaccagagagcgactcgcgcataaacggagtcagcccctgggcatccccacagcatagcgctctctcttactcattagaccctgatgctagcggcccccagtttcatcaagccgcaggtgaggacctgctggccccgccccacgatacttcaaccgatctgaccgaggtgatggagcagatccattccacttttccctcatgctgtccaaacgtgccctcacgcccccaggccatgtag

SEQ ID NO: 170490 - DNA, 144 bp, Artificial Sequence
  derived and/or modified sequence
atggccaagtacggcgagcacgaggccagccccgacaacggccagaacgaatttagtgatattattaagtcaaggtccgatgaacacaacgacgtgcagaaaaagaccttcactaagtggattaatgctcgcttcagcaaatag

SEQ ID NO: 170491 - DNA, 3069 bp, Artificial Sequence
  derived and/or modified sequence
atggctaagtacggagagcacgaagcctctcctgataatggtcagaatgagtttagcgacattattaagagccgcagtgatgaacacaatgatgtccagaaaaagacctttacaaagtggatcaatgcaaggttctcaaagtcagggaagccccctattaacgacatgtttaccgatctcaaggatgggaggaagctcttggacctgctcgaggggctcacaggaaccagtctccctaaggagagggggtcgactcgtgtgcatgcgctgaacaacgttaatagagtgctccaggtcttgcaccagaataatgtagaacttgtgaacatcggaggaactgatatagtggatggcaaccacaaactcaccctgggtctcctgtggtctattatacttcactggcaagtaaaggatgtgatgaaggatgtcatgagcgatctgcagcagactaattcagaaaagatcctcctgtcctgggtgcggcaaactaccaggccatacagccaggtaaacgtccttaacttcacaacctcatggactgatggtttggccttcaatgcggttctgcacaggcataagccggacctcttctcctgggacaaggtcgtaaagatgagccctatcgagagacttgagcacgcctttagtaaagcccagacttacctcggtattgagaagcttctggatcctgaagacgtcgctgtgcagttacccgataagaagagtattatcatgtacctgacctccctcttcgaggtcctgccacagcaagtgaccattgacgccatcagagaagtagagaccctgccaaggaagtacaaaaaggaatgcgaggaggaagccataaacatccagtccacagcccctgaggaggagcacgaaagcccgagagccgaaaccccttccactgtcacggaagtcgatatggatctagatagttatcagatcgccctcgaagaggtgttgacttggctcctgagcgccgaggacacattccaggaacaggacgacatctcggacgatgtagaggaagttaaggatcagttcgcaacccacgaggccttcatgatggagctaacagcccaccaaagcagcgtgggctcggttctgcaggccggaaatcagttaattactcagggaactctctctgatgaagaggaattcgaaattcaggagcagatgaccttacttaatgccagatgggaagcgttgcgtgtggagagtatggatcggcagtcccggctacacgacgtactaatggagttgcagaagaagcagttgcagcagctgtctgcttggctgaccctgacagaagagagaattcagaaaatggagacctgccctttagacgacgatgtcaaaagcttacaaaaacttctggaggaacacaaaagcctgcagtccgacctcgaagccgagcaggtgaaggttaatagcctgacacatatggtagttatcgtggatgagaactcaggagagtcagctaccgctattctggaggatcagttgcagaagctaggggagaggtggactgccgtttgtcgctggacagaggagagatggaatcgcttgcaggaaatcaacatcctctggcaagagttgttagaggaacagtgtctcctgaaagcctggcttacagaaaaggaggaggcgctcaataaggtgcagactagtaactttaaggaccagaaagagctgagcgtctcggtgcgaagacttgccattctgaaagaggatatggagatgaagcgccaaacgttggatcagctgtctgaaataggccaggacgtcggccagctgctggacaattctaaggcgtctaagaaaattaactccgatagcgaagaattgacccagagatgggattcactggtccagagattagaggattctagtaatcaggttactcaagcggtagccaagttggggatgagccagataccccaaaaggatctcctcgagacagtgcgcgtgagagagcaagctattaccaaaaagtctaagcaggaactgcctcccccaccaccgccaaagaagagacagattcacgtggatatcgaagcgaaaaagaaatttgacgccatctcggccgaattgttgaattggattttgaagtggaagaccgcgatccagacaaccgaaattaaagagtacatgaaaatgcaggatactagcgaaatgaagaagaagctaaaagccctggagaaggagcagagggagcgcatacctagagctgatgagctgaaccagaccgggcagattcttgtcgagcagatgggaaaagagggtctgccaaccgaagagatcaaaaacgtgctggaaaaagtttcaagcgaatggaagaacgtgagccagcatcttgaggacctggagagaaagattcagctgcaagaagatataaacgcgtactttaagcaacttgatgaactagagaaggtaatcaagacaaaagaagaatgggtcaagcatacctcaatttccgagagcagtcggcagtccttacctagccttaaagattcctgtcaaagggagctgaccaatttgttagggctacatccgaaaatagagatggctagggcatcatgttccgcgttaatgtcacaacccagtgctcctgactttgtccagaggggttttgatagctttttgggtcggtaccaggccgttcaggaggctgttgaggaccgccagcagcacttggaaaatgaactaaaaggccaaccgggtcacgcctatcttgagacactgaagaccctgaaggatgttttaaatgattctgagaataaagcacaggttagtttgaatgtcctcaacgacctcgctaaggtggaaaaagcattacaggagaagaagactctggatgagattttggaaaaccaaaagccagccctacataaactagccgaagaaacaaaggccttagaaaagaacgtacatcccgatgtggagaagctttacaagcaggaattcgatgacgtccagggcaagtggaacaaactgaaggtcctcgtgtccaaagacttgcacttgttagaggagattgcgttaacactgcgcgcttttgaatag

SEQ ID NO: 170492 - DNA, 10302 bp, Artificial Sequence
  derived and/or modified sequence
atggccaaatacggagaacacgaggctagtcccgataatgggcaaaatgagttttccgatataatcaaatccagatctgatgaacacaatgatgttcaaaagaaaacattcaccaaatggatcaacgcccgtttcagcaaaagcggaaagccacccattaatgatatgttcaccgacctgaaagacggacgcaaacttttagatctgctcgaaggtctcacggggacttccctgccgaaggaacgaggctccactcgggttcatgccctgaataacgtgaaccgcgtccttcaggtcctccaccagaataatgtcgagttagtgaatataggaggaaccgatatcgtagatggcaatcacaagcttactctcggactgctgtggtcaataattctgcactggcaggtcaaggatgtgatgaaagacgtcatgtccgacttacagcagacaaacagtgagaagatcctcctatcctgggtgcgacagactacgaggccgtattctcaggttaatgtattaaatttcactacaagttggaccgacggactggcatttaatgcggtactccataggcacaagcccgacctgtttagctgggataaggtcgttaagatgtccccaatcgagagactcgagcatgctttttccaaggcccagacctaccttggaatagaaaaacttttagaccctgaggatgtggccgtgcagctgccagacaaaaaatctataattatgtacctgacctctttgtttgaggtgctgccgcagcaggtcaccatcgacgcgatcagggaggtcgaaactctgccaaggaaatacaaaaaggagtgcgaggaagaagcaataaatatccaaagcactgctccagaggaagaacacgagagtccacgagctgaaacgccgagcactgtgaccgaggttgacatggacttagattcctaccagatcgcccttgaagaagtgctcacctggttactgtctgcggaggatactttccaggagcaggatgatatctcagatgatgtcgaggaggtcaaagaccagttcgccactcacgaagccttcatgatggagctgactgcccaccaatccagtgttgggagtgtgctacaagcaggaaaccagctcatcacacaggggacgctgtctgacgaagaagaattcgaaatacaggagcagatgacgctactcaatgcacgatgggaggctcttcgggttgagtccatggatcgacagtctcgactgcacgacgtcctgatggagcttcagaagaaacagctgcagcagctaagcgcttggctgacactgacggaggaacggattcagaagatggaaacctgcccactggacgacgacgtgaagagcctgcagaaactattggaggagcataagtcattacagtctgaccttgaggccgagcaggtgaaggtgaactccctgacccacatggtcgtgattgtagacgaaaacagtggagagagcgccactgctatcctcgaagatcagctccagaagttgggggaacgatggactgccgtgtgtcgttggacggaagaaaggtggaaccggctgcaggagatcaacatcctttggcaagagctgctggaagagcagtgtctgctaaaggcctggctgacagagaaggaggaggcgctgaataaggtacagacttccaatttcaaagaccagaaagaactcagcgtttccgtgcggagactggctatcttaaaggaggatatggagatgaagcgccaaaccctggaccagttgtctgagatcgggcaagatgtggggcagctcctggacaactccaaggctagtaaaaagatcaattccgactccgaagaattgacacagcgctgggacagtctcgtgcagcgtctggaggacagcagcaatcaggtgacccaggccgtggccaaactcggcatgtcccagatcccacagaaagacctgcttgaaacggtgagggtgagagagcaagccattaccaagaagtctaagcaagagctgcctcctcccccaccacctaaaaaaaggcaaatccacgtcgatatcgaggctaagaagaagttcgatgccatttctgccgagctgctaaactggatcctgaaatggaagactgccatccagacgaccgagatcaaagagtacatgaagatgcaggacacatcagagatgaagaagaagttaaaagccttggaaaaagaacagagagagcgtatccccagggcggatgagctgaaccagactggccagatcctggttgagcagatgggcaaagaaggactccccaccgaagagatcaagaacgtcctcgaaaaggtgtcttcggagtggaagaatgtatctcagcatctcgaggatttagagcgcaaaatccaactacaagaggacattaacgcctattttaagcaactcgacgagctggaaaaagtcatcaagaccaaagaagaatgggtgaagcatacatctatctcggaaagctcgcgacagtcactgccaagcctcaaagattcttgccaacgcgagctgactaacttactgggactccaccctaaaatcgagatggcccgagcttcatgctccgccctgatgtcccagccatctgcccctgactttgtgcaacgtggatttgatagctttcttgggcgatatcaggcagtgcaagaagcggtggaagacagacaacagcacctcgagaatgaactcaaagggcagccagggcacgcctacttggagacattaaaaaccctcaaagacgttctcaacgattcagaaaataaagctcaggtgtcgcttaacgtcttgaacgatttggcgaaagtggagaaggctctgcaagaaaagaagaccctggacgagattctcgagaatcaaaagcctgcactacataaactcgccgaagaaaccaaagctctggagaagaatgtgcacccagacgtcgagaaactgtataagcaagagtttgacgatgtccagggcaagtggaacaaactcaaagtactggtgtctaaagatctgcatctgctcgaggaaattgccctcactctgcgagccttcgaagcggactccaccgtgatcgagaagtggatggacggcgtgaaggattttttgatgaaacaacaagccgctcagggagatgacgccggtctgcagcggcagctcgaccagtgttcagccttcgtgaatgagatcgagacaattgagtcctctctgaagaatatgaaggagatagaaacaaatctacgatcaggtcccgtggcagggatcaagacatgggtacagacgcgcctgggtgactaccagacccaactggaaaagctgtcgaaggagatcgccacccagaagagccgtttgtcggagtcccaggaaaaagccgctaatctcaaaaaagacctcgccgaaatgcaggagtggatgacgcaagctgaagaggagtatttggaaagagattttgagtacaaaagtccagaggaactcgagtccgcggtggaagaaatgaagagggcgaaggaggatgtgctgcagaaggaggtcagggtaaagatccttaaggataatattaaactgctcgcggctaaggtgccttccggcggacaggaactaaccagcgaacttaacgtcgtgttagagaactaccagcttctgtgtaacaggatccggggaaagtgtcacacacttgaggaagtgtggagttgttggatcgagctgctacattatcttgatctggagacaacttggctcaacaccctggaagagagaatgaaatcgactgaggttctacctgagaagaccgatgccgtgaatgaggcactggaatctcttgagagtgtgctgcggcacccagcagacaacagaacacaaattcgtgagctgggacagacacttatcgacggaggcattctggatgatataattagcgagaagctggaggcattcaattctcgatacgaggacctctcccatttagctgagagtaagcaaatctcccttgagaagcagctgcaagtccttcgggagacagaccagatgctgcaggttctgcaggaatctctgggagagctggataagcagttgaccacctacctgaccgaccgcattgatgcctttcaggtgccacaagaagcccaaaaaatccaggctgagatcagcgcccacgagctcactctcgaggagctcaggcgcaatatgcgatcccagccactcaccagccccgagtcacgaactgcaagagggggatcccagatggacgtgctgcagcgcaagctgagagaggtaagtactaaatttcagctgttccagaaaccagctaattttgagcagcgaatgctcgactgtaagcgcgtcctcgatggcgtaaaggccgagcttcacgtgcttgatgtcaaggacgtggaccctgacgtcatccaaacccatttagacaagtgcatgaagctttacaaaactctttccgaagtgaagctggaggtggagacagtgatcaagaccggcaggcacatcgttcagaagcaacagactgataaccctaaaggcatggacgaacagttaaccagcctgaaagttctgtacaacgatcttggggctcaggtaacagagggaaagcaggatctcgagagggctagccagttggccaggaagatgaaaaaagaagccgcttcgttatcagaatggctgagcgcaacggagacagaactcgtgcagaagtctacaagtgaaggtctgctaggagacctggacacagagatatcctgggctaagaatgtgctcaaggacctcgagaaacgaaaggcagacttgaacacaatcaccgagtccagcgcggcactccagaatctaattgaaggatcagagcctattctcgaagagagactgtgtgttttaaacgcaggctggtccagggtgcgcacatggactgaggactggtgcaataccctaatgaaccaccaaaatcagctcgagattttcgacggtaacgttgcacacatctctacatggctgtatcaggcggaggcactcctcgacgaaatcgaaaagaagcccacgtcaaagcaggaagaaatcgttaaaagacttgtttcagaactagatgacgctaatctgcaagtggaaaacgtcagggaccaggcactgattttgatgaatgcacgcggttcctcaagccgagagctcgtagagccaaaactggccgagctgaatcggaattttgagaaggtgagccagcatatcaaatctgcaaagctgcttattgcacaagagccattgtatcagtgtttagtgaccaccgagaccttcgagacaggcgtgccattttcagacctggagaagctagaaaatgatattgaaaatatgctgaagtttgtagagaagcatctcgagagctcagacgaagatgagaagatggatgaagaatcagcacagattgaggaggttctccaacgcggagaggaaatgttacatcagcccatggaagacaacaagaaggagaagataaggctgcagctgctgctgctgcacacccgttacaacaaaatcaaggccatacccattcaacagaggaagatgggccagctcgcatccggcatccggagttctcttctgcctaccgattacctggtggaaattaacaaaatccttctttgcatggatgacgtggagctgtcactgaatgtgccggagctgaatacggccatttacgaggatttttcttttcaggaagattctctgaaaaatataaaagaccagctggacaagctgggggaacagattgcggtgatccatgagaaacagccggacgtcatcctggaggcatcaggtcctgaggccatccaaattcgtgacaccttgacgcagttaaatgccaagtgggaccgcattaacagaatgtactctgatcgaaaaggctgttttgatcgggctatggaggagtggaggcagtttcactgcgatctgaacgatctgacccagtggattacagaggctgaagagctgctggtggacacttgtgcccctggaggctcactcgatttagaaaaggcacgcatacaccagcaagaactggaggtaggtatttcaagccatcagccgagcttcgccgcactcaaccggaccggggatggtatagttcagaaactgagccaggccgatgggagtttcctaaaggaaaaactcgcgggtttgaaccagcggtgggacgctatcgttgcggaagtaaaagatcgccagcccaggcttaaaggcgaaagcaaacaggttatgaagtatcgacatcaacttgacgaaatcatttgttggctcaccaaagctgagcatgcgatgcagaaacggagcaccacagagttgggagaaaacctgcaagagttgcgggatctgacccaagagatggaggttcacgccgagaaactgaagtggctgaaccggacggaattggaaatgctttctgacaaatccctgagccttccagaacgagacaaaatttctgaaagcttgcgcacagtgaacatgacatggaataagatctgtagggaggtaccaactaccctgaaggagtgtatccaagagccttccagcgtgagccagactagaatcgcggctcaccccaatgtccagaaagtggtgctggtgagcagtgcctcagacatccccgttcagtcccaccgtacttcagaaatcagcatcccagcggaccttgacaagacaataaccgaactcgcagattggctggttctgattgaccagatgctgaagtctaacattgtgacagtgggagatgtcgaggagattaataagaccgtctcccgcatgaagattaccaaggcggatctcgaacagcgtcacccgcagcttgactacgtattcactttggctcaaaatctgaagaataaggcctcttcttcggacatgagaactgcaattactgaaaagcttgaacgggtgaagaaccagtgggacgggacccagcacggcgtggagctacgccaacaacagctcgaggatatgatcatcgatagcttacagtgggatgaccatcgtgaagagacggaggaacttatgcgaaaatacgaggctcggctctacattctccagcaggcacggcgtgaccccttgacgaagcaaatcagcgacaaccagattctccttcaggagttgggcccaggtgacgggatcgtcatggcattcgacaacgtgttacagaaactcctcgaagagtacggctccgatgacacacgaaacgttaaggagaccacagaatatctgaagacatcatggatcaatctgaagcagtctatcgcagacaggcagaacgcactcgaagccgagtggcgtacagtgcaggcaagccgcagagatcttgagaatttcttgaaatggatccaggaagccgagacaactgtgaacgtgcttgtggatgcaagccatcgtgaaaatgccttgcaggatagcatcttagcacgagaattgaagcagcagatgcaggatatacaggcagaaattgacgctcataacgatatttttaaatctattgacggcaaccgccagaagatggtgaaggccctcgggaatagcgaggaagccaccatgctgcagcatcggttggacgacatgaatcagaggtggaacgatttaaaagcaaagtccgccagcatcagggcgcacctggaagccagtgcagagaagtggaatcgactgctaatgtcgctggaggagctgatcaagtggttgaatatgaaagacgaggagctgaagaagcaaatgcctataggcggagatgtgcccgcactgcagctgcagtatgatcactgcaaagctctgaggcgggaattgaaagagaaagaatacagtgtcttaaacgcagtggaccaagctcgggtgtttctggcagatcagccgattgaggctcctgaagaaccacggagaaacctgcaatctaaaacagaactcactccagaggagcgcgctcagaagattgccaaggcaatgcggaaacaatcatcagaggttaaagagaaatgggagagcctgaacgcagttacgtccaattggcagaagcaggtggataaggctcttgagaaactgcgagatctccagggggcaatggacgatctggatgccgatatgaaagaggcagaatccgtacgcaatggatggaagcctgtaggcgacctactgattgacagtctgcaggaccatatcgagaagatcatggcctttagagaggagatagctcccattaactttaaggtaaagaccgtgaatgatcttagcagccagttgagccctctggacctccacccctcccttaagatgagccggcagctggatgacctaaatatgcgctggaagctgctccaggtgagcgtggacgatcgcttgaaacaattacaagaggctcaccgggacttcggcccatcatcacagcacttcctatcaacttcagtccaacttccgtggcaacgtagcatatcccacaacaaagtgccctactatataaatcaccaaacgcagactacgtgctgggatcacccaaagatgacagagttattccagtccctcgcagatttaaacaatgtacgtttcagcgcttacagaactgccataaagatccgacgactgcaaaaggccctgtgcttagaccttttggaactgtcgaccactaacgaaatctttaagcaacacaagcttaatcagaacgaccaactgcttagcgtgcccgacgttatcaactgtctgacgactacttatgatggcctggagcagatgcacaaagacctcgtgaacgtccccctctgtgtggacatgtgtctgaattggctgttgaacgtgtatgataccgggaggaccggcaagatccgggtccaatctttgaagattggactaatgtccctctcgaaaggtcttctcgaggagaaataccgctacctcttcaaggaggttgccggtcctacagagatgtgtgatcaacgacaactgggcctgctactccacgatgctatccagattccccgacaactgggcgaagtagccgctttcggcggttccaacatcgagccatccgtgagatcctgctttcagcagaataataataaaccggagattagtgtcaaggaattcatcgactggatgcacctggagcctcagagcatggtatggttgcctgtgctccaccgagtggctgctgctgagaccgccaagcaccaggcaaagtgcaatatttgcaaagagtgtcccattgtcggctttcgttaccgctccctcaagcacttcaattatgatgtgtgccagagttgtttctttagcggaagaaccgcaaagggacacaagttgcactatcctatggtggagtactgcatacccaccacatccggcgaggacgtgagggactttacgaaagtcctgaagaacaagttccgaagtaagaagtactttgcgaaacaccctcgcctcggctacctgcctgttcagacagtgttggaaggcgacaacttagaaacaccaatcactcttattagcatgtggcccgagcactatgaccctagccagagccctcagctcttccacgacgacactcactctagaatagaacaatatgctacacgattggcccagatggagcggacaaacggaagcttcttaaccgactcatccagcaccacgggatcggttgaggatgaacacgccctcattcaacaatattgccagactctaggtggagaaagccctgtgtcccagcctcagagccctgcccaaatccttaagtctgtggagcgggaagagagaggagaacttgagcggataatcgcagatctcgaagaagaacagcggaacttacaggtagaatatgagcaactcaaggatcagcacctcagaagggggctcccggtgggtagcccccctgaaagcatcattagccctcaccatacgtccgaagacagtgagctaattgccgaggcaaaattgttacggcagcataaaggcaggctggaggccaggatgcaaatcctggaggaccataataagcagcttgagagccagctacataggttaaggcaactgcttgaacaacctgagagcgattcccgtataaacggcgtgagtccctgggccagtcctcagcatagtgccctgtcctattcccttgatccagatgcatctgggccacaattccatcaggctgcgggtgaggatctcctagctccaccacacgacacttcaacagaccttacagaagtcatggagcagatccatagtacattcccatcgtgctgccctaacgtgccctcccggccacaggcaatgtag

SEQ ID NO: 170493 - DNA, 144 bp, Artificial Sequence
  derived and/or modified sequence
atggccaagtatggagagcatgaggcctcccctgataatggccagaatgagttcagcgatataattaagtctcggtcggatgagcacaacgacgtgcagaagaaaactttcacaaaatggatcaacgccagattctccaaatag

SEQ ID NO: 170494 - DNA, 3674 bp, Artificial Sequence
  derived and/or modified sequence
agccagccgcccggcggggaacgtgcttgacctctgggtggttgctgctcccaagggtggggctccggagagtgtggcgcgatcgccaagctccctggcagcggccctggagagactgaggggacaggaggaggggggcgccccattggtgtgtagtcccgcgcagtcgccggctctccttttccggactctggggatctcttgctgcaactgacaaggtattgatgtcaagctgaaccatcgtaggaagttgaaagccttagaaagaggacttggtaaagtttttggattatcttgaaactctggcaagatggccaagtatggagaacatgaagccagtcctgacaatgggcagaacgaattcagtgatatcattaagtccagatctgatgaacacaatgacgtacagaagaaaacctttaccaaatggataaatgctcgattttcaaagagtgggaaaccacccatcaatgatatgttcacagacctcaaagatggaaggaagctattggatcttctagaaggcctcacaggaacatcactgccaaaggaacgtggttccacaagggtacatgccttaaataacgtcaacagagtgctgcaggttttacatcagaacaatgtggaattagtgaatatagggggaactgacattgtggatggaaatcacaaactgactttggggttactttggagcatcattttgcactggcaggtgaaagatgtcatgaaggatgtcatgtcggacctgcagcagacgaacagtgagaagatcctgctcagctgggtgcgtcagaccaccaggccctacagccaagtcaacgtcctcaacttcaccaccagctggacagatggactcgcctttaatgctgtcctccaccgacataaacctgatctcttcagctgggataaagttgtcaaaatgtcaccaattgagagacttgaacatgccttcagcaaggctcaaacttatttgggaattgaaaagctgttagatcctgaagatgttgccgttcagcttcctgacaagaaatccataattatgtatttaacatctttgtttgaggtgctacctcagcaagtcaccatagacgccatccgtgaggtagagacactcccaaggaaatataaaaaagaatgtgaagaagaggcaattaatatacagagtacagcgcctgaggaggagcatgagagtccccgagctgaaactcccagcactgtcactgaggttgacatggatctggacagctatcagattgcgttggaggaagtgctgacctggttgctttctgctgaggacactttccaggagcaggatgatatttctgatgatgttgaagaagtcaaagaccagtttgcaacccatgaagcttttatgatggaactgactgcacaccagagcagtgtgggcagcgtcctgcaggcaggcaaccaactgataacacaaggaactctgtcagacgaagaagaatttgagattcaggaacagatgaccctgctgaatgctagatgggaggctcttagggtggagagtatggacagacagtcccggctgcacgatgtgctgatggaactgcagaagaagcaactgcagcagctctccgcctggttaacactcacagaggagcgcattcagaagatggaaacttgccccctggatgatgatgtaaaatctctacaaaagctgctagaagaacataaaagtttgcaaagtgatcttgaggctgaacaggtgaaagtaaattcactaactcacatggtggtcattgttgatgaaaacagtggtgagagtgctacagctatcctagaagaccagttacagaaacttggtgagcgctggacagcagtatgccgttggactgaagaacgctggaataggttacaagaaatcaatatattgtggcaggaattattggaagaacagtgcttgttgaaagcttggttaaccgaaaaagaagaggctttaaataaagtccagacaagcaacttcaaagaccaaaaggaactaagtgtcagtgttcgacgtctggctattttgaaggaagacatggaaatgaagcgtcaaacattggatcagctgagtgagattggccaggatgtgggacaattacttgataattccaaggcatctaagaagatcaacagtgactcagaggaactgactcaaagatgggattctttggttcagagactagaagattcctccaaccaggtgactcaggctgtagcaaagctggggatgtctcagattcctcagaaggaccttttggagactgttcgtgtaagagaacaagcaattacaaaaaaatctaagcaggaactgcctcctcctcctcccccaaagaagagacagatccatgtggatattgaagctaagaaaaagtttgatgctataagtgcagagctgttgaactggattttgaaatggaaaactgccattcagaccacagagataaaagagtatatgaagatgcaagacacttccgaaatgaaaaagaagttgaaggcattagaaaaagaacagagagaaagaatccccagagcagatgaattaaaccaaactggacaaatccttgtggagcaaatgggaaaagaaggccttcctactgaagaaataaaaaatgttctggagaaggtttcatcagaatggaagaatgtatctcaacatttggaagatctagaaagaaagattcagctacaggaagatataaatgcttatttcaagcagcttgatgagcttgaaaaggtcatcaagacaaaggaggagtgggtaaaacacacttccatttctgaatcttcccggcagtccttgccaagcttgaaggattcctgtcagcgggaattgacaaatcttcttggccttcaccccaaaattgaaatggctcgtgcaagctgctcggccctgatgtctcagccttctgccccagattttgtccagcggggcttcgatagctttctgggccgctaccaagctgtacaagaggctgtagaggatcgtcaacaacatctagagaatgaactgaagggccaacctggacatgcatatctggaaacattgaaaacactgaaagatgtgctaaatgattcagaaaataaggcccaggtgtctctgaatgtccttaatgatcttgccaaggtggagaaggccctgcaagaaaaaaagacccttgatgaaatccttgagaatcagaaacctgcattacataaacttgcagaagaaacaaaggctctggagaaaaatgttcatcctgatgtagaaaaattatataagcaagaatttgatgatgtgcaaggaaagtggaacaagctaaaggtcttggtttccaaagatctacatttgcttgaggaaattgctctcacactcagagcttttgaggccgattcaacagtcattgagaagtggatggatggcgtgaaagacttcttaatgaaacagcaggctgcccaaggagacgacgcaggtctacagaggcagttagaccagtgctctgcatttgttaatgaaatagaaacaattgaatcatctctgaaaaacatgaaggaaatagagactaatcttcgaagtggtccagttgctggaataaaaacttgggtgcagacaagactaggtgactaccaaactcaactggagaaacttagcaaggagatcgctactcaaaaaagtaggttgtctg

SEQ ID NO: 170495 - DNA, 12339 bp, Artificial Sequence
  derived and/or modified sequence
atggccaagtatggagaacatgaagccagtcctgacaatgggcagaacgaattcagtgatatcattaagtccagatctgatgaacacaatgacgtacagaagaaaacctttaccaaatggataaatgctcgattttcaaagagtgggaaaccacccatcaatgatatgttcacagacctcaaagatggaaggaagctattggatcttctagaaggcctcacaggaacatcactgccaaaggaacgtggttccacaagggtacatgccttaaataacgtcaacagagtgctgcaggttttacatcagaacaatgtggaattagtgaatatagggggaactgacattgtggatggaaatcacaaactgactttggggttactttggagcatcattttgcactggcaggtgaaagatgtcatgaaggatgtcatgtcggacctgcagcagacgaacagtgagaagatcctgctcagctgggtgcgtcagaccaccaggccctacagccaagtcaacgtcctcaacttcaccaccagctggacagatggactcgcctttaatgctgtcctccaccgacataaacctgatctcttcagctgggataaagttgtcaaaatgtcaccaattgagagacttgaacatgccttcagcaaggctcaaacttatttgggaattgaaaagctgttagatcctgaagatgttgccgttcagcttcctgacaagaaatccataattatgtatttaacatctttgtttgaggtgctacctcagcaagtcaccatagacgccatccgtgaggtagagacactcccaaggaaatataaaaaagaatgtgaagaagaggcaattaatatacagagtacagcgcctgaggaggagcatgagagtccccgagctgaaactcccagcactgtcactgaggttgacatggatctggacagctatcagattgcgttggaggaagtgctgacctggttgctttctgctgaggacactttccaggagcaggatgatatttctgatgatgttgaagaagtcaaagaccagtttgcaacccatgaagcttttatgatggaactgactgcacaccagagcagtgtgggcagcgtcctgcaggcaggcaaccaactgataacacaaggaactctgtcagacgaagaagaatttgagattcaggaacagatgaccctgctgaatgctagatgggaggctcttagggtggagagtatggacagacagtcccggctgcacgatgtgctgatggaactgcagaagaagcaactgcagcagctctccgcctggttaacactcacagaggagcgcattcagaagatggaaacttgccccctggatgatgatgtaaaatctctacaaaagctgctagaagaacataaaagtttgcaaagtgatcttgaggctgaacaggtgaaagtaaattcactaactcacatggtggtcattgttgatgaaaacagtggtgagagtgctacagctatcctagaagaccagttacagaaacttggtgagcgctggacagcagtatgccgttggactgaagaacgctggaataggttacaagaaatcaatatattgtggcaggaattattggaagaacagtgcttgttgaaagcttggttaaccgaaaaagaagaggctttaaataaagtccagacaagcaacttcaaagaccaaaaggaactaagtgtcagtgttcgacgtctggctattttgaaggaagacatggaaatgaagcgtcaaacattggatcagctgagtgagattggccaggatgtgggacaattacttgataattccaaggcatctaagaagatcaacagtgactcagaggaactgactcaaagatgggattctttggttcagagactagaagattcctccaaccaggtgactcaggctgtagcaaagctggggatgtctcagattcctcagaaggaccttttggagactgttcgtgtaagagaacaagcaattacaaaaaaatctaagcaggaactgcctcctcctcctcccccaaagaagagacagatccatgtggatattgaagctaagaaaaagtttgatgctataagtgcagagctgttgaactggattttgaaatggaaaactgccattcagaccacagagataaaagagtatatgaagatgcaagacacttccgaaatgaaaaagaagttgaaggcattagaaaaagaacagagagaaagaatccccagagcagatgaattaaaccaaactggacaaatccttgtggagcaaatgggaaaagaaggccttcctactgaagaaataaaaaatgttctggagaaggtttcatcagaatggaagaatgtatctcaacatttggaagatctagaaagaaagattcagctacaggaagatataaatgcttatttcaagcagcttgatgagcttgaaaaggtcatcaagacaaaggaggagtgggtaaaacacacttccatttctgaatcttcccggcagtccttgccaagcttgaaggattcctgtcagcgggaattgacaaatcttcttggccttcaccccaaaattgaaatggctcgtgcaagctgctcggccctgatgtctcagccttctgccccagattttgtccagcggggcttcgatagctttctgggccgctaccaagctgtacaagaggctgtagaggatcgtcaacaacatctagagaatgaactgaagggccaacctggacatgcatatctggaaacattgaaaacactgaaagatgtgctaaatgattcagaaaataaggcccaggtgtctctgaatgtccttaatgatcttgccaaggtggagaaggccctgcaagaaaaaaagacccttgatgaaatccttgagaatcagaaacctgcattacataaacttgcagaagaaacaaaggctctggagaaaaatgttcatcctgatgtagaaaaattatataagcaagaatttgatgatgtgcaaggaaagtggaacaagctaaaggtcttggtttccaaagatctacatttgcttgaggaaattgctctcacactcagagcttttgaggccgattcaacagtcattgagaagtggatggatggcgtgaaagacttcttaatgaaacagcaggctgcccaaggagacgacgcaggtctacagaggcagttagaccagtgctctgcatttgttaatgaaatagaaacaattgaatcatctctgaaaaacatgaaggaaatagagactaatcttcgaagtggtccagttgctggaataaaaacttgggtgcagacaagactaggtgactaccaaactcaactggagaaacttagcaaggagatcgctactcaaaaaagtaggttgtctgaaagtcaagaaaaagctgcgaacctgaagaaagacttggcagagatgcaggaatggatgacccaggccgaggaagaatatttggagcgggattttgagtacaagtcaccagaagagcttgagagtgctgtggaagagatgaagagggcaaaagaggatgtgttgcagaaggaggtgagagtgaagattctcaaggacaacatcaagttattagctgccaaggtgccctctggtggccaggagttgacgtctgagctgaatgttgtgctggagaattaccaacttctttgtaatagaattcgaggaaagtgccacacgctagaggaggtctggtcttgttggattgaactgcttcactatttggatcttgaaactacctggttaaacactttggaagagcggatgaagagcacagaggtcctgcctgagaagacggatgctgtcaacgaagccctggagtctctggaatctgttctgcgccacccggcagataatcgcacccagattcgagagcttggccagactctgattgatggggggatcctggatgatataatcagtgagaaactggaggctttcaacagccgatatgaagatctaagtcacctggcagagagcaagcagatttctttggaaaagcaactccaggtgctgcgggaaactgaccagatgcttcaagtcttgcaagagagcttgggggagctggacaaacagctcaccacatacctgactgacaggatagatgctttccaagttccacaggaagctcagaaaatccaagcagagatctcagcccatgagctaaccctagaggagttgagaagaaatatgcgttctcagcccctgacctccccagagagtaggactgccagaggaggaagtcagatggatgtgctacagaggaaactccgagaggtgtccacaaagttccagcttttccagaagccagctaacttcgagcagcgcatgctggactgcaagcgtgtgctggatggcgtgaaagcagaacttcacgttctggatgtgaaggacgtagaccctgacgtcatacagacgcacctggacaagtgtatgaaactgtataaaactttgagtgaagtcaaacttgaagtggaaactgtgattaaaacaggaagacatattgtccagaaacagcaaacggacaacccaaaagggatggatgagcagctgacttccctgaaggttctttacaatgacctgggcgcacaggtgacagaaggaaaacaggatctggaaagagcatcacagttggcccggaaaatgaagaaagaggctgcttctctctctgaatggctttctgctactgaaactgaattggtacagaagtccacttcagaaggtctgcttggtgacttggatacagaaatttcctgggctaaaaatgttctgaaggatctggaaaagagaaaagctgatttaaataccatcacagagagtagtgctgccctgcaaaacttgattgagggcagtgagcctattttagaagagaggctctgcgtccttaacgctgggtggagccgagttcgtacctggactgaagattggtgcaataccttgatgaaccatcagaaccagctagaaatatttgatgggaacgtggctcacataagtacctggctttatcaagctgaagctctattggatgaaattgaaaagaaaccaacaagtaaacaggaagaaattgtgaagcgtttagtatctgagctggatgatgccaacctccaggttgaaaatgtccgcgatcaagcccttattttgatgaatgcccgtggaagctcaagcagggagcttgtagaaccaaagttagctgagctgaataggaactttgaaaaggtgtctcaacatatcaaaagtgccaaattgctaattgctcaggaaccattataccaatgtttggtcaccactgaaacatttgaaactggtgtgcctttctctgacttggaaaaattagaaaatgacatagaaaatatgttaaaatttgtggaaaaacacttggaatccagtgatgaagatgaaaagatggatgaggagagtgcccagattgaggaagttctacaaagaggagaagaaatgttacatcaacctatggaagataataaaaaagaaaagatccgtttgcaattattacttttgcatactagatacaacaaaattaaggcaatccctattcaacagaggaaaatgggtcaacttgcttctggaattagatcatcacttcttcctacagattatctggttgaaattaacaaaattttactttgcatggatgatgttgaattatcgcttaatgttccagagctcaacactgctatttacgaagacttctcttttcaggaagactctctgaagaatatcaaagaccaactggacaaacttggagagcagattgcagtcattcatgaaaaacagccagatgtcatccttgaagcctctggacctgaagccattcagatcagagatacacttactcagctgaatgcaaaatgggacagaattaatagaatgtacagtgatcggaaaggttgttttgacagggcaatggaagaatggagacagttccattgtgaccttaatgacctcacacagtggataacagaggctgaagaattactggttgatacctgtgctccaggtggcagcctggacttagagaaagccaggatacatcagcaggaacttgaggtgggcatcagcagccaccagcccagttttgcagcactaaaccgaactggggatgggattgtgcagaaactctcccaggcagatggaagcttcttgaaagaaaaactggcaggtttaaaccaacgctgggatgcaattgttgcagaagtgaaggataggcagccaaggctaaaaggagaaagtaagcaggtgatgaagtacaggcatcagctagatgagattatctgttggttaacaaaggctgagcatgctatgcaaaagagatcaaccaccgaattgggagaaaacctgcaagaattaagagacttaactcaagaaatggaagtacatgctgaaaaactcaaatggctgaatagaactgaattggagatgctttcagataaaagtctgagtttacctgaaagggataaaatttcagaaagcttaaggactgtaaatatgacatggaataagatttgcagagaggtgcctaccaccctgaaggaatgcatccaggagcccagttctgtttcacagacaaggattgctgctcatcctaatgtccaaaaggtggtgctagtatcatctgcgtcagatattcctgttcagtctcatcgtacttcggaaatttcaattcctgctgatcttgataaaactataacagaactagccgactggctggtattaatcgaccagatgctgaagtccaacattgtcactgttggggatgtagaagagatcaataagaccgtttcccgaatgaaaattacaaaggctgacttagaacagcgccatcctcagctggattatgtttttacattggcacagaatttgaaaaataaagcttccagttcagatatgagaacagcaattacagaaaaattggaaagggtcaagaaccagtgggatggcacccagcatggcgttgagctaagacagcagcagcttgaggacatgattattgacagtcttcagtgggatgaccatagggaggagactgaagaactgatgagaaaatatgaggctcgactctatattcttcagcaagcccgacgggatccactcaccaaacaaatttctgataaccaaatactgcttcaagaactgggtcctggagatggtatcgtcatggcgttcgataacgtcctgcagaaactcctggaggaatatgggagtgatgacacaaggaatgtgaaagaaaccacagagtacttaaaaacatcatggatcaatctcaaacaaagtattgctgacagacagaacgccttggaggctgagtggaggacggtgcaggcctctcgcagagatctggaaaacttcctgaagtggatccaagaagcagagaccacagtgaatgtgcttgtggatgcctctcatcgggagaatgctcttcaggatagtatcttggccagggaactcaaacagcagatgcaggacatccaggcagaaattgatgcccacaatgacatatttaaaagcattgacggaaacaggcagaagatggtaaaagctttgggaaattctgaagaggctactatgcttcaacatcgactggatgatatgaaccaaagatggaatgacttaaaagcaaaatctgctagcatcagggcccatttggaggccagcgctgagaagtggaacaggttgctgatgtccttagaagaactgatcaaatggctgaatatgaaagatgaagagcttaagaaacaaatgcctattggaggagatgttccagccttacagctccagtatgaccattgtaaggccctgagacgggagttaaaggagaaagaatattctgtcctgaatgctgtcgaccaggcccgagttttcttggctgatcagccaattgaggcccctgaagagccaagaagaaacctacaatcaaaaacagaattaactcctgaggagagagcccaaaagattgccaaagccatgcgcaaacagtcttctgaagtcaaagaaaaatgggaaagtctaaatgctgtaactagcaattggcaaaagcaagtggacaaggcattggagaaactcagagacctgcagggagctatggatgacctggacgctgacatgaaggaggcagagtccgtgcggaatggctggaagcccgtgggagacttactcattgactcgctgcaggatcacattgaaaaaatcatggcatttagagaagaaattgcaccaatcaactttaaagttaaaacggtgaatgatttatccagtcagctgtctccacttgacctgcatccctctctaaagatgtctcgccagctagatgaccttaatatgcgatggaaacttttacaggtttctgtggatgatcgccttaaacagcttcaggaagcccacagagattttggaccatcctctcagcattttctctctacgtcagtccagctgccgtggcaaagatccatttcacataataaagtgccctattacatcaaccatcaaacacagaccacctgttgggaccatcctaaaatgaccgaactctttcaatcccttgctgacctgaataatgtacgtttttctgcctaccgtacagcaatcaaaatccgaagactacaaaaagcactatgtttggatctcttagagttgagtacaacaaatgaaattttcaaacagcacaagttgaaccaaaatgaccagctcctcagtgttccagatgtcatcaactgtctgacaacaacttatgatggacttgagcaaatgcataaggacctggtcaacgttccactctgtgttgatatgtgtctcaattggttgctcaatgtctatgacacgggtcgaactggaaaaattagagtgcagagtctgaagattggattaatgtctctctccaaaggtctcttggaagaaaaatacagatatctctttaaggaagttgcagggccaacagaaatgtgtgaccagaggcagctgggcctgttacttcatgatgccatccagatcccccggcagctaggtgaagtagcagcttttggaggcagtaatattgagcctagtgttcgcagctgcttccaacagaataacaataaaccagaaataagtgtgaaagagtttatagattggatgcatttggaaccacagtccatggtttggctcccagttttacatcgagtggcagcagcggagactgcaaaacatcaggccaaatgcaacatctgtaaagaatgtccaattgtcgggttcaggtatagaagccttaagcattttaactatgatgtctgccagagttgtttcttttcgggtcgaacagcaaaaggtcacaaattacattacccaatggtggaatattgtatacctacaacatctggggaagatgtacgagacttcacaaaggtacttaagaacaagttcaggtcgaagaagtactttgccaaacaccctcgacttggttacctgcctgtccagacagttcttgaaggtgacaacttagagactcctatcacactcatcagtatgtggccagagcactatgacccctcacaatctcctcaactgtttcatgatgacacccattcaagaatagaacaatatgccacacgactggcccagatggaaaggactaatgggtcttttctcactgatagcagctccaccacaggaagtgtggaagacgagcacgccctcatccagcagtattgccaaacactcggaggagagtccccagtgagccagccgcagagcccagctcagatcctgaagtcagtagagagggaagaacgtggagaactggagaggatcattgctgacctggaggaagaacaaagaaatctacaggtggagtatgagcagctgaaggaccagcacctccgaagggggctccctgtcggttcaccgccagagtcgattatatctccccatcacacgtctgaggattcagaacttatagcagaagcaaaactcctcaggcagcacaaaggtcggctggaggctaggatgcagattttagaagatcacaataaacagctggagtctcagctccaccgcctccgacagctgctggagcagcctgaatctgattcccgaatcaatggtgtttccccatgggcttctcctcagcattctgcactgagctactcgcttgatccagatgcctccggcccacagttccaccaggcagcgggagaggacctgctggccccaccgcacgacaccagcacggatctcacggaggtcatggagcagattcacagcacgtttccatcttgctgcccaaatgttcccagcaggccacaggcaatgtgaagtattcatccggccaaccaatgtttcctgacgtacagtgttgcccttttcagcaaatgccaattccaagttccattaaatcagaagctccatggctccttggcccacgatgttgagtgctgactgtgtgttctactgaaagagtaaaacactgactatccaaagagaaatggatattttgtttttataataaccatatattattgttttcttcttccctttctatgcaagtgtaaattaatgaacagagaggtatttggaaatggtaatacatttgtcacggatttgtataatgtatacagcattgggaaagtgggtgggggctttctaatatgataccgtctttttaataactatgacaaagcttacataagaattagaagaccactttacatttttacattccttctgctgttcatattaaccttgcacaattacttcattttttctttgactcttttaccacaatgttttggttatttataatttatcagccatatgtttatcagccatataaccaactagatcccaaatagatccatgtatttgtttccgtgatttggccacattaataaattcataaatttcaatcaaatatcttatatatacacacatatggtttaagctacagccctgtgtatgccgtttaactttatttgacgttgcccacttacttctttgctgaccacttggataaccgtaataaaaatcctataagcctaaatggcatttcttttgggatatttttcctgcattttattccctttttatataagtaggaattaattatttattttatgtcttaatctatttgataaagaagactacattataataatctcaaagatcatattaccaaaggttgcccacttgagcatattttcattttgacacagaaacaaaatttagtacaacctttcctagttcccatgtcttgattttcatcattacatgcacagcagacctttacctattgtgataccagaacacatcattgtctttggttcccttcaaagagaattttattgttgttttgtattttcaagtccttaatagttcttgaaactcctagttgttttcttgttgaaagcagacacacatttagtgcacggcttattttacctttcgggtgaaagatcagatgtttttatacccttcacttgatcaatatatttggaaagaatgtttatcaaaagtctatgtcactgcttctacagaagaatgaaattaatgcttaggtgatggtacctccacctacatctttttgagtgcattcaattatgtattttggtttagcttctgatttaacatttaattgattcagtttaaacatgttacttaattagcaaatgtagaggaaccaaaaaaaggtgaaaataatatgttttgattcaaacctaaagacataaaaacataaagacattttaactttgggttctctttagctgggatctggccagaaggaggcttaaagttagaaattgctattattttagaataggttgggtgggttggggggcaagggtgtctatttgcagcagagatattttgaaaagaagaaaattgttttatataaaaaggaaagccatgaccacctttctacctcagatccatcttcatccattgcattggaaactgctttatgctgctgcagtctgcaaagtctagagcttttatcaggccatgtcatacccaagaaagcacctatttaaagaaaaaacaattccctgagctctcaactccaagttgtagatttggtgtcttccttgttcttactttaaaaagtcatgtgttaattttttttctgcctgtatttgtatgcaaaatgtcctctatctgctattaaagaaaagctacgtaaaacactacattgtaaccttctaagtaataataaataaaaagaaatatattgcagtaacaatgggaagtaagtatgtagttcttttgaaatatgtggtaaagaactaatcacagactatcatctaatctggttacatattgtatttttcatcctgaataaaagtaattttaacacaa

SEQ ID NO: 170496 - DNA, 354 bp, Artificial Sequence
  derived and/or modified sequence
caccaaactaacactcgcacacacccccgcggttactccgtgtcaaactcctagaggagcccttggccagctcggggtgcggcggtggcgaccggcaggcgaggaggcccgcgggcagcaggtattgatgtcaagctgaaccatcgtaggaagttgaaagccttagaaagaggacttggtaaagtttttggattatcttgaaactctggcaagatggccaagtatggagaacatgaagccagtcctgacaatgggcagaacgaattcagtgatatcattaagtccagatctgatgaacacaatgacgtacagaagaaaacctttaccaaatggataaatgctcgattttcaaag

SEQ ID NO: 170497 - protein, 1347 aa, Artificial Sequence
  derived and/or modified sequence
MKSCAVSLTTAAVAFGDEAKKMAEGKASRESEEESVSLTVEEREALGGMDSRLFGFVRLHEDGARTKTLLGKAVRCYESLILKAEGKVESDFFCQLGHFNLLLEDYSKALSAYQRYYSLQADYWKNAAFLYGLGLVYFYYNAFHWAIKAFQDVLYVDPSFCRAKEIHLRLGLMFKVNTDYKSSLKHFQLALIDCNPCTLSNAEIQFHIAHLYETQRKYHSAKEAYEQLLQTENLPAQVKATVLQQLGWMHHNMDLVGDKATKESYAIQYLQKSLEADPNSGQSWYFLGRCYSSIGKVQDAFISYRQSIDKSEASADTWCSIGVLYQQQNQPMDALQAYICAVQLDHGHAAAWMDLGTLYESCNQPQDAIKCYLNAARSKRCSNTSTLAARIKFLQNGSDNWNGGQSLSHHPVQQVYSLCLTPQKLQHLEQLRANRDNLNPAQKHQLEQLESQFVLMQQMRHKEVAQVRTTGIHNGAITDSSLPTNSVSNRQPHGALTRVSSVSQPGVRPACVEKLLSSGAFSAGCIPCGTSKILGSTDTILLGSNCIAGSESNGNVPYLQQNTHTLPHNHTDLNSSTEEPWRKQLSNSAQGLHKSQSSCLSGPNEEQPLFSTGSAQYHQATSTGIKKANEHLTLPSNSVPQGDADSHLSCHTATSGGQQGIMFTKESKPSKNRSLVPETSRHTGDTSNGCADVKGLSNHVHQLIADAVSSPNHGDSPNLLIADNPQLSALLIGKANGNVGTGTCDKVNNIHPAVHTKTDHSVASSPSSAISTATPSPKSTEQRSINSVTSLNSPHSGLHTVNGEGLGKSQSSTKVDLPLASHRSTSQILPSMSVSICPSSTEVLKACRNPGKNGLSNSCILLDKCPPPRPPTSPYPPLPKDKLNPPTPSIYLENKRDAFFPPLHQFCTNPKNPVTVIRGLAGALKLDLGLFSTKTLVEANNEHMVEVRTQLLQPADENWDPTGTKKIWRCESNRSHTTIAKYAQYQASSFQESLREENEKRTQHKDHSDNESTSSENSGRRRKGPFKTIKFGTNIDLSDNKKWKLQLHELTKLPAFARVVSAGNLLTHVGHTILGMNTVQLYMKVPGSRTPGHQENNNFCSVNINIGPGDCEWFVVPEDYWGVLNDFCEKNNLNFLMSSWWPNLEDLYEANVPVYRFIQRPGDLVWINAGTVHWVQAVGWCNNIAWNVGPLTACQYKLAVERYEWNKLKSVKSPVPMVHLSWNMARNIKVSDPKLFEMIKYCLLKILKQYQTLREALVAAGKEVIWHGRTNDEPAHYCSICEVEVFNLLFVTNESNTQKTYIVHCHDCARKTSKSLENFVVLEQYKMEDLIQVYDQFTLALSLSSSS

SEQ ID NO: 170498 - protein, 806 aa, Artificial Sequence
  derived and/or modified sequence
MASGADSKGDDLSTAILKQKNRPNRLIVDEAINEDNSVVSLSQPKMDELQLFRGDTVLLKGKKRREAVCIVLSDDTCSDEKIRMNRVVRNNLRVRLGDVISIQPCPDVKYGKRIHVLPIDDTVEGITGNLFEVYLKPYFLEAYRPIRKGDIFLVRGGMRAVEFKVVETDPSPYCIVAPDTVIHCEGEPIKREDEEESLNEVGYDDIGGCRKQLAQIKEMVELPLRHPALFKAIGVKPPRGILLYGPPGTGKTLIARAVANETGAFFFLINGPEIMSKLAGESESNLRKAFEEAEKNAPAIIFIDELDAIAPKREKTHGEVERRIVSQLLTLMDGLKQRAHVIVMAATNRPNSIDPALRRFGRFDREVDIGIPDATGRLEILQIHTKNMKLADDVDLEQVANETHGHVGADLAALCSEAALQAIRKKMDLIDLEDETIDAEVMNSLAVTMDDFRWALSQSNPSALRETVVEVPQVTWEDIGGLEDVKRELQELVQYPVEHPDKFLKFGMTPSKGVLFYGPPGCGKTLLAKAIANECQANFISIKGPELLTMWFGESEANVREIFDKARQAAPCVLFFDELDSIAKARGGNIGDGGGAADRVINQILTEMDGMSTKKNVFIIGATNRPDIIDPAILRPGRLDQLIYIPLPDEKSRVAILKANLRKSPVAKDVDLEFLAKMTNGFSGADLTEICQRACKLAIRESIESEIRRERERQTNPSAMEVEEDDPVPEIRRDHFEEAMRFARRSVSDNDIRKYEMFAQTLQQSRGFGSFRFPSGNQGGAGPSQGSGGGTGGSVYTEDNDDDLYG

SEQ ID NO: 170499 - DNA, 2421 bp, Artificial Sequence
  derived and/or modified sequence
atggccagcggcgccgacagcaagggcgacgacctgagcaccgccatcctgaagcagaagaacagacccaacagactgatcgtggacgaggccatcaacgaggacaacagcgtggtgagcctgagccagcccaagatggacgagctgcagctgttcagaggcgacaccgtgctgctgaagggcaagaagagaagagaggccgtgtgcatcgtgctgagcgacgacacctgcagcgacgagaagatcagaatgaacagagtggtgagaaacaacctgagagtgagactgggcgacgtgatcagcatccagccctgccccgacgtgaagtacggcaagagaatccacgtgctgcccatcgacgacaccgtggagggcatcaccggcaacctgttcgaggtgtacctgaagccctacttcctggaggcctacagacccatcagaaagggcgacatcttcctggtgagaggcggcatgagagccgtggagttcaaggtggtggagaccgaccccagcccctactgcatcgtggcccccgacaccgtgatccactgcgagggcgagcccatcaagagagaggacgaggaggagagcctgaacgaggtgggctacgacgacatcggcggctgcagaaagcagctggcccagatcaaggagatggtggagctgcccctgagacaccccgccctgttcaaggccatcggcgtgaagccccccagaggcatcctgctgtacggcccccccggcaccggcaagaccctgatcgccagagccgtggccaacgagaccggcgccttcttcttcctgatcaacggccccgagatcatgagcaagctggccggcgagagcgagagcaacctgagaaaggccttcgaggaggccgagaagaacgcccccgccatcatcttcatcgacgagctggacgccatcgcccccaagagagagaagacccacggcgaggtggagagaagaatcgtgagccagctgctgaccctgatggacggcctgaagcagagagcccacgtgatcgtgatggccgccaccaacagacccaacagcatcgaccccgccctgagaagattcggcagattcgacagagaggtggacatcggcatccccgacgccaccggcagactggagatcctgcagatccacaccaagaacatgaagctggccgacgacgtggacctggagcaggtggccaacgagacccacggccacgtgggcgccgacctggccgccctgtgcagcgaggccgccctgcaggccatcagaaagaagatggacctgatcgacctggaggacgagaccatcgacgccgaggtgatgaacagcctggccgtgaccatggacgacttcagatgggccctgagccagagcaaccccagcgccctgagagagaccgtggtggaggtgccccaggtgacctgggaggacatcggcggcctggaggacgtgaagagagagctgcaggagctggtgcagtaccccgtggagcaccccgacaagttcctgaagttcggcatgacccccagcaagggcgtgctgttctacggcccccccggctgcggcaagaccctgctggccaaggccatcgccaacgagtgccaggccaacttcatcagcatcaagggccccgagctgctgaccatgtggttcggcgagagcgaggccaacgtgagagagatcttcgacaaggccagacaggccgccccctgcgtgctgttcttcgacgagctggacagcatcgccaaggccagaggcggcaacatcggcgacggcggcggcgccgccgacagagtgatcaaccagatcctgaccgagatggacggcatgagcaccaagaagaacgtgttcatcatcggcgccaccaacagacccgacatcatcgaccccgccatcctgagacccggcagactggaccagctgatctacatccccctgcccgacgagaagagcagagtggccatcctgaaggccaacctgagaaagagccccgtggccaaggacgtggacctggagttcctggccaagatgaccaacggcttcagcggcgccgacctgaccgagatctgccagagagcctgcaagctggccatcagagagagcatcgagagcgagatcagaagagagagagagagacagaccaaccccagcgccatggaggtggaggaggacgaccccgtgcccgagatcagaagagaccacttcgaggaggccatgagattcgccagaagaagcgtgagcgacaacgacatcagaaagtacgagatgttcgcccagaccctgcagcagagcagaggcttcggcagcttcagattccccagcggcaaccagggcggcgccggccccagccagggcagcggcggcggcaccggcggcagcgtgtacaccgaggacaacgacgacgacctgtacggctag

SEQ ID NO: 170500 - DNA, 2421 bp, Artificial Sequence
  derived and/or modified sequence
atggcgagcggagcggatagcaagggcgacgacctgtcgacggccatcctaaagcagaaaaacagacctaacagattaattgtagatgaagccattaacgaggacaatagcgtggtgagcctgtcccagcccaaaatggacgagctgcagcttttccggggagatacggtgttgctgaagggtaagaagagacgtgaagccgtctgcatcgtgctctccgatgacacgtgttccgacgaaaagataaggatgaaccgcgttgtaaggaataatctcagagttaggttgggcgacgttatctcgattcagccgtgcccagatgtgaaatacgggaagcgaattcacgtcctgccaatcgacgatactgttgagggtatcactggcaacctctttgaagtgtacctaaaaccctactttctggaggcgtatagacccattagaaaaggggatatttttctggtgcggggggggatgcgcgcggtggaattcaaggtggtggagactgacccaagcccttattgcatcgtggcaccagatacagtgatccattgtgagggtgagcctatcaagcgagaggacgaagaagagagcttgaacgaggtcggctatgatgatatcggaggatgcaggaaacaactcgctcagatcaaagaaatggtagaactgccactcaggcatccagccttgttcaaggccataggagtgaagccccccaggggaattctgctttacggacccccaggtactggtaagaccctgatcgcgcgagcagtcgctaacgagacaggcgcgttcttcttcctcatcaatgggcctgaaatcatgagcaagctggccggcgagagtgaatctaacttacgcaaagcctttgaggaagcagagaagaatgcacctgccataatattcatcgacgaactcgacgcaatagcccccaaacgcgagaaaacgcatggcgaggttgaacggagaatcgtgagccagctcttgacactcatggacggcctaaaacagagggcacacgtgattgtgatggcagccactaatcgaccaaactctattgacccagccttgcgcaggtttgggagatttgaccgcgaggtggatattgggattccagatgccacaggcaggctggaaatcctgcagatccacactaaaaatatgaagctggccgatgatgtggacttagagcaggtggccaatgaaacacatggacacgttggcgcagacctggccgcattgtgtagcgaagcagcccttcaggcaatccgaaaaaaaatggacctgattgacctcgaggacgagacgatcgacgccgaggtaatgaatagtcttgcagtaacgatggatgacttcaggtgggcactcagccagtcgaatccctctgcattgcgcgagaccgtggtggaggtgccgcaggtcacgtgggaagacattggaggtctggaagacgtgaaaagggaactgcaggaactagttcagtatcccgtcgagcacccagacaaattcttgaagtttggcatgacccccagcaagggagtgctcttctacggccctcccggctgcggcaagaccttactcgccaaggcgatcgccaacgaatgccaggcaaactttatctcaatcaagggccctgagcttctgaccatgtggttcggtgaatccgaagccaatgtgagggagatcttcgataaggcccgtcaggctgcgccttgcgtgttgttttttgacgagctggattctatcgccaaggctagagggggaaatataggcgacggcgggggtgccgccgatcgagtgataaatcagatccttacagagatggatgggatgtccacaaaaaagaatgtctttatcatcggcgctactaatcgtcccgacatcatagacccagcaattttgagacccggtcggctcgatcagctaatctatattccgctcccggacgagaaatcacgggtcgcaatactgaaagccaacctccggaagagcccggtcgcaaaggacgttgacctagaatttctggcaaaaatgaccaatggatttagcggagccgacctgacagagatctgccagagggcatgcaaactcgccattagagagagcatcgagtcagaaatacgacgcgaaagggaaagacaaacaaacccttccgcaatggaagtagaagaagatgatcccgtacctgaaattagacgggatcacttcgaagaagcaatgagattcgcaagaagatcagtttccgataatgatatacgtaagtacgaaatgtttgcccaaaccctccagcagtcacgcggcttcggaagttttcggttcccctctggtaatcaggggggagccggtccatcccagggtagcggcggggggaccggtggctctgtttatacggaagacaacgatgatgacttgtacgggtag

SEQ ID NO: 170501 - DNA, 2421 bp, Artificial Sequence
  derived and/or modified sequence
atggccagcggggctgacagcaaaggagatgacctgagcacagccatcctgaagcagaagaaccggcccaaccggctgattgtggatgaggccatcaatgaagacaacagcgtggtgtccctgagccagcccaagatggatgagctgcagctgttccggggggacacagtgctgctgaagggcaagaagaggcgggaggccgtgtgcatcgtgctgagtgatgacacctgcagtgatgagaagatccgcatgaacagagtggtgaggaacaacctgcgggtgcggctgggagatgtgatcagcatccagccctgcccagatgtgaagtatggcaagagaattcatgtgctgcccattgatgacacagtggagggcatcactggaaacctgtttgaggtgtacctgaagccctacttcctggaggcctaccggcccatcaggaagggggacatcttcctggtgcggggcggcatgagagctgtggagttcaaggtggtggagacagaccccagcccctactgcatcgtggccccagacaccgtcatccactgtgagggggagcccatcaagcgggaggatgaggaggagagcctgaatgaggtgggctatgatgacatcggcggctgcaggaagcagctggcccagatcaaggagatggtggagctgcccctgcggcacccagccctcttcaaggccatcggcgtgaagccaccccggggcatcctgctgtatggccccccaggcaccgggaagaccctcatcgcccgggctgtggccaatgagaccggggccttcttcttcctgatcaatggacctgagatcatgagcaagctggccggggagagcgagagcaacctgaggaaggcctttgaggaggccgagaagaatgccccagccatcatcttcattgatgagctggatgccatcgcccccaagcgggagaagacccatggagaggtggagcggcgcatcgtgtcccagctgctgaccctgatggatggcctgaagcagagggcccacgtgattgtgatggccgccaccaaccggcccaacagcattgatcctgccctgcggcgcttcggccgctttgaccgggaggtggacatcggcatcccagatgccaccggccgcctggagatcctgcagatccacaccaagaacatgaagctggctgatgatgtggacctggagcaggtggccaatgagacccacggccacgtgggcgctgacctggccgccctgtgcagcgaggccgccctgcaggccatcaggaagaagatggacctgattgacctggaggatgagaccattgatgctgaggtgatgaacagcctggccgtgaccatggatgacttccgctgggccctgagccagagcaaccccagcgccctgcgggagaccgtggtggaggtgccccaggtgacctgggaggacattggaggcctggaggatgtgaagcgggagctgcaggagctggtgcagtaccctgtggagcacccagacaagttcctgaagtttggcatgacccccagcaagggcgtgctcttctacggccccccaggctgtgggaagaccctgctggccaaggccatcgccaatgaatgccaggccaacttcatcagcatcaagggccctgagctgctgaccatgtggtttggagagagcgaggccaacgtgcgggagatctttgacaaggcccggcaggccgccccctgtgtgctcttctttgatgagctggacagcatcgccaaggcccggggcggcaacattggagatggcggcggcgctgctgacagagtcatcaaccagatcctgacagagatggatggcatgagcaccaagaagaatgtgttcatcatcggggccaccaacagaccagacatcattgatcctgccatcctgcggcccggccgcctggaccagctgatctacatccccctgcctgatgagaagagccgggtggccatcctgaaggccaacctgaggaagagccctgtggccaaggatgtggacctggagttcctggccaagatgaccaacggcttctctggagctgacctgacagagatctgccagagggcctgcaagctggccatccgggagagcattgaaagtgagatccggcgggagcgggagcggcagaccaaccccagcgccatggaggtggaggaggatgatcctgtgcctgagatccggcgggaccactttgaggaggccatgagatttgcccggcgctctgtgtctgacaatgacatcagaaaatatgagatgtttgcccagaccctgcagcagagccggggcttcggcagcttccgcttccccagcggcaaccagggcggggccggccccagccagggcagcggcggcggcactggaggctctgtgtacacagaggacaatgatgatgacctgtatggatag

SEQ ID NO: 170502 - DNA, 2421 bp, Artificial Sequence
  derived and/or modified sequence
atggccagcggcgccgacagcaagggcgacgacctgagcaccgccatcctcaagcagaaaaacaggccaaatagactcatcgtcgatgaggccatcaatgaagacaactcagtggtttccttatcacagccaaagatggatgagcttcagctgtttcgaggagacacagtgctgctgaagggcaagaaacgcagagaggctgtgtgtatagtgctctctgacgatacttgcagcgacgagaagattcggatgaatagagtggtgaggaataatctgcgtgtgcggttaggtgatgtgatcagtattcagccatgccccgatgtcaaatatggcaagagaattcacgtactgcctattgacgataccgtggagggcattaccggaaacctgttcgaggtgtacctcaaaccctacttcctcgaggcatatcggcccatccggaaaggtgacatctttctcgttcgagggggcatgcgggcagtggaattcaaggtcgtcgaaacagacccgagtccgtactgtatcgtggccccagatactgtaattcactgcgagggggaaccaataaaacgggaggatgaggaggaaagtctgaacgaagtggggtacgatgacattggcggctgtcgcaaacagctcgcccagatcaaagaaatggtggagttacctctacggcatcctgccctgttcaaggctattggcgtcaaaccgccaagggggatcttgctctatggtcctcctggtacaggcaaaaccctcatcgctagggcagtggctaacgaaactggggctttcttttttcttatcaatggtcctgaaatcatgagcaagctggcaggggaaagcgaatcaaaccttcgcaaggcctttgaggaggcagagaagaatgccccggccataatttttatcgacgaactcgacgccatcgcaccaaagcgggagaaaactcatggggaagtagagagacggattgtcagccagttgctgacccttatggacggactaaagcagcgagcacatgtgatagtcatggccgcaacgaaccgcccgaacagcatcgatccagccttgaggaggttcggacgattcgaccgcgaggtagacattggtatccccgatgctaccgggagactcgagattcttcaaattcacacaaagaatatgaagttggctgatgacgttgaccttgagcaggtggccaatgaaacacacgggcacgtgggagctgacctggctgcactgtgtagtgaggcggctctccaagcaatccggaagaaaatggatttaatcgatttggaagacgaaaccatagatgcagaagtgatgaatagtttggccgtgacaatggatgacttccgatgggcactgagccagtctaatccgtcagccttgcgcgagacagtggttgaggtccctcaagtcacctgggaggatatagggggacttgaggacgtgaagcgggaactgcaggagctagttcaatacccggtggagcacccagacaaatttctcaagtttggtatgacgccttccaaaggtgttttgttctacggaccacctgggtgtggtaaaacgcttctcgccaaggcaatcgcgaacgaatgccaggctaactttatcagcattaaggggcccgagcttctgaccatgtggtttggagagagcgaagccaatgtcagagagatcttcgacaaagctcggcaggcagccccctgcgtgctcttcttcgacgaattggattccattgcgaaagccagaggcgggaacattggggatggtggaggggccgcagacagggtcatcaatcaaatactgacggagatggacggtatgagtacaaagaagaacgtcttcattattggagccaccaacagacccgacattattgatcccgcgatacttcgcccgggtcgcttagatcaactgatctacattcctctgcccgatgagaagagccgagtggctatcctgaaggcaaacctaaggaaatcacctgtcgccaaagacgtggacctggagtttctggccaaaatgaccaatggcttctctggggccgacctgacagaaatatgtcaacgggcatgtaagctcgccattagagaatctatcgagtcagaaattagacgagagcgcgaacggcagacgaatcccagcgccatggaggtggaagaagacgatcctgtgcctgagataaggagagaccactttgaggaggccatgcgctttgccaggaggtcagtatcagacaatgacattcgcaaatacgagatgtttgcccagactctccagcagagcaggggattcgggagcttcaggttcccctctggcaatcagggtggtgctggcccttctcagggatcaggtggcggcacaggcggaagtgtgtacaccgaggacaatgatgatgacctctatggttag

SEQ ID NO: 170503 - DNA, 2421 bp, Artificial Sequence
  derived and/or modified sequence
atggcttctggcgcagattccaagggagacgacctatcgacagcaattttaaagcaaaagaaccgccctaatcgtctgatcgtggatgaggccataaatgaagacaactccgtagtttcccttagccagcccaaaatggatgagcttcagctgtttcggggtgacactgtgctcttgaagggaaaaaagagacgcgaagccgtttgtatcgtgctgtccgatgacacatgcagcgatgagaaaattagaatgaacagggtcgtccggaataacctgagggtgcgtctgggtgacgtgatatccatccagccttgccctgatgtcaaatacgggaagagaatccacgtcctgccaatcgacgacactgtggagggcatcaccggcaacctttttgaggtttatctgaagccttacttcctggaggcatacagacccatcaggaaaggcgatattttccttgtgagagggggaatgagagctgtcgagtttaaggtcgttgaaaccgacccctcgccctattgcattgtggcaccagacacagttattcattgcgagggcgagcccattaaaagggaagatgaggaggagagcttgaacgaggtgggttatgatgatattgggggatgtcggaagcagctggcgcagatcaaagaaatggtcgagcttccactgcgtcatccagctttatttaaggcaattggagtcaaacctccaagaggcatcctattgtatggtcctcctgggaccggcaagacgcttattgccagggcagtagctaacgagacaggagctttcttctttcttattaacggaccagaaataatgtccaaactcgcaggtgaatctgagtccaacctgaggaaagccttcgaggaggcggaaaagaatgcaccagccattatcttcatcgacgaactggacgcaatcgcaccaaagcgagaaaagacccatggggaagtagagcgcaggattgtatcacagctcctgactttgatggacgggctgaagcaacgcgctcatgtgatagttatggcagcaaccaacaggcccaacagtatcgaccctgccctcagacggtttggcagattcgaccgcgaggttgatatcgggatcccagacgctaccggtcggctcgagatcctacagatacacacaaaaaatatgaaactcgctgacgatgtcgacttggagcaggtggccaatgagacccatgggcatgtgggggcagacctagccgcactgtgttctgaggcagctctccaagccatcaggaaaaaaatggacctgatcgacctggaagacgagactattgacgcagaagtgatgaatagccttgcagtcacaatggatgatttcaggtgggcactcagccaatccaatccaagcgctctcagggaaacggtagttgaggttcctcaagtgacctgggaggatatagggggactcgaagacgtaaaaagggagctgcaggagctcgtgcagtaccccgtcgagcatccggacaagtttttaaaatttggcatgacaccatctaagggagttctgttctacggccctcctgggtgtggaaagacgctcctggccaaggctattgctaacgagtgtcaggccaatttcatttctattaagggccctgaactcctaaccatgtggttcggcgaaagcgaggctaatgtccgggagatcttcgataaagcccgtcaggcggctccttgcgtgttatttttcgatgagcttgatagcattgctaaggccaggggtggtaatatcggcgacggcggaggagccgctgacagggtaattaaccagatacttacagagatggatggcatgagcaccaaaaaaaacgtgttcataatcggtgccaccaacaggcccgatatcattgacccggcaattctcaggcctggcagactggaccagctgatctacattcctctgcccgatgagaagtctagggtggctatactgaaagctaatctccggaaatctcctgtggctaaggatgtcgacctagaatttctcgcaaaaatgactaacgggttttccggggctgacttgactgaaatatgccaacgcgcatgcaagcttgcaatcagggaaagtattgaatctgagatcaggcgggagcgggagaggcagactaatccaagcgccatggaggtggaagaagatgatcctgtcccggaaattcggagggaccacttcgaggaagccatgcgctttgccaggcgctctgtgtctgacaacgacatcaggaagtatgagatgttcgcacaaacattgcagcaaagtagaggttttgggtccttccgctttccatccggcaaccagggcggagccggtccctctcagggatctggtggcggtacaggtggctctgtatacaccgaagacaatgatgatgacctttacggctag

SEQ ID NO: 170504 - DNA, 4370 bp, Artificial Sequence
  derived and/or modified sequence
taatgacgggaggaagaaaggcacaagcgctgagaaactgcaaaggctgtgggattggggttaccagagggtgcagtgacaatggggtaggagtggggtgctagtcagaaagttcagagtaggggtggttggaggcagcgttgagaaggagcaagaagtgtcagggtggtgatggcgtcttagaagatctccaggttttgggagaagatgggtgtatgggttaccacaataggactagactaatacaagggttcagtctattgtgccacgttcttccaggaggataaactccggagccaatgaactggagccaagtgggagagtccgcctctaagggattaaagggtctcctttcactaatcgatctcgccctattcctttcgttgattggctgagaattccaatccgtcgaggaagcgtagcgttgcggccaattgacgtggcgttactaggcgtgtcgcatcactgaggcgggagccaggccgcaagcgaatttcctgattggctgtgatctgcgggttgctggggagaggcgcggagaggcgggcgagagtccgcagggcaggcgctgattggctgaggtgggagcagcttcccttccgatgattcggctcttctcggctcagtctcagcgaagcgtctgcgaccgtcgtttgagtcgtcgctgccgctgccgctgccactgccactgccacctcgcggatcaggagccagcgttgttcgcccgacgcctcgctgccggtgggaggaagcgagagggaagccgcttgcgggtttgtcgccgctgctcgcccaccgcctggaagagccgagccccggcccagtcggtcgcttgccaccgctcgtagccgttacccgcgggccgccacagccgccggccgggagaggcgcgcgccatggcttctggagccgattcaaaaggtgatgacctatcaacagccattctcaaacagaagaaccgtcccaatcggttaattgttgatgaagccatcaatgaggacaacagtgtggtgtccttgtcccagcccaagatggatgaattgcagttgttccgaggtgacacagtgttgctgaaaggaaagaagagacgagaagctgtttgcatcgtcctttctgatgatacttgttctgatgagaagattcggatgaatagagttgttcggaataaccttcgtgtacgcctaggggatgtcatcagcatccagccatgccctgatgtgaagtacggcaaacgtatccatgtgctgcccattgatgacacagtggaaggcattactggtaatctcttcgaggtataccttaagccgtacttcctggaagcgtatcgacccatccggaaaggagacatttttcttgtccgtggtgggatgcgtgctgtggagttcaaagtggtggaaacagatcctagcccttattgcattgttgctccagacacagtgatccactgcgaaggggagcctatcaaacgagaggatgaggaagagtccttgaatgaagtagggtatgatgacattggtggctgcaggaagcagctagctcagataaaggagatggtggaactgcccctgagacatcctgccctctttaaggcaattggtgtgaagcctcctagaggaatcctgctttacggacctcctggaacaggaaagaccctgattgctcgagctgtagcaaatgagactggagccttcttcttcttgatcaatggtcctgagatcatgagcaaattggctggtgagtctgagagcaaccttcgtaaagcctttgaggaggctgagaagaatgctcctgccatcatcttcattgatgagctagatgccatcgctcccaaaagagagaaaactcatggcgaggtggagcggcgcattgtatcacagttgttgaccctcatggatggcctaaagcagagggcacatgtgattgttatggcagcaaccaacagacccaacagcattgacccagctctacggcgatttggtcgctttgacagggaggtagatattggaattcctgatgctacaggacgcttagagattcttcagatccataccaagaacatgaagctggcagatgatgtggacctggaacaggtagccaatgagactcacgggcatgtgggtgctgacttagcagccctgtgctcagaggctgctctgcaagccatccgcaagaagatggatctcattgacctagaggatgagaccattgatgccgaggtcatgaactctctagcagttactatggatgacttccggtgggccttgagccagagtaacccatcagcactgcgggaaaccgtggtagaggtgccacaggtaacctgggaagacatcgggggcctagaggatgtcaaacgtgagctacaggagctggtccagtatcctgtggagcacccagacaaattcctgaagtttggcatgacaccttccaagggagttctgttctatggacctcctggctgtgggaaaactttgttggccaaagccattgctaatgaatgccaggccaacttcatctccatcaagggtcctgagctgctcaccatgtggtttggggagtctgaggccaatgtcagagaaatctttgacaaggcccgccaagctgccccctgtgtgctattctttgatgagctggattcgattgccaaggctcgtggaggtaacattggagatggtggtggggctgctgaccgagtcatcaaccagatcctgacagaaatggatggcatgtccacaaaaaaaaatgtgttcatcattggcgctaccaaccggcctgacatcattgatcctgccatcctcagacctggccgtcttgatcagctcatctacatcccacttcctgatgagaagtcccgtgttgccatcctcaaggctaacctgcgcaagtccccagttgccaaggatgtggacttggagttcctggctaaaatgactaatggcttctctggagctgacctgacagagatttgccagcgtgcttgcaagctggccatccgtgaatccatcgagagtgagattaggcgagaacgagagaggcagacaaacccatcagccatggaggtagaagaggatgatccagtgcctgagatccgtcgagatcactttgaagaagccatgcgctttgcgcgccgttctgtcagtgacaatgacattcggaagtatgagatgtttgcccagacccttcagcagagtcggggctttggcagcttcagattcccttcagggaaccagggtggagctggccccagtcagggcagtggaggcggcacaggtggcagtgtatacacagaagacaatgatgatgacctgtatggctaagtggtggtggccagcgtgcagtgagctggcctgcctggaccttgttccctgggggtgggggcgcttgcccaggagagggaccaggggtgcgcccacagcctgctccattctccagtctgaacagttcagctacagtctgactctggacagggggtttctgttgcaaaaatacaaaacaaaagcgataaaataaaagcgattttcatttggtaggcggagagtgaattaccaacagggaattgggccttgggcctatgccatttctgttgtagtttggggcagtgcaggggacctgtgtggggtgtgaaccaaggcactactgccacctgccacagtaaagcatctgcacttgactcaatgctgcccgagccctcccttccccctatccaacctgggtaggtgggtaggggccacagttgctggatgtttatatagagagtaggttgatttattttacatgcttttgagttaatgttggaaaactaatcacaagcagtttctaaaccaaaaaatgacatgttgtaaaaggacaataaacgttgggtcaaaatggagcctgagtcctgggccctgtgcctgcttcttttcctgggaacagccttgggctacccaccactcccaaggcattcttccaaatgtgaaatcctggaagtaagattgcaccttcttcctctcctgatcaacatcggtatgatgtctcctgttgcctcaccctttgtctgcagtatcactggataggactggtggaaagggagcagcctgacagagctccaaatgtggagaatatggcatccctccacctatatttgatgtggacggtaaggctaggcctgcaggatcccttatcctgaccaaagactgtgttggggtgccatttgaaaatcgcagggttgcaaaagaatacaatcttacttgcaggtggatattctctatactctcttttaatgcatctaaaaatcccaaacatcccctggttggtgatcacttacagttgtgtccacctttattttatgtactttgattaaaaaaaaaaaactttttgttaatataaaa

SEQ ID NO: 170505 - protein, 827 aa, Artificial Sequence
  derived and/or modified sequence
MTKLSAQVKGSLNITTPGLQIWRIEAMQMVPVPSSTFGSFFDGDCYIILAIHKTASSLSYDIHYWIGQDSSLDEQGAAAIYTTQMDDFLKGRAVQHREVQGNESEAFRGYFKQGLVIRKGGVASGMKHVETNSYDVQRLLHVKGKRNVVAGEVEMSWKSFNRGDVFLLDLGKLIIQWNGPESTRMERLRGMTLAKEIRDQERGGRTYVGVVDGENELASPKLMEVMNHVLGKRRELKAAVPDTVVEPALKAALKLYHVSDSEGNLVVREVATRPLTQDLLSHEDCYILDQGGLKIYVWKGKKANEQEKKGAMSHALNFIKAKQYPPSTQVEVQNDGAESAVFQQLFQKWTASNRTSGLGKTHTVGSVAKVEQVKFDATSMHVKPQVAAQQKMVDDGSGEVQVWRIENLELVPVDSKWLGHFYGGDCYLLLYTYLIGEKQHYLLYVWQGSQASQDEITASAYQAVILDQKYNGEPVQIRVPMGKEPPHLMSIFKGRMVVYQGGTSRTNNLETGPSTRLFQVQGTGANNTKAFEVPARANFLNSNDVFVLKTQSCCYLWCGKGCSGDEREMAKMVADTISRTEKQVVVEGQEPANFWMALGGKAPYANTKRLQEENLVITPRLFECSNKTGRFLATEIPDFNQDDLEEDDVFLLDVWDQVFFWIGKHANEEEKKAAATTAQEYLKTHPSGRDPETPIIVVKQGHEPPTFTGWFLAWDPFKWSNTKSYEDLKAELGNSRDWSQITAEVTSPKVDVFNANSNLSSGPLPIFPLEQLVNKPVEELPEGVDPSRKEEHLSIEDFTQAFGMTPAAFSALPRWKQQNLKKEKGLF

SEQ ID NO: 170506 - protein, 516 aa, Artificial Sequence
  derived and/or modified sequence
MSHALNFIKAKQYPPSTQVEVQNDGAESAVFQQLFQKWTASNRTSGLGKTHTVGSVAKVEQVKFDATSMHVKPQVAAQQKMVDDGSGEVQVWRIENLELVPVDSKWLGHFYGGDCYLLLYTYLIGEKQHYLLYVWQGSQASQDEITASAYQAVILDQKYNGEPVQIRVPMGKEPPHLMSIFKGRMVVYQGGTSRTNNLETGPSTRLFQVQGTGANNTKAFEVPARANFLNSNDVFVLKTQSCCYLWCGKGCSGDEREMAKMVADTISRTEKQVVVEGQEPANFWMALGGKAPYANTKRLQEENLVITPRLFECSNKTGRFLATEIPDFNQDDLEEDDVFLLDVWDQVFFWIGKHANEEEKKAAATTAQEYLKTHPSGRDPETPIIVVKQGHEPPTFTGWFLAWDPFKWSNTKSYEDLKAELGNSRDWSQITAEVTSPKVDVFNANSNLSSGPLPIFPLEQLVNKPVEELPEGVDPSRKEEHLSIEDFTQAFGMTPAAFSALPRWKQQNLKKEKGLF

SEQ ID NO: 170507 - protein, 421 aa, Artificial Sequence
  derived and/or modified sequence
MTKLSAQVKGSLNITTPGLQIWRIEAMQMVPVPSSTFGSFFDGDCYIILAIHKTASSLSYDIHYWIGQDSSLDEQGAAAIYTTQMDDFLKGRAVQHREVQGNESEAFRGYFKQGLVIRKGGVASGMKHVETNSYDVQRLLHVKGKRNVVAGEVEMSWKSFNRGDVFLLDLGKLIIQWNGPESTRMERLRGMTLAKEIRDQERGGRTYVGVVDGENELASPKLMEVMNHVLGKRRELKAAVPDTVVEPALKAALKLYHVSDSEGNLVVREVATRPLTQDLLSHEDCYILDQGGLKIYVWKGKKANEQEKKGAMSHALNFIKAKQYPPSTQVEVQNDGAESAVFQQLFQKWTASNRTSGLGKTHTVGSVGEGQAGAVREPGSRSWARRATWSTTHPPSLTCIFNEDFYAGSGLVLADGDVDKL

SEQ ID NO: 170508 - DNA, 89 bp, Artificial Sequence
  derived and/or modified sequence
ggaacaaaatgaaatcgaacggtaggaatcgtacagaacggaaagaaatggaacggaatggaatgcactcgaatggaaaggagtccaat

SEQ ID NO: 170509 - DNA, 2484 bp, Artificial Sequence
  derived and/or modified sequence
atgaccaagctgagcgcccaggtgaagggcagcctgaacatcaccacccccggcctgcagatctggagaatcgaggccatgcagatggtgcccgtgcccagcagcaccttcggcagcttcttcgacggcgactgctacatcatcctggccatccacaagaccgccagcagcctgagctacgacatccactactggatcggccaggacagcagcctggacgagcagggcgccgccgccatctacaccacccagatggacgacttcctgaagggcagagccgtgcagcacagagaggtgcagggcaacgagagcgaggccttcagaggctacttcaagcagggcctggtgatcagaaagggcggcgtggccagcggcatgaagcacgtggagaccaacagctacgacgtgcagagactgctgcacgtgaagggcaagagaaacgtggtggccggcgaggtggagatgagctggaagagcttcaacagaggcgacgtgttcctgctggacctgggcaagctgatcatccagtggaacggccccgagagcaccagaatggagagactgagaggcatgaccctggccaaggagatcagagaccaggagagaggcggcagaacctacgtgggcgtggtggacggcgagaacgagctggccagccccaagctgatggaggtgatgaaccacgtgctgggcaagagaagagagctgaaggccgccgtgcccgacaccgtggtggagcccgccctgaaggccgccctgaagctgtaccacgtgagcgacagcgagggcaacctggtggtgagagaggtggccaccagacccctgacccaggacctgctgagccacgaggactgctacatcctggaccagggcggcctgaagatctacgtgtggaagggcaagaaggccaacgagcaggagaagaagggcgccatgagccacgccctgaacttcatcaaggccaagcagtacccccccagcacccaggtggaggtgcagaacgacggcgccgagagcgccgtgttccagcagctgttccagaagtggaccgccagcaacagaaccagcggcctgggcaagacccacaccgtgggcagcgtggccaaggtggagcaggtgaagttcgacgccaccagcatgcacgtgaagccccaggtggccgcccagcagaagatggtggacgacggcagcggcgaggtgcaggtgtggagaatcgagaacctggagctggtgcccgtggacagcaagtggctgggccacttctacggcggcgactgctacctgctgctgtacacctacctgatcggcgagaagcagcactacctgctgtacgtgtggcagggcagccaggccagccaggacgagatcaccgccagcgcctaccaggccgtgatcctggaccagaagtacaacggcgagcccgtgcagatcagagtgcccatgggcaaggagcccccccacctgatgagcatcttcaagggcagaatggtggtgtaccagggcggcaccagcagaaccaacaacctggagaccggccccagcaccagactgttccaggtgcagggcaccggcgccaacaacaccaaggccttcgaggtgcccgccagagccaacttcctgaacagcaacgacgtgttcgtgctgaagacccagagctgctgctacctgtggtgcggcaagggctgcagcggcgacgagagagagatggccaagatggtggccgacaccatcagcagaaccgagaagcaggtggtggtggagggccaggagcccgccaacttctggatggccctgggcggcaaggccccctacgccaacaccaagagactgcaggaggagaacctggtgatcacccccagactgttcgagtgcagcaacaagaccggcagattcctggccaccgagatccccgacttcaaccaggacgacctggaggaggacgacgtgttcctgctggacgtgtgggaccaggtgttcttctggatcggcaagcacgccaacgaggaggagaagaaggccgccgccaccaccgcccaggagtacctgaagacccaccccagcggcagagaccccgagacccccatcatcgtggtgaagcagggccacgagccccccaccttcaccggctggttcctggcctgggaccccttcaagtggagcaacaccaagagctacgaggacctgaaggccgagctgggcaacagcagagactggagccagatcaccgccgaggtgaccagccccaaggtggacgtgttcaacgccaacagcaacctgagcagcggccccctgcccatcttccccctggagcagctggtgaacaagcccgtggaggagctgcccgagggcgtggaccccagcagaaaggaggagcacctgagcatcgaggacttcacccaggccttcggcatgacccccgccgccttcagcgccctgcccagatggaagcagcagaacctgaagaaggagaagggcctgttctag

SEQ ID NO: 170510 - DNA, 1551 bp, Artificial Sequence
  derived and/or modified sequence
atgagccacgccctgaacttcatcaaggccaagcagtacccccccagcacccaggtggaggtgcagaacgacggcgccgagagcgccgtgttccagcagctgttccagaagtggaccgccagcaacagaaccagcggcctgggcaagacccacaccgtgggcagcgtggccaaggtggagcaggtgaagttcgacgccaccagcatgcacgtgaagccccaggtggccgcccagcagaagatggtggacgacggcagcggcgaggtgcaggtgtggagaatcgagaacctggagctggtgcccgtggacagcaagtggctgggccacttctacggcggcgactgctacctgctgctgtacacctacctgatcggcgagaagcagcactacctgctgtacgtgtggcagggcagccaggccagccaggacgagatcaccgccagcgcctaccaggccgtgatcctggaccagaagtacaacggcgagcccgtgcagatcagagtgcccatgggcaaggagcccccccacctgatgagcatcttcaagggcagaatggtggtgtaccagggcggcaccagcagaaccaacaacctggagaccggccccagcaccagactgttccaggtgcagggcaccggcgccaacaacaccaaggccttcgaggtgcccgccagagccaacttcctgaacagcaacgacgtgttcgtgctgaagacccagagctgctgctacctgtggtgcggcaagggctgcagcggcgacgagagagagatggccaagatggtggccgacaccatcagcagaaccgagaagcaggtggtggtggagggccaggagcccgccaacttctggatggccctgggcggcaaggccccctacgccaacaccaagagactgcaggaggagaacctggtgatcacccccagactgttcgagtgcagcaacaagaccggcagattcctggccaccgagatccccgacttcaaccaggacgacctggaggaggacgacgtgttcctgctggacgtgtgggaccaggtgttcttctggatcggcaagcacgccaacgaggaggagaagaaggccgccgccaccaccgcccaggagtacctgaagacccaccccagcggcagagaccccgagacccccatcatcgtggtgaagcagggccacgagccccccaccttcaccggctggttcctggcctgggaccccttcaagtggagcaacaccaagagctacgaggacctgaaggccgagctgggcaacagcagagactggagccagatcaccgccgaggtgaccagccccaaggtggacgtgttcaacgccaacagcaacctgagcagcggccccctgcccatcttccccctggagcagctggtgaacaagcccgtggaggagctgcccgagggcgtggaccccagcagaaaggaggagcacctgagcatcgaggacttcacccaggccttcggcatgacccccgccgccttcagcgccctgcccagatggaagcagcagaacctgaagaaggagaagggcctgttctag

SEQ ID NO: 170511 - DNA, 1266 bp, Artificial Sequence
  derived and/or modified sequence
atgaccaagctgagcgcccaggtgaagggcagcctgaacatcaccacccccggcctgcagatctggagaatcgaggccatgcagatggtgcccgtgcccagcagcaccttcggcagcttcttcgacggcgactgctacatcatcctggccatccacaagaccgccagcagcctgagctacgacatccactactggatcggccaggacagcagcctggacgagcagggcgccgccgccatctacaccacccagatggacgacttcctgaagggcagagccgtgcagcacagagaggtgcagggcaacgagagcgaggccttcagaggctacttcaagcagggcctggtgatcagaaagggcggcgtggccagcggcatgaagcacgtggagaccaacagctacgacgtgcagagactgctgcacgtgaagggcaagagaaacgtggtggccggcgaggtggagatgagctggaagagcttcaacagaggcgacgtgttcctgctggacctgggcaagctgatcatccagtggaacggccccgagagcaccagaatggagagactgagaggcatgaccctggccaaggagatcagagaccaggagagaggcggcagaacctacgtgggcgtggtggacggcgagaacgagctggccagccccaagctgatggaggtgatgaaccacgtgctgggcaagagaagagagctgaaggccgccgtgcccgacaccgtggtggagcccgccctgaaggccgccctgaagctgtaccacgtgagcgacagcgagggcaacctggtggtgagagaggtggccaccagacccctgacccaggacctgctgagccacgaggactgctacatcctggaccagggcggcctgaagatctacgtgtggaagggcaagaaggccaacgagcaggagaagaagggcgccatgagccacgccctgaacttcatcaaggccaagcagtacccccccagcacccaggtggaggtgcagaacgacggcgccgagagcgccgtgttccagcagctgttccagaagtggaccgccagcaacagaaccagcggcctgggcaagacccacaccgtgggcagcgtgggcgagggccaggccggcgccgtgagagagcccggcagcagaagctgggccagaagagccacctggagcaccacccacccccccagcctgacctgcatcttcaacgaggacttctacgccggcagcggcctggtgctggccgacggcgacgtggacaagctgtag

SEQ ID NO: 170512 - DNA, 2484 bp, Artificial Sequence
  derived and/or modified sequence
atgacaaaattgtctgcacaggtgaaaggctctctgaacatcaccaccccgggcctgcagatctggcgaatcgaagctatgcagatggtgccagtgccaagcagcactttcgggagtttcttcgacggcgattgttacatcatcttggcgatccacaagacagcttcatctctgtcatacgatatccattattggatcgggcaggacagtagcctagatgaacagggcgctgctgctatttatacgactcagatggacgactttctgaaagggcgggccgtgcagcatcgggaagtgcaaggaaacgaatccgaagcctttcgtggatactttaagcaggggctggtgattaggaaaggtggcgttgcatccgggatgaagcacgttgagacgaatagctacgacgtccaaaggttgctgcatgtgaagggaaaaaggaacgtcgtggccggcgaagtggagatgtcttggaaatcatttaatcgaggcgacgtcttcctccttgacttaggcaagttgattatccagtggaacgggcctgaaagcacaagaatggaacgcctgcgtggaatgaccctggcgaaggagattagagaccaggagagggggggccgtacctatgtaggagtggtcgacggagagaacgagctggcatcacccaagctaatggaggtcatgaaccatgtcctcggaaagcggagagaactgaaagctgcggtgccagataccgtggtagaaccagctctaaaagccgccctgaaactgtatcatgttagtgacagtgaaggaaatttagtggtccgggaggtggccaccagaccccttacacaggatctcctgagccacgaagattgctatattcttgaccagggaggccttaagatctacgtttggaaggggaagaaagcgaacgagcaggagaagaaaggggccatgtcccatgctctgaactttatcaaagccaagcagtatccaccatcaacccaagttgaggtccagaacgacggggctgagtctgccgtgttccagcagctatttcagaaatggaccgcaagtaatcgaacctccggcctcggaaagacgcatacagttggatctgtagctaaggttgaacaagtaaaattcgacgcaaccagtatgcatgtgaagccacaagtggctgctcaacaaaagatggtagatgacggctcaggggaagtgcaggtgtggagaatcgagaatctggaattggtgccagtggacagcaaatggttagggcacttttacgggggggactgttatctcctactctatacgtacttaattggggagaagcagcactatctcctatacgtgtggcagggttctcaggcatcacaagacgagattaccgcctccgcctaccaggcagtgattctggatcagaagtacaatggcgaaccagtccagattcgtgtcccaatgggtaaagagcctcctcacctaatgagtatctttaaaggcagaatggtcgtttatcagggaggaacatcgcggaccaacaatctggagaccggccctagtacaagactcttccaggtccaaggcacaggagctaacaacactaaagcatttgaggtgcctgcccgcgcaaatttccttaactctaacgatgtatttgtcttaaaaactcagagctgctgttatctgtggtgtggtaagggttgctccggggatgaaagggaaatggcaaaaatggtggccgacacaatcagcagaaccgagaagcaggtggtggtggaaggccaagaaccggctaatttttggatggccctcggaggtaaggccccctacgcgaacacgaaaaggctccaagaggagaacctggtcatcacacctcgcctcttcgaatgttcaaacaagacgggcagattcctagcaaccgagattcccgactttaatcaggatgatctggaagaggacgatgtttttctcctggacgtctgggaccaggtgttcttctggatcggcaagcatgccaacgaggaagagaagaaggcagctgccaccaccgcccaagagtacctgaagacacatcctagtgggagagatccagaaacaccaatcatcgttgttaaacaggggcatgagccgcccaccttcaccgggtggttcctcgcatgggatcccttcaaatggagcaacacaaaaagctatgaggacctgaaggctgagctgggtaattcccgggactggtcgcagatcacagccgaggtgactagcccgaaggtagacgtgttcaacgccaatagtaatctgtcttctggtcctttgcctatctttcccctggagcagctggtaaacaagccagttgaagagttacctgagggcgtggatccgtcccgtaaggaggagcacctgagtatagaagattttacccaggcatttggaatgactccggctgcattttccgcgctgccccgctggaagcaacagaatttgaaaaaggagaaagggcttttctag

SEQ ID NO: 170513 - DNA, 1551 bp, Artificial Sequence
  derived and/or modified sequence
atgtcccacgccttgaatttcattaaagcaaagcagtaccccccctcgacccaggtagaggtgcagaacgatggtgccgagtccgcagtttttcagcaactgtttcaaaaatggacagccagcaaccgaacgagcgggctgggcaagacacacacagttgggtctgttgcaaaggtcgaacaggtgaagtttgatgctacgtccatgcacgtgaagccccaggtggccgcgcagcagaagatggtggacgacgggagtggggaggttcaggtttggaggatcgagaatttggaactcgtgccagtcgacagcaagtggttgggccatttttacggaggcgactgttatttactattgtatacatacctcattggggagaagcagcattacctgctgtatgtttggcagggtagtcaggcttcgcaggatgaaatcacggcctcagcctatcaagccgttatcctagaccagaagtacaatggtgaacccgtgcagatcagggttcccatggggaaggagccccctcatctgatgtccatcttcaaggggcggatggtggtgtaccaagggggaaccagccgcacaaataacctcgagaccgggcctagtactagactgtttcaggtccagggaacgggcgccaataataccaaggcatttgaagtgcctgccagggccaattttctaaactccaatgacgtgttcgtgctcaagacccagtcctgctgttatctctggtgtggcaaggggtgctccggcgacgaaagagagatggctaagatggtggccgacactatatctagaacagagaaacaggtcgttgttgagggtcaggagccagctaatttctggatggccctggggggtaaggccccctacgctaatacaaagcgattgcaggaggagaacctagttataactccccggttattcgagtgcagtaataagacgggccggttcctagctaccgagatcccagatttcaatcaggatgatctcgaagaagacgacgtctttctgcttgacgtgtgggaccaggtgttcttctggatcggcaagcacgcaaacgaagaggagaagaaggctgcagccactacagcacaggaatacctgaaaacacatccttccggacgggacccagagacacctataatcgtggtgaaacaaggacacgaacctcctacctttaccggctggtttcttgcctgggatcctttcaaatggtccaataccaaaagctatgaggatctgaaagctgagctcggcaactctcgcgattggtcacagattactgccgaggtaacctcccctaaggtggacgtgtttaacgcgaatagcaacctctcttctggccccctgccaatattccccttggaacagctggtcaacaagcctgtggaggaacttcctgagggcgtcgatccatcccgaaaagaggagcacctgagcatagaggatttcacccaggcgtttggaatgacaccggccgctttcagtgcccttccgagatggaaacagcagaatctaaaaaaagagaagggtttattctag

SEQ ID NO: 170514 - DNA, 1266 bp, Artificial Sequence
  derived and/or modified sequence
atgacaaaactgtccgctcaggtcaagggatccctcaacattacgactcccggactgcagatctggaggatcgaggccatgcagatggtgcccgtgcctagttctacttttggttctttcttcgacggcgactgctacattatattagctatccacaagactgccagttctctgagctatgacattcactactggattgggcaggactcctcactcgacgagcaaggcgcggccgctatatacaccactcagatggatgacttcctgaaagggcgggcagtgcagcaccgcgaagtgcaggggaacgagagtgaggcctttcgggggtactttaagcaggggctcgttattcgcaagggtggtgtcgctagcggcatgaaacatgttgagaccaacagctatgatgtgcagagattgctgcacgtaaaaggaaagcgtaatgttgtcgccggcgaggtggaaatgtcatggaagagcttcaacaggggggacgtgtttctattggacctggggaaattaatcatacaatggaacggcccagagagtacaaggatggaacgcctgagaggaatgaccctggcaaaggagatccgggatcaggagaggggtggccgcacttacgtgggggtcgtagatggcgagaacgagttggcttcaccgaaactcatggaagtcatgaaccacgttctgggcaagcgccgcgagctaaaggcagcggtgcctgacacggtagtggagcccgccctgaaggccgctctgaaactctaccacgtgtccgactcagaggggaacttagtagtcagagaagtggcaacaagacccttgacgcaggacctcctgtctcacgaggattgttacatcctggatcagggcggactcaagatctacgtttggaaaggtaaaaaggctaacgaacaggagaaaaagggcgccatgtcccacgccctcaatttcattaaagcaaagcagtatcctcctagtacacaggtggaagtgcaaaacgatggtgccgagtcagctgtgtttcaacaattgtttcaaaaatggactgcctccaatcggacttcaggactgggcaagacacacacagtaggcagtgttggggagggccaggccggagccgtacgggagccggggagccgatcatgggcaaggagggctacttggagtactacccaccccccatctctgacttgtatctttaatgaggacttttatgccggatccggtcttgtgttagctgatggagatgtggataagctgtag

SEQ ID NO: 170515 - DNA, 2484 bp, Artificial Sequence
  derived and/or modified sequence
atgaccaagctgagcgcccaggtgaagggcagcctgaacatcaccaccccaggcctgcagatctggagaattgaggccatgcagatggtgcctgtgcccagcagcaccttcggcagcttctttgatggagactgctacatcatcctggccatccacaagacagccagcagcctgtcctatgacatccactactggattggccaggacagcagcctggatgagcagggcgccgccgccatctacaccacccagatggatgacttcctgaagggccgggctgtgcagcaccgggaggtgcagggcaatgaaagtgaggccttccggggctacttcaagcagggcctggtgatcagaaaaggaggagtggccagcggcatgaagcacgtggagaccaacagctatgatgtgcagaggctgctgcacgtgaagggcaagagaaatgtggtggccggggaggtggagatgtcctggaagagcttcaacagaggagatgtgttcctgctggacctgggcaagctgatcatccagtggaatggacctgagagcaccaggatggagcggctgcggggcatgaccctggccaaggagatccgggaccaggagcggggcggccgcacctacgtgggcgtggtggatggagaaaatgagctggccagccccaagctgatggaggtgatgaaccacgtgctgggcaagagaagagagctgaaggctgctgtgcctgacacagtggtggagcccgccctgaaggccgccctgaagctgtaccacgtgtctgattctgagggcaacctggtggtgcgggaggtggccacccggcccctgacccaggacctgctgagccatgaggactgctacatcctggaccagggcggcctgaagatctacgtgtggaagggcaagaaggccaatgagcaggagaagaagggggccatgagccacgccctgaacttcatcaaggccaagcagtacccacccagcacccaggtggaggtgcagaatgatggagctgagagcgctgtgttccagcagctgttccagaagtggacagccagcaacagaaccagcggcctgggcaagacccacacagtgggctctgtggccaaggtggagcaggtgaagtttgatgccacctccatgcacgtgaagccccaggtggccgcccagcagaagatggtggatgatggcagcggggaggtgcaggtgtggagaattgagaacctggagctggtgcctgtggacagcaagtggctgggccacttctacggcggggactgctacctgctgctgtacacctacctgattggagagaagcagcactacctgctgtatgtgtggcagggcagccaggccagccaggatgagatcacagccagcgcctaccaggccgtcatcctggaccagaagtacaatggagagcctgtgcagatccgggtgcccatgggcaaggagcccccccacctgatgagcatcttcaagggccgcatggtggtgtaccagggcggcaccagcaggaccaacaacctggagaccggccccagcaccaggctcttccaggtgcagggcactggagccaacaacaccaaggcctttgaggtgcctgcccgggccaacttcctgaacagcaatgatgtgtttgtgctgaagacccagagctgctgctacctgtggtgtgggaagggctgcagcggagatgagcgggagatggccaagatggtggccgacaccatcagcaggacagagaagcaggtggtggtggagggccaggagcccgccaacttctggatggccctgggcggcaaggccccctatgccaacaccaagaggctgcaggaggagaacctggtgatcaccccccggctgtttgaatgtagcaacaagacaggccgcttcctggccacagagatcccagacttcaaccaggatgacctggaggaggatgatgtgttcctgctggatgtgtgggaccaggtgttcttctggattggcaagcacgccaatgaggaggagaagaaggccgccgccaccacagcccaggagtacctgaagacccaccccagcggccgggaccctgagacccccatcatcgtggtgaagcagggccacgagccccccaccttcaccggctggttcctggcctgggaccccttcaagtggagcaacaccaagagctatgaggacctgaaggccgagctgggcaacagccgggactggagccagatcacagctgaggtgaccagccccaaggtggatgtgttcaatgccaacagcaacctgagcagcggccccctgcccatcttccccctggagcagctggtgaacaagcctgtggaggagctgcctgagggcgtggaccccagcaggaaggaggagcacctgagcattgaggacttcacccaggccttcggcatgaccccagctgccttcagcgccctgccccgctggaagcagcagaacctgaagaaggagaagggcctcttctag

SEQ ID NO: 170516 - DNA, 1551 bp, Artificial Sequence
  derived and/or modified sequence
atgagccacgccctgaacttcatcaaggccaagcagtacccacccagcacccaggtggaggtgcagaatgatggagctgagagcgctgtgttccagcagctgttccagaagtggacagccagcaacagaacatctggcctgggcaagacccacacagtgggctctgtggccaaggtggagcaggtgaagtttgatgccacctccatgcacgtgaagccccaggtggccgcccagcagaagatggtggatgatggcagcggggaggtgcaggtgtggagaattgagaacctggagctggtgcctgtggacagcaagtggctgggccacttctatggaggagactgctacctgctgctgtacacctacctgattggagagaagcagcactacctgctgtatgtgtggcagggcagccaggccagccaggatgagatcacagccagcgcctaccaggccgtcatcctggaccagaagtacaacggggagcctgtgcagatccgggtgcccatgggcaaggagcccccccacctgatgagcatcttcaagggccgcatggtggtgtaccagggcggcaccagcaggaccaacaacctggagaccggccccagcaccaggctcttccaggtgcagggcaccggggccaacaacaccaaggcctttgaggtgcctgcccgggccaacttcctgaacagcaatgatgtgtttgtgctgaagacccagagctgctgctacctgtggtgtgggaagggctgcagcggagatgagcgggagatggccaagatggtggccgacaccatcagcaggacagagaagcaggtggtggtggagggccaggagcccgccaacttctggatggccctgggcggcaaggccccctatgccaacaccaagaggctgcaggaggagaacctggtgatcaccccccggctgtttgagtgcagcaacaagacaggccgcttcctggccacagagatcccagacttcaaccaggatgacctggaggaggatgatgtgttcctgctggatgtgtgggaccaggtgttcttctggattggcaagcacgccaatgaggaggagaagaaggctgctgccaccacagcccaggagtacctgaagacccaccccagcggccgggaccctgagacccccatcatcgtggtgaagcagggccacgagccccccaccttcaccggctggttcctggcctgggaccccttcaagtggagcaacaccaagagctatgaggacctgaaggccgagctgggcaacagccgggactggagccagatcacagctgaggtgaccagccccaaggtggatgtgttcaatgccaacagcaacctgagcagcggccccctgcccatcttccccctggagcagctggtgaacaagcctgtggaggagctgcctgagggcgtggaccccagcaggaaggaggagcacctgagcattgaggacttcacccaggccttcggcatgaccccagctgccttcagcgccctgccccgctggaagcagcagaacctgaagaaggagaagggcctcttctag

SEQ ID NO: 170517 - DNA, 1266 bp, Artificial Sequence
  derived and/or modified sequence
atgaccaagctgagcgcccaggtgaagggcagcctgaacatcaccaccccaggcctgcagatctggagaattgaggccatgcagatggtgcctgtgcccagcagcaccttcggcagcttctttgatggagactgctacatcatcctggccatccacaagacagccagcagcctgtcctatgacatccactactggattggccaggacagcagcctggatgagcagggcgccgccgccatctacaccacccagatggatgacttcctgaagggccgggctgtgcagcaccgggaggtgcagggcaatgaaagtgaggccttccggggctacttcaagcagggcctggtgatcagaaaaggaggagtggccagcggcatgaagcacgtggagaccaacagctatgatgtgcagaggctgctgcacgtgaagggcaagagaaatgtggtggccggggaggtggagatgtcctggaagagcttcaacagaggagatgtgttcctgctggacctgggcaagctgatcatccagtggaatggacctgagagcaccaggatggagcggctgcggggcatgaccctggccaaggagatccgggaccaggagcggggcggccgcacctacgtgggcgtggtggatggagaaaatgagctggccagccccaagctgatggaggtgatgaaccacgtgctgggcaagagaagagagctgaaggctgctgtgcctgacacagtggtggagcccgccctgaaggccgccctgaagctgtaccacgtgtctgattctgagggcaacctggtggtgcgggaggtggccacccggcccctgacccaggacctgctgagccatgaggactgctacatcctggaccagggcggcctgaagatctacgtgtggaagggcaagaaggccaatgagcaggagaagaagggggccatgagccacgccctgaacttcatcaaggccaagcagtacccacccagcacccaggtggaggtgcagaatgatggagctgagagcgctgtgttccagcagctgttccagaagtggacagccagcaacagaaccagcggcctgggcaagacccacacagtgggctctgtgggggagggccaggccggggctgtgcgggagcccggcagccgctcctgggcccggcgggccacctggagcaccacccacccccccagcctgacctgcatcttcaatgaagacttctacgccggcagcggcctggtgctggctgatggagatgtggacaagctgtag

SEQ ID NO: 170518 - DNA, 2484 bp, Artificial Sequence
  derived and/or modified sequence
atgaccaagctgagcgcccaggtgaagggcagcctgaacatcaccactccaggtctgcagatttggcgcattgaggcgatgcagatggtcccagtcccaagtagcacgttcggaagtttctttgatggcgactgttatattattcttgccattcacaagacagcttcaagtctgagttacgacatacattactggattggccaagactcttccctagacgaacagggtgcggccgccatttacacaacacagatggacgatttcctgaaagggagggcagttcagcaccgggaagtgcagggcaacgagtctgaagcttttagagggtactttaagcagggcctcgtgatcaggaaagggggggtagcaagcggcatgaaacatgtcgaaaccaactcatatgacgtgcagagattgctccacgtgaagggcaagagaaacgtggtggccggtgaagtcgaaatgtcttggaagagtttcaataggggggacgtttttcttctggatctcggaaagctcatcatccagtggaatggacccgaatccacaaggatggaaaggctcagaggcatgaccttagccaaagaaatccgggaccaagagagaggcggtcgcacatatgtcggagtcgtggatggcgaaaacgaactcgcttctcccaaacttatggaggttatgaatcacgtactgggaaaacggagggagcttaaggcagctgtgcctgacactgtcgttgagcctgcgttgaaggccgccctgaaactttaccacgtgtcagacagtgagggcaatttggtggtacgagaggtggccacacgacccctgacccaggacctgttgagtcatgaagattgttacattctcgatcagggggggctgaagatctacgtgtggaagggcaaaaaggcaaatgagcaggagaagaagggcgccatgagccatgctctgaattttatcaaggccaaacagtatccgcctagcacgcaggtagaggttcaaaacgacggcgcagagtcagccgtgttccagcagttgttccagaagtggactgcctccaacagaacgtctggcttgggaaaaacacacactgtgggcagcgtggctaaagtggagcaggtaaaatttgacgctacgtcaatgcacgtcaagccacaagtggcagcccagcagaagatggtggatgatggctctggagaggtacaggtctggcggatcgaaaatctcgaattagtgcccgtcgacagcaaatggttggggcatttctacggtggagactgctacctactgctgtatacttacctcattggcgagaaacaacactatctactttacgtgtggcagggaagccaagcctctcaggatgagattacagccagcgcatatcaggctgtcattctcgaccagaaatacaatggtgagcccgtccagatccgcgtgcccatgggaaaggagcccccccaccttatgagtatatttaagggcagaatggtggtgtaccaaggaggtacttctaggactaataatctggagacgggtcctagcacaaggctgttccaagtccaagggaccggagcaaataataccaaggccttcgaggtcccagccagggccaactttttgaattctaatgatgtatttgtgctcaagacccagagctgctgttacctctggtgcggaaaaggttgcagcggggatgagcgagagatggctaagatggtggccgataccattagcaggactgagaagcaggtcgtggtggaggggcaggaacccgccaacttttggatggcattgggtggaaaggcaccatatgctaatactaagaggcttcaggaggaaaatctcgtgatcaccccacgcctgtttgaatgcagcaataagaccgggcgttttctcgcaacggagattcctgatttcaatcaggatgatttggaagaggacgacgtgtttctgcttgatgtgtgggatcaggtgtttttctggattgggaaacacgccaatgaggaagagaaaaaggccgctgctaccacagcacaagagtatttaaagacgcacccatcaggacgggacccagagacaccaatcatcgtggtcaagcagggtcatgagccacccactttcaccggctggtttttggcatgggaccccttcaagtggtccaacacgaaatcgtacgaagatttaaaagcagaactcggaaatagtcgtgactggtcccagatcaccgcagaggtgaccagcccaaaagtggatgtcttcaatgccaacagtaacctcagttccggtccactgcctatctttcctttggaacaactggtcaacaagcctgtcgaggaactgccagaaggtgttgatccaagccggaaagaggagcacctttcaatcgaagatttcactcaggcattcggaatgactcctgctgcgttttcggctctgcccagatggaagcagcaaaatttgaagaaagagaagggcttattttag

SEQ ID NO: 170519 - DNA, 1551 bp, Artificial Sequence
  derived and/or modified sequence
atgagccacgccctgaacttcatcaaggccaagcagtaccccccctccacccaggtagaggtgcagaacgatggcgcggaaagcgcggtgttccaacaactgttccaaaaatggacagcttctaacaggaccagtggcctgggaaaaacacacacagtggggtctgttgcaaaagtcgagcaggtgaaattcgacgccacttccatgcatgtaaaaccacaggtcgctgcacagcagaagatggttgatgatggctcgggagaggtccaagtgtggcgaatagaaaacctggaactggttcctgtggacagtaaatggctggggcatttctacggaggagactgctacctgctcttgtacacttatctgattggggagaagcaacactacctactatatgtatggcagggttcacaggcgtcccaggatgagattaccgcctccgcttatcaagcagtgattctggatcagaagtataatggggaacccgtgcagattagagtccccatgggcaaggaacctccgcacttgatgagcatcttcaaggggcggatggtggtgtaccaaggcggaacttccaggactaataacctggagacgggccctagcactaggctgtttcaggtgcaaggcacaggcgcaaacaacacaaaggccttcgaagtgccagcaagagccaactttttaaatagcaatgacgtttttgtgctgaaaactcagagttgttgctacctctggtgcggcaagggctgttccggagacgaaagggaaatggcaaaaatggtggcagataccataagcaggacagaaaaacaggtggtcgtcgaagggcaggaacccgccaatttctggatggctttaggcggtaaggcaccatatgccaatactaaacggttgcaagaggaaaacctcgtgatcactccccggctcttcgagtgctccaacaaaaccggacggtttctggccacggaaatcccagactttaatcaggatgatctcgaggaggacgatgtctttctactggacgtctgggatcaggtgttcttttggatcggcaaacacgccaacgaagaagaaaagaaggctgctgcaaccactgctcaggagtatctgaaaacccacccgagcggtcgggatccagaaacaccaataattgtcgtaaagcagggtcatgaacctccaaccttcaccggctggtttctggcctgggacccttttaaatggtcaaatacaaagtcatatgaggacctcaaagccgagctcggcaacagccgcgattggtctcagattacggcagaagtgactagcccaaaagtggatgtgttcaatgccaacagtaatttgagctcaggcccattgccaatattcccgctggaacagctggtgaacaagcccgtggaagagctgccagagggagttgaccccagtaggaaggaagagcacttatctatagaggacttcacacaggcatttggtatgaccccagcggccttctccgcactccccagatggaagcaacaaaatctgaaaaaggaaaaaggccttttctag

SEQ ID NO: 170520 - DNA, 1266 bp, Artificial Sequence
  derived and/or modified sequence
atgaccaagctgagcgcccaggtgaagggcagcctgaacatcaccactcctggattgcagatctggaggatcgaggccatgcagatggtccctgtgcctagtagcacatttggttcatttttcgacggcgactgttatatcatactggcgatacataagaccgcatccagcctgagctatgacattcattactggatcggtcaggatagcagcctcgatgaacagggtgcagccgcaatctacaccacgcagatggacgatttcctcaagggtagggctgtacaacatagagaagtgcaaggaaacgagtccgaggctttcagaggctacttcaagcaggggctcgtgattcggaagggtggagttgcgagcggcatgaaacatgtggagacaaattcctacgacgttcagagattattacacgttaaaggcaaacggaatgtggtcgcgggcgaggttgaaatgtcctggaagtcttttaacaggggagacgtctttctcttagacttgggaaagctgattattcagtggaatggaccggagtccacacgtatggaacgactgcgcggaatgaccctggctaaagaaatccgtgatcaagagaggggcgggcgtacttacgttggagtcgtcgatggcgagaacgaactcgcttcgcccaaattgatggaggttatgaatcacgtactcggcaaacgcagagaactgaaggcggctgttcctgacactgtcgttgagcctgccttgaaagccgcactgaaactgtatcatgtaagcgactccgagggtaatctagtggtgagggaggtagctacacgaccactgactcaggacctcctttcgcatgaggactgctacatactagatcagggaggcttaaagatctatgtgtggaaggggaagaaggcaaacgaacaggaaaaaaaaggcgcgatgagccatgccctgaacttcataaaagcgaagcagtaccccccgtcaacgcaggtcgaggtacagaacgatggcgcagagtctgcagtgttccagcagctattccaaaagtggacagccagtaatcgaactagcgggctgggtaaaacccacacagtaggcagtgtaggggaaggacaggccggtgctgttcgagagccaggctccaggagttgggcaaggagagccacttggagtactacccatcccccttcattgacctgcatctttaacgaggacttctatgccggctccggacttgtcttggccgacggggacgtggacaaactatag

SEQ ID NO: 170521 - DNA, 2484 bp, Artificial Sequence
  derived and/or modified sequence
atgacgaaactttccgcccaagtcaagggatccctcaacattacaacacccggtctgcagatatggcgaatcgaggcgatgcaaatggtgccggtcccatcatccactttcggcagtttctttgatggcgactgctacattattctggccattcataagactgcaagttccctgtcgtacgacattcattactggatcggtcaagatagctctctcgatgagcagggcgcagcggctatctacacaactcaaatggatgacttcctgaagggacgagccgtccagcatagggaggtgcaggggaatgaaagcgaagcattccgcggatatttcaaacagggattagtgataaggaagggaggcgtggctagtggtatgaaacacgtggaaactaattcttatgacgtgcagcggcttctgcacgtcaagggcaagcgcaacgtcgtggctggtgaagtggagatgagctggaagtccttcaaccgaggagatgtcttccttcttgacctcggcaagctgatcatccaatggaatggcccagagagcaccaggatggagagacttcgtggcatgaccctggccaaggagatccgggaccaggagaggggcggacgaacctatgtaggggtcgttgacggagaaaacgagctggccagcccaaagctgatggaggtaatgaaccatgtcttgggcaagcgaagggagttgaaagcagccgtgcctgacaccgtggtggagcctgcactgaaggccgcactgaagctttaccacgttagtgattctgaaggaaacctcgttgtgcgcgaagtggcgacgaggcctctcacgcaggacttgctgtcccatgaagactgctatattctcgatcagggcggactgaagatctacgtctggaaggggaagaaagcgaatgagcaggagaagaagggggcaatgagtcatgccctgaacttcattaaagccaagcagtaccctcctagcacacaagtagaggtccagaatgatggagcagagtcagctgtattccagcagttattccagaaatggaccgcatctaatagaaccagcgggctcggcaagactcacacagtcggctcagtggccaaggtggagcaggttaagtttgacgccacaagtatgcatgtaaaaccacaagtggcagcacagcagaagatggttgacgatggttctggagaggtgcaggtctggcggatcgagaacctggaacttgtgccggtggactcaaagtggctcggccatttctatggaggagattgttatctcctgttgtacacctacctgatcggcgagaagcagcattacctactgtatgtgtggcagggctcccaggccagccaggacgagattaccgcctctgcctaccaagccgttatcttggatcagaaatataacggcgagccggtgcagatacgggtcccaatgggcaaggaaccacctcacctcatgtccatatttaaaggaaggatggtggtgtatcagggcggaacctcaaggactaacaatctagagacaggcccttctaccagactttttcaggtccagggtacaggcgctaataacacaaaagcatttgaggtgcctgctagggccaactttcttaacagcaacgacgtttttgtgctgaagacccaaagttgctgctacctgtggtgcggtaagggctgctccggagacgagagggagatggctaagatggtggccgataccatcagcaggacggagaaacaggtggtggttgaaggccaagaacccgcaaacttctggatggctcttgggggaaaagccccatacgctaacacgaagaggctgcaggaagagaacctcgtcattactccacggttgttcgagtgtagcaataagacaggcagatttctcgcgacagagattcctgactttaaccaagatgatttggaggaagacgacgtcttcctccttgacgtgtgggatcaggtatttttttggattgggaaacatgcaaacgaagaggagaaaaaagctgccgcaaccaccgcccaggagtaccttaagactcacccaagtggtagagaccctgaaactccgattatcgtcgtgaagcagggccacgagccaccaacctttacgggttggtttctggcatgggacccatttaaatggtccaataccaaaagctacgaggacctgaaggctgagctggggaattcaagagattggtcacaaataacagctgaggtgacttccccaaaagttgacgtgtttaacgctaactctaacctctcgtccggtcctctccctatatttccccttgagcagctggtaaacaaaccagtagaagagctcccggaaggggtagacccttcgcggaaggaggaacatctgagcatcgaggacttcacccaggcttttggcatgacccctgcagcgtttagtgcactgcccaggtggaagcagcagaaccttaagaaagagaaaggccttttctag

SEQ ID NO: 170522 - DNA, 1551 bp, Artificial Sequence
  derived and/or modified sequence
atgtcccatgcgctcaacttcattaaagctaaacagtatcctccatccacccaggtcgaggtacagaatgatggcgcagagtctgctgtttttcaacagcttttccaaaagtggactgcctctaaccggaccagcggattggggaaaacccatactgtaggttcagtggcaaaagtggagcaggtgaaattcgatgcgacaagcatgcacgtgaaaccacaggttgccgcacagcagaaaatggtagacgacggctccggagaggtgcaagtatggagaatagagaatctcgaattggtaccggtagattctaagtggttaggacatttttacggaggtgactgctacctcctgttgtacacctatcttataggggagaaacaacactacctcttatatgtatggcagggcagccaggcttcccaggatgagatcaccgccagcgcctaccaggcagttatcctagatcagaagtataatggggaaccagtccagatacgcgtacctatgggaaaagaacctccccacctgatgtcaatctttaaagggcgtatggttgtctatcagggagggacctctcggaccaacaacctggagactggacctagcactagactgtttcaggtgcaaggcacgggagcgaataacacaaaggcctttgaggtccccgcacgcgcaaactttctgaactccaacgatgtttttgttctgaaaacccaatcatgctgttacttatggtgtggaaagggctgcagcggcgacgaacgcgagatggccaagatggtggctgatacaataagccgcactgaaaagcaagtggtggttgaggggcaggaaccagcaaatttttggatggccctgggtggtaaggctccgtacgccaataccaagagactgcaagaagaaaatctcgtgatcactcccaggttattcgaatgtagtaacaaaaccggcaggttcttagctaccgagattccggattttaatcaggacgatctggaggaagacgatgtgtttctgcttgatgtgtgggaccaggtttttttctggattggcaaacatgccaatgaggaagagaagaaggccgcagcaaccacggctcaagaatacctgaagacccacccctccgggagagaccccgaaacccccatcatagtggttaaacaggggcatgaacctccaacattcacgggctggttcctagcttgggatccctttaagtggtctaacactaagtcttacgaggacctcaaagccgagttggggaactcaagggactggagccagatcacagcagaggtcactagtcccaaagtagacgtgttcaacgccaactctaatctgtcgtcaggacccttgccaatcttccctctcgagcaactggtcaacaaacctgtcgaagagctacccgagggggtagacccgtcccggaaagaggaacatctgagcattgaagacttcacccaagcatttggcatgacccctgccgcattttctgctctgcccagatggaagcagcaaaatttaaagaaagaaaagggcctgttctag

SEQ ID NO: 170523 - DNA, 1266 bp, Artificial Sequence
  derived and/or modified sequence
atgactaaactgagtgcccaagtcaaggggagcttgaacattaccaccccgggattgcagatctggagaatcgaggcaatgcagatggtgccagttccaagctcaacattcggcagctttttcgatggtgattgctatatcatcttagcaatccataagacggcctcctccctttcctacgatatccattactggattggccaggacagcagcctggacgagcagggcgcagcagcaatctacacaacacagatggatgatttcctgaaaggcagggcagtacagcaccgggaagtgcagggcaatgagagcgaggcgttcagaggatatttcaagcagggcctagtaatcagaaaggggggagtggcttctggcatgaaacatgtggaaaccaacagttatgatgtgcagcgattgctgcacgtgaagggtaaacgcaacgttgtggccggagaagtagagatgagttggaagtcatttaacaggggagatgtgttcttgctcgatttaggaaagctgattattcagtggaacggccctgagtcaacccgcatggaacgcctaaggggcatgactctggcgaaagagatcagggaccaggaacggggtggacggacatatgtcggcgtggtagatggcgaaaacgagctggccagtcccaaactgatggaggtcatgaatcacgtcctcgggaaacgaagggaactgaaggccgcagtgcccgacactgtggtagagcctgctttgaaagcagccctgaaactataccacgtgtccgactctgagggcaatttagtggtcagggaggtagcaacacggcctctaacccaggatctactgtctcacgaggattgctatatactggaccaaggaggacttaagatctacgtgtggaaaggcaagaaggcgaacgagcaagagaagaaaggggctatgagtcacgcattaaacttcataaaggccaaacagtatcccccatctacgcaggtcgaggtgcagaatgacggtgccgaatctgcagtctttcaacagttattccagaaatggaccgcaagcaatcggactagcggactgggaaaaacacatacagtgggctctgtcggcgagggccaggccggagccgtgagagagccaggtagcagaagctgggccagacgtgcgacatggagtacaacacaccccccttcgcttacctgtatctttaatgaagacttctacgctggcagcggtcttgtcctggcagacggggatgttgacaaactttag

SEQ ID NO: 170524 - DNA, 6531 bp, Artificial Sequence
  derived and/or modified sequence
acaaaggtcgctcttctgcagccagcttgccacaattccctgagatctcccaggtggcagctgcctccccaagacaggctcactcaccatgaccaagctgagcgcccaagtcaaaggctctctcaacatcaccaccccggggctgcagatatggaggatcgaggccatgcagatggtgcctgttccttccagcacctttggaagcttcttcgatggtgactgctacatcatcctggctatccacaagacagccagcagcctgtcctatgacatccactactggattggccaggactcatccctggatgagcagggggcagctgccatctacaccacacagatggatgacttcctgaagggccgggctgtgcagcaccgcgaggtccagggcaacgagagcgaggccttccgaggctacttcaagcaaggccttgtgatccggaaagggggcgtggcttctggcatgaagcacgtggagaccaactcctatgacgtccagaggctgctgcatgtcaagggcaagaggaacgtggtagctggagaggtagagatgtcctggaagagtttcaaccgaggggatgttttcctcctggaccttgggaagcttatcatccagtggaatggaccggaaagcacccgtatggagagactcaggggcatgactctggccaaggagatccgagaccaggagcggggagggcgcacctatgtaggcgtggtggacggagagaatgaattggcatccccgaagctgatggaggtgatgaaccacgtgctgggcaagcgcagggagctgaaggcggccgtgcccgacacggtggtggagccggcactcaaggctgcactcaaactgtaccatgtgtctgactccgaggggaatctggtggtgagggaagtcgccacacggccactgacacaggacctgctcagtcacgaggactgttacatcctggaccaggggggcctgaagatctacgtgtggaaagggaagaaagccaatgagcaggagaagaagggagccatgagccatgcgctgaacttcatcaaagccaagcagtacccaccaagcacacaggtggaggtgcagaatgatggggctgagtcggccgtctttcagcagctcttccagaagtggacagcgtccaaccggacctcaggcctaggcaaaacccacactgtgggctccgtggccaaagtggaacaggtgaagttcgatgccacatccatgcatgtcaagcctcaggtggctgcccagcagaagatggtagatgatgggagtggggaagtgcaggtgtggcgcattgagaacctagagctggtacctgtggattccaagtggctaggccacttctatgggggcgactgctacctgctgctctacacctacctcatcggcgagaagcagcattacctgctctacgtttggcagggcagccaggccagccaagatgaaattacagcatcagcttatcaagccgtcatcctggaccagaagtacaatggtgaaccagtccagatccgggtcccaatgggcaaggagccacctcatcttatgtccatcttcaagggacgcatggtggtctaccagggaggcacctcccgaactaacaacttggagaccgggccctccacacggctgttccaggtccagggaactggcgccaacaacaccaaggcctttgaggtcccagcgcgggccaatttcctcaattccaatgatgtctttgtcctcaagacccagtcttgctgctatctatggtgtgggaagggttgtagcggggacgagcgggagatggccaagatggttgctgacaccatctcccggacggagaagcaagtggtggtggaagggcaggagccagccaacttctggatggccctgggtgggaaggccccctatgccaacaccaagagactacaggaagaaaacctggtcatcaccccccggctctttgagtgttccaacaagactgggcgcttcctggccacagagatccctgacttcaatcaggatgacttggaagaggatgatgtgttcctactagatgtctgggaccaggtcttcttctggattgggaaacatgccaacgaggaggagaagaaggccgcagcaaccactgcacaggaatacctcaagacccatcccagcgggcgtgaccctgagacccccatcattgtggtgaagcagggacacgagccccccaccttcacaggctggttcctggcttgggatcccttcaagtggagtaacaccaaatcctatgaggacctgaaggcggagcttggcaactctagggactggagccagatcactgctgaggtcacaagccccaaagtggacgtgttcaatgctaacagcaacctcagttctgggcctctgcccatcttccccctggagcagctagtgaacaagcctgtagaggagctccccgagggtgtggaccccagcaggaaggaggaacacctgtccattgaagatttcactcaggcctttgggatgactccagctgccttctctgctctgcctcgatggaagcaacaaaacctcaagaaagaaaaaggactattttgagaagagtagctgtggttgtaaagcagtaccctaccctgattgtagggtctcattttctcaccgatattagtcctacaccaattgaagtgaaattttgcagatgtgcctatgagcacaaacttctgtggcaaatgccagttttgtttaataatgtacctattccttcagaaagatgataccccaaaaggagcctatggtcctcatttcaacttctaaggtcgctagattgtttctatcctgaggtattgcatcaattttaatactcctatagttttctcttcttagaagagcacaaacactccatggaacattagagttctgaggcactaccctagcttgtcctctatcatgactcatttttatctatggcaggtaggctgaagcactttgcaggtttacatcttccccagagtaacagcttttccttttcacatatactttccttactgccttactcagtgggtaagttaaagggctgaaggagagttgaatggtccacaagactaccctcttaagaggtttcacaaattccaaacagtaccagtgagagcagcacttccactggggctaggcttgagacctaaaggcaagtatgaaatgcatatgctacttcactccctctcccaacccttaataatgaggcaaagcaagagcctagtgaaggccaatgctaggtttacaaacttacccagaagcctctgcaaagcttcacaggctcctcagatgaaaataacaggaatcaatggggactacggccagacactggtttgccattctgttccttttaagaagtaacagtgctgcaaggaagtccatgtcagaaagccaacagaaggtgatttccacaactttgaacaggttgttacaagtatcagcaagaatgtgtccttttcagaaataacagtcaaatcaaagaaggttaataaaggctttaatttcatacacacaaaaaaactctatgcataatttaaaaaggaaacaaaaacaaagaaaaaccgtaaaggatacagaggaacagttctgctaaaacacagataaaagtgccgctccatacaaaacataaagaatcagaatcaaaagtcactctgaacataaagaaaaaaaatcatctcacaaataatgtggccacagctgccagaaaacctggtagtggctcaattaggcaaagtgtaggaatctcatttttgtttttctctccttaagtttaaagaaacaacaatgacaataggccagagaagttagggagggaaagaaaagctcaaagggagggaaacctggggacaagaggtgtgcacacccacatgtggtctcactcttcacacaggcccactatttttgaagtagaccagtttagttgactgttcttctttgttctggcatctgactggaccaacctggaacctggtccagaccctcacccactctattcttatgccaatggacatacctatactttgaacctctgtacttttaagaaaagtccaatgttacaaaatcaaatgcttatattcagactggcacactttttaaataaaaactccatacacctcagacatatagcacacatggagacaacttactaattgtgtgtaagtatgatacaatgaatgagactgcctgaagtctagtaatcaaagcatgccataaggtgaatgattgtggttaaacacagcaaaataattgtcacaaaactttcaaggcctaacaaattagaattttccaataaaaaatatatattttttcagatgttaataagacatatcagtagagacaaaattaggattttgaagtaatgcaataaaaagatgttggagggcagaagtctatttagtttttgtatacacttgcaagagtgcattactcagtataaagcaaaatggggaggaaaaagacatccatccattttattggaacacttttatgtgacttgaatctggtgttaggttgttgatttttctaaaaatctcctatatatacaaaatccatatgtacttggagatccagctgttgccccctgtttaaaacaaaagaccacctcggggggtcaattaaattaaaaaggccctccaaccaccctaaatgggataactaagagtatctactgcagtcatttcagaggacagagaaggaaaatattttaatttgctttaatataacctcttttcagtagatcacaaatgagtttacaaactacttttttttctctttaatttaggtgtttgcagataattttcattatatccgtagctgtatgtgtgtatagttacataatggtaactacacacgatacagaagaatcagtaaattcatggattattttgctgaggttttaaattttaaagcctctgtttcagaattttatacttgatcaaggagaaaaataaatgtgtagtctaacatttgctttctggagttaattaactgatctgtaagaaccactgcatatgtcttaaaatgtaaacatatttacatttgttgtatttgttattgagcctttaaggttaggcccagaatgaacagaccatagcaagtaaacaaataatttttagaatcaaagtattaatagaagaccagttcatggatttgcttattctatcctgctgagacaaaactcatgagtgtgcacacacatgtgaatatatccctacgaaacagtctatcttctcataggcttaaattatagtcatggctattaaagaaattaacagcatccagccacatgcaactttccaaccttcagtactattaggtgattaaaatcaacaaatatgaagtttagttcatttttcccttaaaattccaacaaagatcaaaaggttgtatctagaactaattgccatcaagttccaattcaatgtcatttaaagtaatgtaaccacacatttggtattttcaataggaaggttaattaggtattgtgcaaactgcctgcaacggaagcactcagtccttatctaacttgtcccttcctggccccaacatgctaactgccccatccccaattctgggcaaactgatcacaatgtgcaaaaaataatatattatctatttataattttaaaatatatacagccagctcaaaaacaacaacaaaccccatcaacatagtccagctgaaatctccactggtagtcaaagaagtagattaaaggagtaaaggaaggagaaggctgatagggccacaagaatggacagacatcaagtaaaatttgagtcccaaacatgcaagtacatgagcagtgagataacttatatattccaataacctattttcaacaactcctgcccaagacatgaagatcaaatcaggtttctgaggtaagtgtacttctaaaccatacacacatgaaagctatgaaagcaattcaaatgaggctgcttcatgaggcaatctagacttatggcattatttctacttttctccatgttttaattgcagcctgcactttaaatctttcccaataatttttaacagtgcctctcaaatgcaaagacacgtaaaagaattaataactagccaaagaattttatcaccgcttcactcatttataagaaaaccaattatttccaagcaaaatcaaaccaaaccaaagaggctcctggtagaaatgaaacaaaactttaaagctagttttaaaacaaatattttcctctgctctaaactactctggcgttttctaccactctaccattttggaacattcattacaataaggtatataggtagatggtaggaggcaaagcatttatcagtagttgagcaaaactgctgaggccatttataattcaaagaatgaaaacttagaatagtttactacattagaatacatccaagttccaagagtaggactggagctctcttaaggcaatctttcagaaaagatgttgcatcttctgtgatgatggtttgtgttttttttgtttttgttttcgttttttttaatgagatggagtctcac

SEQ ID NO: 170525 - DNA, 1968 bp, Artificial Sequence
  derived and/or modified sequence
acaattccctgagatctcccaggtggcagctgcctccccaagacaggctgcactcaaactgtaccatgtgtctgactccgaggggaatctggtggtgagggaagtcgccacacggccactgacacaggacctgctcagtcacgaggactgttacatcctggaccaggggggcctgaagatctacgtgtggaaagggaagaaagccaatgagcaggagaagaagggagccatgagccatgcgctgaacttcatcaaagccaagcagtacccaccaagcacacaggtggaggtgcagaatgatggggctgagtcggccgtctttcagcagctcttccagaagtggacagcgtccaaccggacctcaggcctaggcaaaacccacactgtgggctccgtggccaaagtggaacaggtgaagttcgatgccacatccatgcatgtcaagcctcaggtggctgcccagcagaagatggtagatgatgggagtggggaagtgcaggtgtggcgcattgagaacctagagctggtacctgtggattccaagtggctaggccacttctatgggggcgactgctacctgctgctctacacctacctcatcggcgagaagcagcattacctgctctacgtttggcagggcagccaggccagccaagatgaaattacagcatcagcttatcaagccgtcatcctggaccagaagtacaatggtgaaccagtccagatccgggtcccaatgggcaaggagccacctcatcttatgtccatcttcaagggacgcatggtggtctaccagggaggcacctcccgaactaacaacttggagaccgggccctccacacggctgttccaggtccagggaactggcgccaacaacaccaaggcctttgaggtcccagcgcgggccaatttcctcaattccaatgatgtctttgtcctcaagacccagtcttgctgctatctatggtgtgggaagggttgtagcggggacgagcgggagatggccaagatggttgctgacaccatctcccggacggagaagcaagtggtggtggaagggcaggagccagccaacttctggatggccctgggtgggaaggccccctatgccaacaccaagagactacaggaagaaaacctggtcatcaccccccggctctttgagtgttccaacaagactgggcgcttcctggccacagagatccctgacttcaatcaggatgacttggaagaggatgatgtgttcctactagatgtctgggaccaggtcttcttctggattgggaaacatgccaacgaggaggagaagaaggccgcagcaaccactgcacaggaatacctcaagacccatcccagcgggcgtgaccctgagacccccatcattgtggtgaagcagggacacgagccccccaccttcacaggctggttcctggcttgggatcccttcaagtggagtaacaccaaatcctatgaggacctgaaggcggagcttggcaactctagggactggagccagatcactgctgaggtcacaagccccaaagtggacgtgttcaatgctaacagcaacctcagttctgggcctctgcccatcttccccctggagcagctagtgaacaagcctgtagaggagctccccgagggtgtggaccccagcaggaaggaggaacacctgtccattgaagatttcactcaggcctttgggatgactccagctgccttctctgctctgcctcgatggaagcaacaaaacctcaagaaagaaaaaggactattttgagaagagtagctgtggttgtaaagcagtaccctaccctgattgtagggtctcattttctcaccgatattagtcctacaccaattgaagtgaaattttgcagatgtgcctatgagcacaaacttctgtggcaaatgccagttttgtttaataatgtacctattccttcagaaagatgataccccaaaagg

SEQ ID NO: 170526 - DNA, 1454 bp, Artificial Sequence
  derived and/or modified sequence
caggctcactcaccatgaccaagctgagcgcccaagtcaaaggctctctcaacatcaccaccccggggctgcagatatggaggatcgaggccatgcagatggtgcctgttccttccagcacctttggaagcttcttcgatggtgactgctacatcatcctggctatccacaagacagccagcagcctgtcctatgacatccactactggattggccaggactcatccctggatgagcagggggcagctgccatctacaccacacagatggatgacttcctgaagggccgggctgtgcagcaccgcgaggtccagggcaacgagagcgaggccttccgaggctacttcaagcaaggccttgtgatccggaaagggggcgtggcttctggcatgaagcacgtggagaccaactcctatgacgtccagaggctgctgcatgtcaagggcaagaggaacgtggtagctggagaggtagagatgtcctggaagagtttcaaccgaggggatgttttcctcctggaccttgggaagcttatcatccagtggaatggaccggaaagcacccgtatggagagactcaggggcatgactctggccaaggagatccgagaccaggagcggggagggcgcacctatgtaggcgtggtggacggagagaatgaattggcatccccgaagctgatggaggtgatgaaccacgtgctgggcaagcgcagggagctgaaggcggccgtgcccgacacggtggtggagccggcactcaaggctgcactcaaactgtaccatgtgtctgactccgaggggaatctggtggtgagggaagtcgccacacggccactgacacaggacctgctcagtcacgaggactgttacatcctggaccaggggggcctgaagatctacgtgtggaaagggaagaaagccaatgagcaggagaagaagggagccatgagccatgcgctgaacttcatcaaagccaagcagtacccaccaagcacacaggtggaggtgcagaatgatggggctgagtcggccgtctttcagcagctcttccagaagtggacagcgtccaaccggacctcaggcctaggcaaaacccacactgtgggctccgtgggtgagggccaggcgggggcagtgagggagccaggatccaggagctgggccaggagagccacttggtccaccacccaccctccttccctgacgtgcatcttcaacgaagacttttacgctggctctgggcttgtcctagcagatggggacgtggacaaactctagttgtcacaaaaagggagctgagagggctgggcatggtggcacatgcctgtaatcccagcactttgggaggctgaggcgggtggatcacctgaggtcaggagtttgagattagcctaacatggtgaaaccccgtctctactgaaaaaaagaactaataaattagccaagcatggt

SEQ ID NO: 170527 - protein, 114 aa, Artificial Sequence
  derived and/or modified sequence
TGTRLLGWVALCLLAAGCFHAKVTQTPGYLVKGKGRKTKMYCTPKNGHTFVCWYQQNQNKEFMFLISFQNEQVLQEMEMHKKRFSSQCPKNPPCSLAILSSEPGDTALYLCATS

SEQ ID NO: 170528 - protein, 145 aa, Artificial Sequence
  derived and/or modified sequence
MSWAPVLLMLFVYCTGCGPQPVLHQPPAMSSALGTTIRLTCTLRNDHDIGVYSVYWYQQRPGHPPRFLLRYFSQSDKSQGPQVPPRFSGSKDVARNRGYLSISELQPEDEAMYYCAMGARSSEKEEREREWEEEMEPTAARTRVP

SEQ ID NO: 170529 - DNA, 345 bp, Artificial Sequence
  derived and/or modified sequence
accggcaccagactgctgggctgggtggccctgtgcctgctggccgccggctgcttccacgccaaggtgacccagacccccggctacctggtgaagggcaagggcagaaagaccaagatgtactgcacccccaagaacggccacaccttcgtgtgctggtaccagcagaaccagaacaaggagttcatgttcctgatcagcttccagaacgagcaggtgctgcaggagatggagatgcacaagaagagattcagcagccagtgccccaagaaccccccctgcagcctggccatcctgagcagcgagcccggcgacaccgccctgtacctgtgcgccaccagctag

SEQ ID NO: 170530 - DNA, 345 bp, Artificial Sequence
  derived and/or modified sequence
acgggcacacggttgctcgggtgggtagctctgtgcctccttgccgcaggctgctttcacgctaaagttacccaaacaccaggatacctggtgaagggcaagggaagaaagactaagatgtactgtacccccaagaatggccatacttttgtgtgctggtatcagcagaatcagaataaagagtttatgttcctcatcagtttccagaacgagcaggttctacaggaaatggaaatgcacaagaagcgcttcagttctcagtgcccaaagaacccgccttgttccctggccatattgagctctgagcccggcgacaccgcactgtacctgtgtgcaacgtcatag

SEQ ID NO: 170531 - DNA, 345 bp, Artificial Sequence
  derived and/or modified sequence
actggcacccggctgctgggctgggtggccctgtgcctgctggccgccggctgcttccacgccaaggtgacccagaccccaggctacctggtgaagggcaagggcaggaagaccaagatgtactgcacccccaagaatggccacacctttgtgtgctggtaccagcagaaccagaacaaggagttcatgttcctgatctccttccagaatgagcaggtgctgcaggagatggagatgcacaagaagcgcttcagcagccagtgccccaagaaccccccctgcagcctggccatcctgagcagcgagcccggggacacagccctgtacctgtgtgccaccagctag

SEQ ID NO: 170532 - DNA, 345 bp, Artificial Sequence
  derived and/or modified sequence
accggcacccggctgctgggctgggtggccctgtgcctgctggccgccgggtgcttccacgccaaggtgacgcagactcctggctatctggtcaagggtaagggacggaagactaagatgtactgtacccccaagaatggacatacctttgtgtgctggtaccagcaaaatcagaacaaggagttcatgttcctcattagcttccagaacgagcaggtgttacaggaaatggagatgcacaagaaaagattctctagccagtgcccaaaaaacccaccttgttcgctggcaatcctgtcatcagaaccaggggatacggctctgtacctatgtgccacatcgtag

SEQ ID NO: 170533 - DNA, 345 bp, Artificial Sequence
  derived and/or modified sequence
accggaacgaggctgttaggatgggtcgcactgtgtctgctggccgcaggatgcttccacgctaaggttacccagactcctggatatctcgtgaaaggtaagggccgaaagacaaaaatgtactgcactcccaagaacggacatacattcgtatgttggtaccagcagaatcaaaacaaggagtttatgttcctgatctcatttcaaaacgagcaggtactccaagagatggaaatgcataaaaagcgatttagctcgcaatgtcccaagaaccctccttgcagccttgcaattctatcatctgagccaggtgacactgccttatatctgtgcgcaactagctag

SEQ ID NO: 170534 - DNA, 342 bp, Artificial Sequence
  derived and/or modified sequence
acgggcaccaggcttctcggctgggtagctctttgtctcctggcagcaggctgttttcatgccaaagtcacacagactccaggatatttggtcaaaggaaaaggaaggaaaacaaagatgtattgtacccccaaaaacggacatacttttgtttgttggtatcagcagaatcagaataaagagtttatgtttttgatttcctttcagaatgaacaagttcttcaagaaatggagatgcacaagaagcgattctcatctcaatgccccaagaacccaccctgcagcctggcaatcctgtcctcggaaccgggagacaccgcactgtatctctgtgccaccagt

SEQ ID NO: 170535 - DNA, 438 bp, Artificial Sequence
  derived and/or modified sequence
atgtcatgggccccggtactgctgatgctttttgtgtactgcactggttgtggcccacagcctgttcttcaccaacccccagctatgtcaagcgcactcggcacgaccatacggctaacgtgtaccctgcgtaacgaccatgacattggagtatactccgtctactggtatcagcagcggccaggtcatccgccccgcttcctcctccggtacttcagccaaagtgataagtcccaaggcccccaggtgcctcctcggtttagtgggagcaaagatgtggccaggaataggggctatctatcaatcagcgaactgcagcccgaggatgaagccatgtactattgtgccatgggcgcccggagctcagagaaggaggaaagagagcgagagtgggaggaggagatggagcccaccgccgctaggacccgcgtgccctag

SEQ ID NO: 170536 - DNA, 438 bp, Artificial Sequence
  derived and/or modified sequence
atgtcctgggcccctgtgctgctgatgctgtttgtgtactgcaccggctgcggcccccagcctgtgctgcaccagcccccagccatgagcagcgccctgggcaccaccatccggctgacctgcaccctgagaaatgaccatgacattggagtgtacagcgtgtactggtaccagcagaggcctggccaccccccacgcttcctgctgcgctacttcagccagagcgacaagagccagggcccccaggtgcccccacgcttcagcggcagcaaggatgtggccaggaacagaggctacctgagcatcagcgagctgcagccagaagatgaggccatgtactactgtgccatgggcgcccggagcagcgagaaggaggagcgggagcgggagtgggaggaggagatggagcccacagctgcccggaccagggtgccctag

SEQ ID NO: 170537 - DNA, 438 bp, Artificial Sequence
  derived and/or modified sequence
atgagctgggcccccgtgctgctgatgctgttcgtgtactgcaccggatgtgggccacagccagtcctgcatcagcctcctgcaatgagttctgcactcggaacaacaatcaggctcacgtgtaccctgcgtaacgaccatgacattggtgtgtattccgtatactggtatcagcaaagacctggacacccaccccgatttctgcttcgctatttctcacagtccgacaaatctcaaggtccccaggtgccccctcggttttccggctcgaaagacgtggcacggaaccgtggctaccttagcatttcagagctgcagcctgaggacgaagcaatgtattattgcgcgatgggtgccagatcctcggaaaaggaggaacgcgaaagggagtgggaagaggagatggaacctaccgcggctagaacccgagtcccatag

SEQ ID NO: 170538 - DNA, 755 bp, Artificial Sequence
  derived and/or modified sequence
agaaagtctgggatggtagtggccaggaacggggtgtgccacggccccacctctcagagcagggaggaggatgctgggccagcccttggggaccccaggcaccgtggccacaggagtcagagctctgcatgtctgcaccatgtcctgggctcctgtcctgctcatgctgtttgtctactgcacaggttgtggtcctcagccggtgctgcatcagccgccggccatgtcctcggcccttggaaccacaatccgcctcacctgcaccctgaggaacgaccatgacatcggtgtgtacagcgtctactggtaccagcagaggccgggccaccctcccaggttcctgctgagatatttctcacaatcagacaagagccagggcccccaggtcccccctcgcttctctggatccaaagatgtggccaggaacagggggtatttgagcatctctgagctgcagcctgaggacgaggctatgtattactgtgctatgggggcccgcagctcggagaaggaggagagggagagggagtgggaggaagaaatggaacccactgcagccaggacacgtgtcccttgaactgaagacagcagaggcacgcatccccttggagagactgtcatggaagagggtggagccgccgcccgaagcgccgaggaggctgagccactcagcatctcctggtcctgcagtgttgctgtaaatccccattggagactgcattagggaattaaagctgcttgtcactttttgctga

SEQ ID NO: 170539 - DNA, 438 bp, Artificial Sequence
  derived and/or modified sequence
atgtcttgggccccagtgttgttgatgctcttcgtgtactgtaccggctgtgggccacagccagtgctccatcagcccccagccatgtccagtgcgctggggaccactatccggctaacatgcaccctgcgtaacgaccacgatatcggcgtgtactccgtctattggtaccagcagaggccagggcatccgcctcggttccttctgagatatttctcccagagcgacaaaagccagggtccccaagtaccgcctagattttctggatccaaagacgtggctagaaaccgcggatacctctccatttctgaactgcagcctgaggacgaagccatgtactactgcgcgatgggcgcaagaagcagcgaaaaggaagagagagagcgtgagtgggaagaggagatggaaccaaccgcggcaaggacccgcgtcccctag

SEQ ID NO: 170540 - DNA, 438 bp, Artificial Sequence
  derived and/or modified sequence
atgagctgggcccccgtgctgctgatgctgttcgtgtactgcaccggctgcggcccccagcccgtgctgcaccagccccccgccatgagcagcgccctgggcaccaccatcagactgacctgcaccctgagaaacgaccacgacatcggcgtgtacagcgtgtactggtaccagcagagacccggccacccccccagattcctgctgagatacttcagccagagcgacaagagccagggcccccaggtgccccccagattcagcggcagcaaggacgtggccagaaacagaggctacctgagcatcagcgagctgcagcccgaggacgaggccatgtactactgcgccatgggcgccagaagcagcgagaaggaggagagagagagagagtgggaggaggagatggagcccaccgccgccagaaccagagtgccctag

SEQ ID NO: 170541 - protein, 532 aa, Artificial Sequence
  derived and/or modified sequence
MLLDAGPQFPAIGVGSFARHHHHSAAAAAAAAAEMQDRELSLAAAQNGFVDSAAAHMGAFKLNPGAHELSPGQSSAFTSQGPGAYPGSAAAAAAAAALGPHAAHVGSYSGPPFNSTRDFLFRSRGFGDSAPGGGQHGLFGPGAGGLHHAHSDAQGHLLFPGLPEQHGPHGSQNVLNGQMRLGLPGEVFGRSEQYRQVASPRTDPYSAAQLHNQYGPMNMNMGMNMAAAAAHHHHHHHHHPGAFFRYMRQQCIKQELICKWIDPEQLSNPKKSCNKTFSTMHELVTHVSVEHVGGPEQSNHVCFWEECPREGKPFKAKYKLVNHIRVHTGEKPFPCPFPGCGKVFARSENLKIHKRTHTGEKPFQCEFEGCDRRFANSSDRKKHMHVHTSDKPYLCKMCDKSYTHPSSLRKHMKVHESSPQGSESSPAASSGYESSTPPGLVSPSAEPQSSSNLSPAAAAAAAAAAAAAAAVSAVHRGGGSGSGGAGGGSGGGSGSGGGGGGAGGGGGGSSGGGSGTAGGHSGLSSNFNEWYV

SEQ ID NO: 170542 - protein, 162 aa, Artificial Sequence
  derived and/or modified sequence
PPPPPPPPAPPPPPPLNPKKSCNKTFSTMHELVTHVSVEHVGGPEQSNHVCFWEECPREGKPFKAKYKLVNHIRVHTGEKPFPCPFPGCGKVFARSENLKIHKRTHTGEKPFQCEFEGCDRRFANSSDRKKHMHVHTSDKPYLCKMCDKSYTHPSSLRKHMK

SEQ ID NO: 170543 - DNA, 2698 bp, Artificial Sequence
  derived and/or modified sequence
atgctcctggacgcgggtccgcagttcccggccatcggggtgggcagcttcgcgcgccaccatcaccactccgccgcggcggcggcggcggctgccgccgagatgcaggaccgtgaactgagcctggcggcggcgcagaacggcttcgttgactccgccgccgcgcacatgggagccttcaagctcaacccgggcgcgcacgagctgtccccgggccagagctcggcgttcacgtcgcagggccccggcgcctaccccggctccgctgcggctgccgctgcggccgcagcgctcgggccccacgccgcgcacgttggctcctactctgggccgcccttcaactccacccgggacttcctgttccgcagccgcggcttcggggactcggcgccgggcggcgggcagcacgggctgttcgggccgggcgcgggcggcctgcaccacgcgcactcggacgcgcagggccacctcctcttcccgggcctgccagagcagcacgggccgcacggctcgcagaatgtgctcaacgggcagatgcgcctcgggctgcccggcgaggtgttcgggcgctcggagcaataccgccaggtggccagcccgcggaccgacccctactcggcggcgcaactccacaaccagtacggccccatgaatatgaacatgggtatgaacatggcagcagccgcggcccaccaccaccaccaccaccaccaccaccccggtgcctttttccgctatatgcggcagcagtgcatcaagcaggagctaatctgcaagtggatcgaccccgagcaactgagcaatcccaagaagagctgcaacaaaactttcagcaccatgcacgagctggtgacacacgtctcggtggagcacgtcggcggcccggagcagagcaaccacgtctgcttctgggaggagtgtccgcgcgagggcaagcccttcaaggccaaatacaaactggtcaaccacatccgcgtgcacacaggcgagaaacccttcccctgccccttcccgggctgtggcaaagtcttcgcgcgctccgagaacctcaagatccacaaaaggacccacacaggggagaagccgttccagtgtgagtttgagggctgcgaccggcgcttcgccaacagcagcgacaggaagaagcacatgcacgtccacacctccgataagccctatctctgcaagatgtgcgacaagtcctacacgcaccccagctcgctgcggaagcacatgaaggtccatgagtcctccccgcagggctctgaatcctccccggccgccagctccggctatgagtcgtccacgcccccggggctggtgtcccccagcgccgagccccagagcagctccaacctgtccccagcggcggcggcagcggcggcggcggctgcggcggcggcggccgcggtgtccgcggtgcaccggggcggaggctcgggcagtggcggcgcgggaggcggctcaggcggcggcagcggcagtggcgggggcggcggcggggcgggcggcgggggcggcggcagctctggcgggggcagcgggacagccgggggtcacagcggcctctcctccaacttcaatgaatggtacgtgtgacgggtcggggcctctctccctctccctgtccccaccccagcgcagcagccctccccgcagctagcagcgagggcaccttgtgatcatgttgttaaaattatgaatctgatttttatgatgatgaaaattttaccagcagaaggattttttaaagttttttttttttttttaataataatctaggcatgaagagcaaaaatatcccttccggagtctttgaagctgaaaatataaaacaaataaaaaataaaaaaataaaaacccacaaaaatgttgaaccaaacctccctgctaatctccatgcccacgttctttcccaccctgttcccagtcttctgacaaactgtgtacatagcggactcctcctttctcctccgaggtggttttaaaggctttttggtgtatagaagtttgtccatttgtaaaactccggattgcgttcctccccgccttccgccccttcccttccctaaagtgatgggctttctcttttctctttttagtttacccggtttctttttaagtaatgtggaagaaaatggtttattttgtattgtggtattgaatattgtgttcctttttatgaggcaacctgattgtaaacttcatgtaactatagactggaaaaaatgagccgtgccaaagtctcccttctgtttcttcagcacattgacccatagcacacacatacacaccaccaccaacaacgcttgtgaatgtatttttctgttagctgggtttacatgtgatgttttagtgcttttgcaagttcaatttgttagttcctgtatgaaagattgtgggggaaaaataaacgtcgtgccgttagctttttccgtaataacacccttccttctgtaaatacccgttaccatatttatccatttgtaattaaattatggtattaacttgctacagaggaaacaatatttataaagaatgtttcttaactataaatatgtacaattgtgggcataaactgtttcagattttttatttgaaggttttaagtggtttgatcatttcttgtgatgttttgagagtaatgcatacagaaatataataaaatgtgttgaaactgcaaaaaaaaaaaaaaaaa

SEQ ID NO: 170544 - DNA, 1599 bp, Artificial Sequence
  derived and/or modified sequence
atgctgctggacgccggcccccagttccccgccatcggcgtgggcagcttcgccagacaccaccaccacagcgccgccgccgccgccgccgccgccgccgagatgcaggacagagagctgagcctggccgccgcccagaacggcttcgtggacagcgccgccgcccacatgggcgccttcaagctgaaccccggcgcccacgagctgagccccggccagagcagcgccttcaccagccagggccccggcgcctaccccggcagcgccgccgccgccgccgccgccgccgccctgggcccccacgccgcccacgtgggcagctacagcggcccccccttcaacagcaccagagacttcctgttcagaagcagaggcttcggcgacagcgcccccggcggcggccagcacggcctgttcggccccggcgccggcggcctgcaccacgcccacagcgacgcccagggccacctgctgttccccggcctgcccgagcagcacggcccccacggcagccagaacgtgctgaacggccagatgagactgggcctgcccggcgaggtgttcggcagaagcgagcagtacagacaggtggccagccccagaaccgacccctacagcgccgcccagctgcacaaccagtacggccccatgaacatgaacatgggcatgaacatggccgccgccgccgcccaccaccaccaccaccaccaccaccaccccggcgccttcttcagatacatgagacagcagtgcatcaagcaggagctgatctgcaagtggatcgaccccgagcagctgagcaaccccaagaagagctgcaacaagaccttcagcaccatgcacgagctggtgacccacgtgagcgtggagcacgtgggcggccccgagcagagcaaccacgtgtgcttctgggaggagtgccccagagagggcaagcccttcaaggccaagtacaagctggtgaaccacatcagagtgcacaccggcgagaagcccttcccctgccccttccccggctgcggcaaggtgttcgccagaagcgagaacctgaagatccacaagagaacccacaccggcgagaagcccttccagtgcgagttcgagggctgcgacagaagattcgccaacagcagcgacagaaagaagcacatgcacgtgcacaccagcgacaagccctacctgtgcaagatgtgcgacaagagctacacccaccccagcagcctgagaaagcacatgaaggtgcacgagagcagcccccagggcagcgagagcagccccgccgccagcagcggctacgagagcagcaccccccccggcctggtgagccccagcgccgagccccagagcagcagcaacctgagccccgccgccgccgccgccgccgccgccgccgccgccgccgccgccgccgtgagcgccgtgcacagaggcggcggcagcggcagcggcggcgccggcggcggcagcggcggcggcagcggcagcggcggcggcggcggcggcgccggcggcggcggcggcggcagcagcggcggcggcagcggcaccgccggcggccacagcggcctgagcagcaacttcaacgagtggtacgtgtag

SEQ ID NO: 170545 - DNA, 1599 bp, Artificial Sequence
  derived and/or modified sequence
atgctgttagacgctgggcctcaatttccggcgatcggcgtagggagcttcgcgcgtcaccaccaccactccgcagctgccgcggcagccgccgcagcagagatgcaagatagagaattatcactggctgcagcacagaatgggtttgtggactctgcggctgcacacatgggggcttttaaactgaacccaggtgcacatgaactgtcccctgggcaatcttctgccttcacatctcaggggcccggtgcctatcccggcagcgccgctgcggccgcagctgcagcagccctgggcccacacgctgcacacgttgggagctactccggccccccattcaactccacgcgcgatttcctgttccgatctcgaggcttcggcgattcagcccccgggggaggtcagcatgggctcttcggaccaggcgccggtggacttcaccacgctcacagcgacgcacagggccatttactgtttcctgggctcccagaacagcatgggccccacggcagccagaacgtgctgaatggccaaatgagactgggcttgcccggggaagtctttggtcggtccgagcagtacaggcaggtggcttcgccccggaccgacccctatagtgcagcacagcttcacaaccagtacggtcccatgaacatgaacatgggaatgaatatggccgccgcggccgcacaccaccaccaccaccatcaccaccatcccggggccttttttcgctatatgaggcagcagtgcatcaagcaggaactgatttgcaagtggatcgatcctgagcagctctccaatcctaagaaaagctgtaacaagaccttcagcaccatgcacgagttagtcacacacgtgtctgtcgagcatgttggagggcctgagcaaagtaaccacgtctgcttttgggaagaatgccctcgggaaggaaagccctttaaagccaaatacaagctggtgaaccacatccgggtgcacaccggcgaaaaaccgttcccttgtccttttccgggatgtggtaaggttttcgcccggtctgaaaacctcaaaatccacaaaagaacacatacaggcgaaaagcctttccagtgtgaattcgagggctgtgacagacgtttcgctaattcctctgatagaaaaaaacacatgcatgtccatacaagcgataagccctatctgtgtaagatgtgcgataagtcctacactcatccatcatccctgcgcaagcacatgaaggtgcatgagtcctccccgcaagggtccgagtcttcaccagcagcctcaagcggctatgagagcagcactcctccaggcctggtctccccatccgccgagccccaatcgtcgtcaaatctttctcctgcggctgccgctgccgctgccgccgccgcggccgccgcagccgcggtgtcggcagtccaccgaggaggcggctccggatctggcggggccggcggcggctccggcggcgggtcaggaagcggtggtgggggcggcggagcgggaggcggaggaggagggtcctccggcggtgggagtggcaccgcaggcggtcactcgggattatcctcaaacttcaatgagtggtacgtttag

SEQ ID NO: 170546 - DNA, 1599 bp, Artificial Sequence
  derived and/or modified sequence
atgctgctggatgctggcccccagtttcctgccatcggcgtgggcagctttgcccggcaccaccaccacagcgctgctgctgctgctgctgctgctgctgagatgcaggaccgggagctgagcctggccgccgcccagaatggatttgtggacagcgctgctgcccacatgggcgccttcaagctgaaccctggggcccacgagctgagccctggccagagcagcgccttcaccagccagggccctggggcctacccaggcagcgctgctgctgctgctgctgctgctgccctgggcccccacgccgcccacgtgggcagctacagcggcccccccttcaacagcacccgggacttcctgttccgcagccggggctttggagacagcgcccctgggggcggccagcacggcctgtttggacctggagctgggggcctgcaccacgcccacagtgatgcccagggccacctgctcttccctggcctgcctgagcagcacggcccccacggcagccagaatgtgctgaatggccagatgaggctgggcctgcccggggaggtgtttggccgctctgagcagtaccggcaggtggccagccccaggacagacccctacagcgctgcccagctgcacaaccagtatggccccatgaacatgaacatgggcatgaacatggctgctgctgctgcccaccaccaccaccaccaccaccaccaccctggggccttcttccgctacatgaggcagcagtgcatcaagcaggagctgatctgcaagtggattgatcctgagcagctgagcaaccccaagaagagctgcaacaagaccttcagcaccatgcatgagctggtgacccacgtgtctgtggagcacgtgggcggccctgagcagagcaaccacgtgtgcttctgggaggagtgcccccgggagggcaagcccttcaaggccaagtacaagctggtgaaccacatccgggtgcacactggagagaagcccttcccctgccccttccctggctgtgggaaggtgtttgcccggtctgagaacctgaagatccacaagaggacccacactggagagaagcccttccagtgtgaatttgagggctgtgacagaagatttgccaacagcagtgacaggaagaagcacatgcacgtgcacaccagtgacaagccctacctgtgcaagatgtgtgacaagagctacacccaccccagcagcctgaggaagcacatgaaggtgcatgagagcagcccccagggcagcgagagcagccctgctgccagcagcggctatgagagcagcaccccacctggcctggtgagccccagcgctgagccccagagcagcagcaacctgagccctgctgctgctgctgctgctgctgctgctgctgctgctgctgctgctgtgtctgctgtgcacagaggaggcggcagcggcagcggcggggccggcggcggcagcggcggcggcagcggcagcggcggcggcggcggcggggccggcggcggcggcggcggcagcagcggcggcggcagcggcacagctgggggccacagcggcctgagcagcaacttcaatgagtggtacgtgtag

SEQ ID NO: 170547 - DNA, 1599 bp, Artificial Sequence
  derived and/or modified sequence
atgctgctggacgccggcccccagttccccgccatcggcgtgggctccttcgctcggcatcaccatcactctgccgccgctgccgcagctgcagcagccgaaatgcaggatagggaactgtcactggcggccgcccagaacgggttcgtcgattccgctgctgcccacatgggcgcctttaaacttaacccaggcgcccacgagctgtctccaggacagtcctctgccttcacctcccaggggcccggggcctatcccggatcagcggccgccgccgcagccgccgcagccctggggccccatgcggctcacgtaggatcttactccggccctccatttaattctacccgagacttcctgtttcggagccgagggttcggcgatagcgcacccggcggagggcaacatggcctattcggtccaggcgcggggggtttgcatcacgctcattccgatgcacagggccacttgctgttccctgggctgccagagcagcacggccctcacggttcacagaacgtgcttaatggccaaatgagactcgggttgcctggggaggtatttgggagatctgagcaataccggcaggtggcctccccaagaaccgacccatactcagccgcccaactccataaccagtacggacccatgaacatgaatatggggatgaacatggccgccgccgccgcccaccaccaccatcatcaccaccatcatcccggcgcttttttccggtacatgcgtcagcagtgtattaagcaggaactaatctgcaagtggatagaccccgagcagctatccaatcctaagaaatcctgcaataagacgttctccactatgcatgagctcgtgacccacgtgagcgtcgagcacgttgggggtcccgaacaaagcaatcacgtttgtttttgggaggagtgtcccagagaaggaaaacccttcaaggctaaatataagctggtcaaccacatacgcgtgcatactggtgagaaaccgtttccatgcccctttcctggctgcggtaaggtttttgctcgctccgaaaatttgaaaatacataagcggacccacaccggcgagaaacctttccagtgcgagtttgaagggtgcgaccgcagatttgcaaacagtagcgatcgtaaaaagcatatgcatgtgcatactagtgacaaaccctatctgtgcaagatgtgcgataagtcctatacacacccaagcagtctgaggaagcatatgaaggtgcacgagagctcacctcaagggagcgaaagctctccggccgccagcagtggctacgaatccagcactcctcccggactagtctcccctagtgcggaacctcagtcttcgagtaacctgagtccggcagccgcagccgctgccgcggctgctgccgctgctgccgctgctgtgtcagccgtccatcgtggcggcggatcgggtagcggaggagcaggtggcggaagcggcggggggagtgggtctggtggcggagggggcggagcgggaggcggtgggggcggcagttccggcggcggttccgggactgcgggaggccattcaggtctatcatcgaatttcaatgaatggtacgtgtag

SEQ ID NO: 170548 - DNA, 1599 bp, Artificial Sequence
  derived and/or modified sequence
atgttgctcgacgctggtcctcaatttccggcaatcggcgtggggtccttcgcccgacaccaccatcattccgctgcagccgctgccgcagccgctgcagaaatgcaggatcgagaactgagtctggcagctgcccagaacgggttcgtagatagcgcagctgcacacatgggcgcttttaagctgaatcccggagcccacgaattgagccccggacaaagcagtgcctttactagccaaggcccaggcgcttaccctggtagcgctgctgcagctgctgccgctgctgccctggggcctcacgccgctcacgtgggttcatactcgggaccaccgtttaactcgacgagggacttccttttcagaagcagagggttcggggattccgcacctggagggggtcagcatggactattcggcccaggcgcaggagggctccaccacgcccactccgacgcccagggccacctgctctttccgggtctgcccgaacagcacggcccacacgggtctcagaacgtgcttaatggacagatgagactggggttgccaggcgaggtctttggcagaagcgagcagtatcgtcaggtcgccagtcccagaaccgatccctactctgccgctcaactgcacaaccagtatggcccaatgaatatgaatatgggcatgaatatggccgcagcagcagcccaccaccaccaccatcatcaccaccacccaggagcattctttcgctatatgaggcagcagtgtatcaaacaagaactaatttgcaaatggattgacccagaacagctctcaaaccccaagaagagttgcaataagacattctcaaccatgcatgaactggtcacacacgtttccgtggagcacgtgggcggacctgaacagtcaaaccatgtttgcttttgggaagagtgtcccagagagggcaagccctttaaggctaaatataagctcgttaatcatattcgggtgcataccggcgaaaagccttttccctgtccatttcctggatgtggcaaagtgttcgccaggtccgagaacttgaagatccacaagaggacacataccggagaaaaacctttccagtgtgagttcgaggggtgcgatcgcaggttcgcgaactccagcgacagaaagaagcacatgcatgtgcacacgtctgacaaaccttacctgtgtaagatgtgcgataaatcatatacccacccatcctccctgaggaagcacatgaaagtgcatgaatctagccctcagggctccgagtcatctcctgctgccagtagcggttacgagtcaagcacccctccaggtttggtgagcccatctgctgagccgcagtctagctccaacctgtctcctgccgcagctgcagccgctgccgcagcagcggctgcagctgccgcagtgagtgcggtccaccgaggaggaggctccggctccgggggagctggcggtggatccggaggaggttctggttccggtgggggaggaggcggagccggtgggggtggtggtggcagcagcgggggaggcagcggtaccgctgggggacacagtgggctgagctcaaacttcaatgaatggtacgtgtag

SEQ ID NO: 170549 - DNA, 2974 bp, Artificial Sequence
  derived and/or modified sequence
ccgcctggctttggactcttctcctcctccacctcctcctcctcctcccgcgccgccgcctcctcctcctcttcctctccgcgccttcgctacgcgcccggccgcccgaggcagatccaggcggcggcggaggcggcgggcgcaggagagcggctcccagggctgaagtggccgccaccaccgccgcctgcgcctggagcccggtggccgccggacgcaccgcgcggatcgggagcgggagtcgaggcggcgcggaggcgcagggctcgcaggggcgggcgggcgcgctggccatgctcctggacgcgggtccgcagttcccggccatcggggtgggcagcttcgcgcgccaccatcaccactccgccgcggcggcggcggcggctgccgccgagatgcaggaccgtgaactgagcctggcggcggcgcagaacggcttcgttgactccgccgccgcgcacatgggagccttcaagctcaacccgggcgcgcacgagctgtccccgggccagagctcggcgttcacgtcgcagggccccggcgcctaccccggctccgctgcggctgccgctgcggccgcagcgctcgggccccacgccgcgcacgttggctcctactctgggccgcccttcaactccacccgggacttcctgttccgcagccgcggcttcggggactcggcgccgggcggcgggcagcacgggctgttcgggccgggcgcgggcggcctgcaccacgcgcactcggacgcgcagggccacctcctcttcccgggcctgccagagcagcacgggccgcacggctcgcagaatgtgctcaacgggcagatgcgcctcgggctgcccggcgaggtgttcgggcgctcggagcaataccgccaggtggccagcccgcggaccgacccctactcggcggcgcaactccacaaccagtacggccccatgaatatgaacatgggtatgaacatggcagcagccgcggcccaccaccaccaccaccaccaccaccaccccggtgcctttttccgctatatgcggcagcagtgcatcaagcaggagctaatctgcaagtggatcgaccccgagcaactgagcaatcccaagaagagctgcaacaaaactttcagcaccatgcacgagctggtgacacacgtctcggtggagcacgtcggcggcccggagcagagcaaccacgtctgcttctgggaggagtgtccgcgcgagggcaagcccttcaaggccaaatacaaactggtcaaccacatccgcgtgcacacaggcgagaaacccttcccctgccccttcccgggctgtggcaaagtcttcgcgcgctccgagaacctcaagatccacaaaaggacccacacaggggagaagccgttccagtgtgagtttgagggctgcgaccggcgcttcgccaacagcagcgacaggaagaagcacatgcacgtccacacctccgataagccctatctctgcaagatgtgcgacaagtcctacacgcaccccagctcgctgcggaagcacatgaaggtccatgagtcctccccgcagggctctgaatcctccccggccgccagctccggctatgagtcgtccacgcccccggggctggtgtcccccagcgccgagccccagagcagctccaacctgtccccagcggcggcggcagcggcggcggcggctgcggcggcggcggccgcggtgtccgcggtgcaccggggcggaggctcgggcagtggcggcgcgggaggcggctcaggcggcggcagcggcagtggcgggggcggcggcggggcgggcggcgggggcggcggcagctctggcgggggcagcgggacagccgggggtcacagcggcctctcctccaacttcaatgaatggtacgtgtgacgggtcggggcctctctccctctccctgtccccaccccagcgcagcagccctccccgcagctagcagcgagggcaccttgtgatcatgttgttaaaattatgaatctgatttttatgatgatgaaaattttaccagcagaaggattttttaaagttttttttttttttttaataataatctaggcatgaagagcaaaaatatcccttccggagtctttgaagctgaaaatataaaacaaataaaaaataaaaaaataaaaacccacaaaaatgttgaaccaaacctccctgctaatctccatgcccacgttctttcccaccctgttcccagtcttctgacaaactgtgtacatagcggactcctcctttctcctccgaggtggttttaaaggctttttggtgtatagaagtttgtccatttgtaaaactccggattgcgttcctccccgccttccgccccttcccttccctaaagtgatgggctttctcttttctctttttagtttacccggtttctttttaagtaatgtggaagaaaatggtttattttgtattgtggtattgaatattgtgttcctttttatgaggcaacctgattgtaaacttcatgtaactatagactggaaaaaatgagccgtgccaaagtctcccttctgtttcttcagcacattgacccatagcacacacatacacaccaccaccaacaacgcttgtgaatgtatttttctgttagctgggtttacatgtgatgttttagtgcttttgcaagttcaatttgttagttcctgtatgaaagattgtgggggaaaaataaacgtcgtgccgttagctttttccgtaataacacccttccttctgtaaatacccgttaccatatttatccatttgtaattaaattatggtattaacttgctacagaggaaacaatatttataaagaatgtttcttaactataaatatgtacaattgtgggcataaactgtttcagattttttatttgaaggttttaagtggtttgatcatttcttgtgatgttttgagagtaatgcatacagaaatataataaaatgtgttgaaactgc

SEQ ID NO: 170550 - DNA, 1928 bp, Artificial Sequence
  derived and/or modified sequence
cctccacctcctcctcctcctcccgcgccgccgcctcctcctcctctcaatcccaagaagagctgcaacaaaactttcagcaccatgcacgagctggtgacacacgtctcggtggagcacgtcggcggcccggagcagagcaaccacgtctgcttctgggaggagtgtccgcgcgagggcaagcccttcaaggccaaatacaaactggtcaaccacatccgcgtgcacacaggcgagaaacccttcccctgccccttcccgggctgtggcaaagtcttcgcgcgctccgagaacctcaagatccacaaaaggacccacacaggggagaagccgttccagtgtgagtttgagggctgcgaccggcgcttcgccaacagcagcgacaggaagaagcacatgcacgtccacacctccgataagccctatctctgcaagatgtgcgacaagtcctacacgcaccccagctcgctgcggaagcacatgaaggtccatgagtcctccccgcagggctctgaatcctccccggccgccagctccggctatgagtcgtccacgcccccggggctggtgtcccccagcgccgagccccagagcagctccaacctgtccccagcggcggcggcagcggcggcggcggctgcggcggcggcggccgcggtgtccgcggtgcaccggggcggaggctcgggcagtggcggcgcgggaggcggctcaggcggcggcagcggcagtggcgggggcggcggcggggcgggcggcgggggcggcggcagctctggcgggggcagcgggacagccgggggtcacagcggcctctcctccaacttcaatgaatggtacgtgtgacgggtcggggcctctctccctctccctgtccccaccccagcgcagcagccctccccgcagctagcagcgagggcaccttgtgatcatgttgttaaaattatgaatctgatttttatgatgatgaaaattttaccagcagaaggattttttaaagttttttttttttttttaataataatctaggcatgaagagcaaaaatatcccttccggagtctttgaagctgaaaatataaaacaaataaaaaataaaaaaataaaaacccacaaaaatgttgaaccaaacctccctgctaatctccatgcccacgttctttcccaccctgttcccagtcttctgacaaactgtgtacatagcggactcctcctttctcctccgaggtggttttaaaggctttttggtgtatagaagtttgtccatttgtaaaactccggattgcgttcctccccgccttccgccccttcccttccctaaagtgatgggctttctcttttctctttttagtttacccggtttctttttaagtaatgtggaagaaaatggtttattttgtattgtggtattgaatattgtgttcctttttatgaggcaacctgattgtaaacttcatgtaactatagactggaaaaaatgagccgtgccaaagtctcccttctgtttcttcagcacattgacccatagcacacacatacacaccaccaccaacaacgcttgtgaatgtatttttctgttagctgggtttacatgtgatgttttagtgcttttgcaagttcaatttgttagttcctgtatgaaagattgtgggggaaaaataaacgtcgtgccgttagctttttccgtaataacacccttccttctgtaaatacccgttaccatatttatccatttgtaattaaattatggtattaacttgctacagaggaaacaatatttataaagaatgtttcttaactataaatatgtacaattgtgggcataaactgtttcagattttttatttgaaggttttaagtggtttgatcatttcttgtgatgttttgagagtaatgcatacagaaatataataaaatgtgttgaaactgc

SEQ ID NO: 170551 - protein, 498 aa, Artificial Sequence
  derived and/or modified sequence
MLEEGVLPSPGPALPQEENTGEEGMAAGLLTAGPRGSTFFSSVTVAFAQERWRCLVSTPRDRFKEGIPGKSRSLVLLGLPVSQPGMNSQLEQREGAWMLEGEDLRSPSPGWKIISGSPPEQALSEASFQDPCVEMPPGDSDHGTSDLEKSFNLRPVLSPQQRVPVEARPRKCETHTESFKNSEILKPHRAKPYACNECGKAFSYCSSLSQHQKSHTGEKPYECSECGKAFSQSSSLIQHQRIHTGEKPYKCSECGRAFSQNANLTKHQRTHTGEKPYRCSECEKAFSDCSALVQHQRIHTGEKPYECSDCGKAFRHSANLTNHQRTHTGEKPYKCSECGKAFSYCAAFIQHQRIHTGEKPYRCAACGKAFSQSANLTNHQRTHTGEKPYKCSECGKAFSQSTNLIIHQKTHTGEKPYKCNECGKFFSESSALIRHHIIHTGEKPYECNECGKAFNQSSSLSQHQRIHTGVKPYECSECGKAFRCSSAFVRHQRLHAGE

SEQ ID NO: 170552 - protein, 474 aa, Artificial Sequence
  derived and/or modified sequence
MAAGLLTAGPRGSTFFSSVTVAFAQERWRCLVSTPRDRFKEGIPGKSRSLVLLGLPVSQPGMNSQLEQREGAWMLEGEDLRSPSPGWKIISGSPPEQALSEASFQDPCVEMPPGDSDHGTSDLEKSFNLRPVLSPQQRVPVEARPRKCETHTESFKNSEILKPHRAKPYACNECGKAFSYCSSLSQHQKSHTGEKPYECSECGKAFSQSSSLIQHQRIHTGEKPYKCSECGRAFSQNANLTKHQRTHTGEKPYRCSECEKAFSDCSALVQHQRIHTGEKPYECSDCGKAFRHSANLTNHQRTHTGEKPYKCSECGKAFSYCAAFIQHQRIHTGEKPYRCAACGKAFSQSANLTNHQRTHTGEKPYKCSECGKAFSQSTNLIIHQKTHTGEKPYKCNECGKFFSESSALIRHHIIHTGEKPYECNECGKAFNQSSSLSQHQRIHTGVKPYECSECGKAFRCSSAFVRHQRLHAGE

SEQ ID NO: 170553 - DNA, 2099 bp, Artificial Sequence
  derived and/or modified sequence
gtggcgccaatcaggcgcgtccctctggcgctggagccaggacctggcgttgggcggtacttggacagcggttcttgagctctcgcggttgccggtagattgttgccagttgccagttgccagtcgtttttcggaaagctggcagcggctttttcaccgggttctgcttgaggccgagccaaagagtggctgtgactcgggagacggagtggaacacccggctgggcaggcccggacagctcccgcgacccagcaccgcaggatcagaccgtgcctctgcggggagaggctggagaggaagagtccggcctgggagccgtcagagcagccctgcagaacggggtgggggctgctgtagatagacccttacgcccagagaactgctgggaggctgtggcgcgaggcgggactcaaatgctggaggaaggagtactgccttccccaggccctgcccttccccaagaggaaaacacaggagaggaaggaatggctgctggtctcctcacagctgggccccggggatccacattcttcagcagtgtgacggtagcttttgcacaggaaaggtggaggtgcctcgtgtctactccacgggacaggttcaaggaggggataccaggaaagtccaggagccttgtcctactaggacttccagtttcccagcctggcatgaactcccagttggaacaaagggaaggcgcatggatgctggagggcgaagacctgcgaagtccctctccaggctggaagattatatctggatcaccaccagagcaagccctttctgaagcttcattccaagacccatgtgtagagatgccccctggggattcagaccacgggaccagtgaccttgagaagagcttcaatctgagaccagtcctctctccgcaacagagagtgcccgtggaagcgagacctcgcaaatgtgagacacacaccgagagcttcaagaactcggaaatcctgaaacctcacagagcaaaaccatatgcatgtaatgaatgtggcaaagccttcagttactgttcttccctttctcagcatcagaagagccacactggagagaagccctatgagtgcagtgaatgtgggaaggccttcagccagagctcatctctcattcagcaccagaggattcacactggagagaagccttacaagtgcagtgaatgtggaagagccttcagccagaacgccaacctcaccaaacaccagcgaacccacaccggagagaagccctacagatgcagcgagtgtgagaaagccttcagtgactgctcagctcttgttcagcatcagagaattcataccggagagaagccctacgaatgcagcgactgtgggaaggccttccgtcacagtgcaaacctcacgaaccatcagaggactcacaccggggagaagccctacaagtgcagcgagtgtgggaaggccttcagttactgcgcagcgttcattcagcaccagaggattcacaccggggagaagccctacagatgtgccgcgtgtgggaaggccttcagccagagtgcaaacctcacaaaccatcagaggactcacactggggagaaaccctacaagtgcagcgagtgtgggaaggccttcagccagagtaccaatctcataatccaccaaaagacccacaccggggagaagccatataaatgtaatgaatgtgggaaattcttcagtgagagctcagccctcattcggcatcatataatccacaccggagaaaaaccttatgagtgtaatgagtgtggtaaagcgtttaaccagagctcatcccttagtcagcatcagagaatccacacaggcgtgaaaccctacgaatgcagcgagtgtgggaaggccttccggtgcagctctgccttcgttagacatcagagactccacgccggagagtaactaggaacatggtagaagtggagagagtcccggacatgccgactcaggacaggtgggtgaggatctgagaaatgctaaaggcttgaaagcatctgaagacatctaacttagagtctgcagcccagagccacatgcaaaacaccttcaataaacagccactatttcacatgctgtaaaaaaaaaaaaaa

SEQ ID NO: 170554 - DNA, 1497 bp, Artificial Sequence
  derived and/or modified sequence
atgctggaggagggcgtgctgcccagccccggccccgccctgccccaggaggagaacaccggcgaggagggcatggccgccggcctgctgaccgccggccccagaggcagcaccttcttcagcagcgtgaccgtggccttcgcccaggagagatggagatgcctggtgagcacccccagagacagattcaaggagggcatccccggcaagagcagaagcctggtgctgctgggcctgcccgtgagccagcccggcatgaacagccagctggagcagagagagggcgcctggatgctggagggcgaggacctgagaagccccagccccggctggaagatcatcagcggcagcccccccgagcaggccctgagcgaggccagcttccaggacccctgcgtggagatgccccccggcgacagcgaccacggcaccagcgacctggagaagagcttcaacctgagacccgtgctgagcccccagcagagagtgcccgtggaggccagacccagaaagtgcgagacccacaccgagagcttcaagaacagcgagatcctgaagccccacagagccaagccctacgcctgcaacgagtgcggcaaggccttcagctactgcagcagcctgagccagcaccagaagagccacaccggcgagaagccctacgagtgcagcgagtgcggcaaggccttcagccagagcagcagcctgatccagcaccagagaatccacaccggcgagaagccctacaagtgcagcgagtgcggcagagccttcagccagaacgccaacctgaccaagcaccagagaacccacaccggcgagaagccctacagatgcagcgagtgcgagaaggccttcagcgactgcagcgccctggtgcagcaccagagaatccacaccggcgagaagccctacgagtgcagcgactgcggcaaggccttcagacacagcgccaacctgaccaaccaccagagaacccacaccggcgagaagccctacaagtgcagcgagtgcggcaaggccttcagctactgcgccgccttcatccagcaccagagaatccacaccggcgagaagccctacagatgcgccgcctgcggcaaggccttcagccagagcgccaacctgaccaaccaccagagaacccacaccggcgagaagccctacaagtgcagcgagtgcggcaaggccttcagccagagcaccaacctgatcatccaccagaagacccacaccggcgagaagccctacaagtgcaacgagtgcggcaagttcttcagcgagagcagcgccctgatcagacaccacatcatccacaccggcgagaagccctacgagtgcaacgagtgcggcaaggccttcaaccagagcagcagcctgagccagcaccagagaatccacaccggcgtgaagccctacgagtgcagcgagtgcggcaaggccttcagatgcagcagcgccttcgtgagacaccagagactgcacgccggcgagtag

SEQ ID NO: 170555 - DNA, 1497 bp, Artificial Sequence
  derived and/or modified sequence
atgctggaagagggcgtgttgccctcccctggcccagctctgccccaggaggaaaacactggcgaggagggcatggccgcaggccttcttactgccggcccaaggggctctacttttttcagtagcgtgaccgtggcttttgctcaagagcggtggcgctgtctggtttctacacccagagaccgatttaaggaaggtatccccggcaaatcccgtagcttagtcttactcgggctgcccgtgagccagccaggcatgaactcccagctcgagcagagagagggagcgtggatgctcgagggtgaggatctgaggtcaccctctcctgggtggaagattatatccggctcaccacctgaacaggctctcagtgaggcatccttccaggacccgtgcgttgagatgccacctggtgattctgatcatggcacctcagacctggagaaatcattcaatctccgccctgtgcttagtcctcaacagagagtcccagttgaggccaggccgaggaagtgtgagacgcacactgaatcttttaaaaactcagagatccttaagcctcatagagctaagccctatgcctgtaatgagtgtggcaaggcattcagctattgtagttccctaagtcagcatcagaagtcgcataccggcgagaagccctacgaatgcagtgaatgcggaaaagctttttcacagtcatccagcctgatccagcaccaaagaatacacactggagaaaaaccctataaatgttccgagtgtggtagagccttctcccagaacgcaaaccttaccaagcatcagagaacccacactggtgaaaagccttaccgatgtagcgagtgtgagaaggcattcagtgactgctccgctttggtacagcaccaacggatccatactggtgagaagccttacgaatgttctgactgcggcaaagcctttagacactcagcaaaccttaccaaccaccagcgtactcatactggcgagaagccctacaagtgctcagaatgcggaaaggcctttagctattgcgctgcttttatccagcatcaacgcatacatactggggagaaaccatatcggtgcgcggcttgcggaaaggccttcagtcagtctgccaacctgactaaccaccagcgaacgcacactggagagaaaccatacaagtgttccgagtgcggaaaagctttttctcagagcaccaacctgatcattcaccaaaagacgcacactggggagaaaccatataagtgcaatgaatgcggaaaattttttagcgaatcctctgccctaattagacatcatattatccataccggcgagaaaccatacgaatgtaatgagtgtggtaaagcctttaaccagtcgtcaagtctgagtcagcatcagaggatacatacaggggtgaagccatacgagtgtagtgaatgcggcaaggcttttcgatgttcgagcgcctttgtgcggcaccagagactccacgctggagagtag

SEQ ID NO: 170556 - DNA, 1497 bp, Artificial Sequence
  derived and/or modified sequence
atgctggaggagggcgtgctgcccagccctggccctgccctgccccaggaggagaacacaggagaggagggcatggctgctggcctgctgacagctggcccccggggcagcaccttcttcagctctgtgacagtggcctttgcccaggagcgctggcgctgcctggtgtccaccccccgggaccgcttcaaggagggcatccctgggaagagccgcagcctggtgctgctgggcctgcctgtgtcccagcccggcatgaacagccagctggagcagcgggagggcgcctggatgctggagggggaggacctgcggagccccagccctggctggaagatcatcagcggcagccccccagagcaggccctgtctgaggccagcttccaggacccctgtgtggagatgcctcctggggacagcgaccacggcaccagtgacctggagaagagcttcaacctgcggcctgtgctgagcccccagcagagggtgcctgtggaggcccggcccaggaaatgtgagacccacacagagagcttcaagaacagcgagatcctgaagccccaccgggccaagccctatgcctgcaatgaatgtgggaaggccttctcctactgcagcagcctgagccagcaccagaagagccacactggagagaagccctatgagtgcagtgaatgtgggaaggccttcagccagagcagcagcctcatccagcaccagaggatccacactggagagaagccctacaagtgcagtgaatgtggccgggccttcagccagaatgccaacctgaccaagcaccagaggacccacactggagagaagccctaccgctgcagtgaatgtgagaaggccttcagtgactgcagcgccctggtgcagcaccagaggatccacactggagagaagccctatgagtgcagcgactgtgggaaggccttccgccacagcgccaacctgaccaaccaccagaggacccacactggagagaagccctacaagtgcagtgaatgtgggaaggccttctcctactgtgccgccttcatccagcaccagaggatccacactggagagaagccctaccgctgtgccgcctgtgggaaggccttcagccagagcgccaacctgaccaaccaccagaggacccacactggagagaagccctacaagtgcagtgaatgtgggaaggccttcagccagagcaccaacctgatcatccaccagaagacccacactggagagaagccctacaagtgcaatgaatgtgggaagttcttcagcgagagcagcgccctgatccgccaccacatcatccacactggagagaagccctatgagtgcaatgaatgtgggaaggccttcaaccagagcagcagcctgagccagcaccagaggatccacactggagtgaagccctatgagtgcagtgaatgtgggaaggccttccgctgcagcagcgcctttgtgcgccaccagaggctgcacgccggggagtag

SEQ ID NO: 170557 - DNA, 1497 bp, Artificial Sequence
  derived and/or modified sequence
atgctggaggagggcgtgctgcccagccccggccccgccctgccccaggaggagaatacaggggaagaaggcatggcggcaggattacttaccgctggcccaagaggcagcacgtttttcagttcggtcaccgtcgcttttgcccaggagcggtggaggtgtttagtttcgacaccgcgagatcggttcaaagagggcatccctggaaagtcaagaagcctggtactgcttgggcttcccgtgtcccagcccgggatgaattcccagttggagcagcgcgaaggtgcatggatgcttgaaggggaggacttacgctctcccagtcctgggtggaagattatttctggatccccccccgagcaggcactgtccgaagcaagttttcaggatccgtgcgtcgaaatgccccctggggattccgaccatgggacttcagacttagagaagtcattcaatctccgcccagtattgtcccctcagcagcgggtccctgtggaagcacggccgcggaagtgcgagacgcacacagagtcttttaagaattcagaaattctcaagcctcacagggctaaaccatacgcctgcaacgagtgtggaaaagcattcagttactgctcttccttgtcccaacatcaaaaaagccataccggcgagaaaccctatgaatgctctgaatgcggcaaggcatttagccagtcctcaagtctgatccagcaccagcggatccataccggagagaagccctacaaatgctccgagtgcggtcgggcttttagccaaaatgctaatttaaccaagcaccagcggacccataccggggagaagccctaccgctgcagcgagtgtgagaaagcattctctgactgttccgccctggtgcagcaccaaagaattcataccggcgaaaagccctacgagtgtagcgactgcggaaaggcatttagacacagtgcaaaccttactaaccaccagcggactcatactggagaaaagccatataaatgtagcgagtgcggtaaagcattctcttattgtgccgccttcatccagcaccagcgaatccacacaggagagaagccttaccgctgcgccgcctgtgggaaagcattctctcaatcggccaatctgacaaaccaccagcggacacacacaggggaaaaaccttacaagtgctctgaatgtggaaaagcgttcagtcaatccactaatcttatcatccatcaaaaaactcataccggcgagaaaccttataaatgtaacgagtgcggcaaatttttttccgagtcctctgcgctaatccgccatcacattatccacaccggcgagaagccctacgaatgtaatgagtgtggcaaagcatttaaccagagctcttctctgtctcagcaccagcgtattcataccggggtcaagccttacgaatgcagtgaatgtggcaaggctttccggtgctctagcgcctttgtacggcatcagcgcttgcatgcaggagaatag

SEQ ID NO: 170558 - DNA, 1497 bp, Artificial Sequence
  derived and/or modified sequence
atgttagaggaaggagtgctgccaagtcctggtccagccctgccccaggaggaaaataccggagaagaggggatggcagcgggtctgctgaccgccggacccagggggagcaccttttttagttcagttacggtggcgttcgcacaggagcgttggcgttgtctggtgtctaccccccgtgacaggttcaaggaaggtatccccggtaagagccggtctcttgtactgctgggcctgccagtgagccagcctggcatgaactcccagctggaacagagggagggagcatggatgttggagggagaagacctccggtcacccagtcccggatggaagatcatttctgggagcccccctgagcaagcccttagtgaagcatcctttcaagacccctgtgtggagatgcctcctggcgactccgatcacgggacgagtgacctggaaaagagctttaacctgagacctgtgctgagcccccagcagcgagttcctgtcgaagccagacctagaaagtgtgagactcatacagagtcatttaagaacagtgagatacttaagcctcaccgcgctaagccatacgcctgtaacgagtgcggtaaagcatttagctactgttcctcactgtctcagcatcagaaaagccacacaggagaaaagccctatgagtgctctgagtgcgggaaggccttcagccagtcatcatccttgatccagcatcagcgcattcacaccggggaaaagccatacaaatgttccgagtgtgggagggcattttcccaaaacgcgaaccttaccaaacaccagcgaacccacactggggaaaaaccctaccggtgtagcgagtgcgagaaggcattctccgattgcagcgccctcgtccaacaccaacgtatccataccggggagaagccgtacgaatgtagcgactgtggtaaggccttccgccattccgccaacctgacgaaccaccagcgtacacatactggtgagaaaccctacaaatgcagtgagtgcggcaaggctttctcctattgtgcagcctttattcaacatcagaggatccacaccggcgagaagccctataggtgcgccgcttgtgggaaggcattcagtcagagtgcaaatctcacaaaccatcagaggacccacaccggtgagaagccctacaagtgcagcgaatgtggtaaagcctttagtcagtccacgaatcttattatccatcagaagacgcatacgggtgagaagccttacaagtgtaatgaatgtgggaaatttttttctgagtcttctgctctgattcgccatcatatcattcacactggagaaaagccctacgagtgtaacgagtgcgggaaagccttcaaccagagctcttcccttagccagcatcaacgaatccacactggagtcaaaccttatgagtgttcagagtgcggaaaagcattccggtgtagctccgctttcgtgcgccatcagagactgcatgctggagaatag

SEQ ID NO: 170559 - DNA, 2078 bp, Artificial Sequence
  derived and/or modified sequence
aatcaggcgcgtccctctggcgctggagccaggacctggcgttgggcggtacttggacagcggttcttgagctctcgcggttgccggtagattgttgccagttgccagttgccagtcgtttttcggaaagctggcagcggctttttcaccgggttctgcttgaggccgagccaaagagtggctgtgactcgggagacggagtggaacacccggctgggcaggcccggacagctcccgcgacccagcaccgcaggatcagaccgtgcctctgcggggagaggctggagaggaagagtccggcctgggagccgtcagagcagccctgcagaacggggtgggggctgctgtagatagacccttacgcccagagaactgctgggaggctgtggcgcgaggcgggactcaaatgctggaggaaggagtactgccttccccaggccctgcccttccccaagaggaaaacacaggagaggaaggaatggctgctggtctcctcacagctgggccccggggatccacattcttcagcagtgtgacggtagcttttgcacaggaaaggtggaggtgcctcgtgtctactccacgggacaggttcaaggaggggataccaggaaagtccaggagccttgtcctactaggacttccagtttcccagcctggcatgaactcccagttggaacaaagggaaggcgcatggatgctggagggcgaagacctgcgaagtccctctccaggctggaagattatatctggatcaccaccagagcaagccctttctgaagcttcattccaagacccatgtgtagagatgccccctggggattcagaccacgggaccagtgaccttgagaagagcttcaatctgagaccagtcctctctccgcaacagagagtgcccgtggaagcgagacctcgcaaatgtgagacacacaccgagagcttcaagaactcggaaatcctgaaacctcacagagcaaaaccatatgcatgtaatgaatgtggcaaagccttcagttactgttcttccctttctcagcatcagaagagccacactggagagaagccctatgagtgcagtgaatgtgggaaggccttcagccagagctcatctctcattcagcaccagaggattcacactggagagaagccttacaagtgcagtgaatgtggaagagccttcagccagaacgccaacctcaccaaacaccagcgaacccacaccggagagaagccctacagatgcagcgagtgtgagaaagccttcagtgactgctcagctcttgttcagcatcagagaattcataccggagagaagccctacgaatgcagcgactgtgggaaggccttccgtcacagtgcaaacctcacgaaccatcagaggactcacaccggggagaagccctacaagtgcagcgagtgtgggaaggccttcagttactgcgcagcgttcattcagcaccagaggattcacaccggggagaagccctacagatgtgccgcgtgtgggaaggccttcagccagagtgcaaacctcacaaaccatcagaggactcacactggggagaaaccctacaagtgcagcgagtgtgggaaggccttcagccagagtaccaatctcataatccaccaaaagacccacaccggggagaagccatataaatgtaatgaatgtgggaaattcttcagtgagagctcagccctcattcggcatcatataatccacaccggagaaaaaccttatgagtgtaatgagtgtggtaaagcgtttaaccagagctcatcccttagtcagcatcagagaatccacacaggcgtgaaaccctacgaatgcagcgagtgtgggaaggccttccggtgcagctctgccttcgttagacatcagagactccacgccggagagtaactaggaacatggtagaagtggagagagtcccggacatgccgactcaggacaggtgggtgaggatctgagaaatgctaaaggcttgaaagcatctgaagacatctaacttagagtctgcagcccagagccacatgcaaaacaccttcaataaacagccactatttcacatgctgta

SEQ ID NO: 170560 - DNA, 1965 bp, Artificial Sequence
  derived and/or modified sequence
acagcggttcttgagctctcgcggttgccggtagattgttgccagttgccagttgccagtcgtttttcggaaagctggcagcggctttttcaccgggttctgcttgaggccgagccaaagagtggctgtgactcgggagacggagtggaacacccggctgggcaggcccggacagctcccgcgacccagcaccgcaggatcagaccgtgcctctgcggggagaggctggagaggaagagtccggcctgggagccgtcagagcagccctgcagaacggggtgggggctgctgtagatagacccttacgcccagagaactgctgggaggctgtggcgcgaggcgggactcaaatgctggaggaaggagatgagaaaaatgagacttagagaggttacgtgatttgcacactgctgctgagtggtggatcatggatacttgagagtctgtgaacactctaatgcctccctacatctgatactgccttccccaggccctgcccttccccaagaggaaaacacaggagaggaaggaatggctgctggtctcctcacagctgggccccggggatccacattcttcagcagtgtgacggtagcttttgcacaggaaaggtggaggtgcctcgtgtctactccacgggacaggttcaaggaggggataccaggaaagtccaggagccttgtcctactaggacttccagtttcccagcctggcatgaactcccagttggaacaaagggaaggcgcatggatgctggagggcgaagacctgcgaagtccctctccaggctggaagattatatctggatcaccaccagagcaagccctttctgaagcttcattccaagacccatgtgtagagatgccccctggggattcagaccacgggaccagtgaccttgagaagagcttcaatctgagaccagtcctctctccgcaacagagagtgcccgtggaagcgagacctcgcaaatgtgagacacacaccgagagcttcaagaactcggaaatcctgaaacctcacagagcaaaaccatatgcatgtaatgaatgtggcaaagccttcagttactgttcttccctttctcagcatcagaagagccacactggagagaagccctatgagtgcagtgaatgtgggaaggccttcagccagagctcatctctcattcagcaccagaggattcacactggagagaagccttacaagtgcagtgaatgtggaagagccttcagccagaacgccaacctcaccaaacaccagcgaacccacaccggagagaagccctacagatgcagcgagtgtgagaaagccttcagtgactgctcagctcttgttcagcatcagagaattcataccggagagaagccctacgaatgcagcgactgtgggaaggccttccgtcacagtgcaaacctcacgaaccatcagaggactcacaccggggagaagccctacaagtgcagcgagtgtgggaaggccttcagttactgcgcagcgttcattcagcaccagaggattcacaccggggagaagccctacagatgtgccgcgtgtgggaaggccttcagccagagtgcaaacctcacaaaccatcagaggactcacactggggagaaaccctacaagtgcagcgagtgtgggaaggccttcagccagagtaccaatctcataatccaccaaaagacccacaccggggagaagccatataaatgtaatgaatgtgggaaattcttcagtgagagctcagccctcattcggcatcatataatccacaccggagaaaaaccttatgagtgtaatgagtgtggtaaagcgtttaaccagagctcatcccttagtcagcatcagagaatccacacaggcgtgaaaccctacgaatgcagcgagtgtgggaaggccttccggtgcagctctgccttcgttagacatcagagactccacgccggagagtaactaggaaca

SEQ ID NO: 170561 - protein, 273 aa, Artificial Sequence
  derived and/or modified sequence
MSPKRDGLGTGDGLHSQVLQEQVSTGDNLHECDSQGPSKDTLVREGKTYKCKECGSVFNKNSLLVRHQQIHTGVKPYECQECGKAFPEKVDFVRPMRIHTGEKPCKCVECGKVFNRRSHLLCYRQIHTGEKPYECSECGKTFSYHSVFIQHRVTHTGEKLFGCKECGKTFYYNSSLTRHMKIHTGEKPCKCSECGKTFTYRSVFFRHSMTHTAGKPYECKECGKGFYYSYSLTRHTRSHTGEKPYECLEHRKDFGYHSAFAQQSKIHSGGKNL

SEQ ID NO: 170562 - DNA, 2957 bp, Artificial Sequence
  derived and/or modified sequence
gccggagccagcagtggcaacccgctggggtccctttccacactgtggaagctttgttctttcgctctttgcaataaatcttgctacttctcactctttgggtccacactgcttttaccagctgtaacactcaccgcaaacgtctgcagcttcactcctgaagccagcgagaccacgagcccaccgggaggaacgaacaactccagacgcgccgccttaagccttaagagctgtaacactcaccacgaaggtctgcagcttcactcctgagccagcgagaccacgaacccgccagaaggaagaaactccgaacacatccgaacatcagaaggaacaaactctagacgcgccaccttaagagctgtaacactcaccacaagggtccgcggcttcattcttgaagtcagtgagaccaagaacccaccaattccggacacagttggaaatgcagaagggcacttgagtttggctgcagtctcccacacggagaccttctggaggaagatgagccctaaacgcgatgggttggggacaggtgatggtctgcactcacaggttttacaggagcaggtctccacaggagacaatctccatgaatgtgactcccagggaccaagtaaagacactttggttcgtgaggggaagacctacaaatgcaaggaatgtgggagcgtgtttaacaaaaacagcctccttgttcgacatcagcagattcacactggggtgaagccttatgaatgccaggagtgtggaaaagcctttcctgaaaaggtcgacttcgttcgacccatgaggattcacacaggggagaagccctgtaagtgcgtggagtgcgggaaggtcttcaaccgcaggtcgcacctcctgtgctaccgccagattcacactggagagaagccctatgagtgcagcgagtgtggaaagaccttcagctatcactctgtcttcatccagcatcgtgtgacccacactggagaaaaactctttgggtgcaaagaatgtggaaaaaccttttactacaactcttccttaacccggcacatgaagattcacactggagagaagccctgcaagtgcagtgagtgcgggaagaccttcacctaccgctctgttttcttccgacatagtatgacccacactgcaggaaagccctacgagtgcaaagaatgtgggaaaggtttttactacagctattccctcactcgacatacaaggagtcacactggagagaaaccttatgagtgccttgaacatagaaaggactttggctaccactctgcttttgcccaacagagtaagatccactctggaggaaaaaacctttgagtgcaaatgatgtgggaatttgtgggttttctttttttttttttctttgatacatagagagccacactgaggagaagcactctgaattcagtggcagtaggaaagctgtgacctgcagctcatcctcacttggcattgaagaattccttccagagataaactctatgagatatgtgggaaggccttttgcaagtgggcccacatcagtcaacgtcagagaacttaaactgcgaaaagacattttgacaaaaactagtgaagaaaatcttttggccacaggaaatatcttcctcagcatctgagaatttttccaggagggagacctgttggttattgtgcacttaaaagaaccacccacacctctctccatagtttatatcactaagccacttcaggattttttttttttaagtaagaagggaactgtaaaagagaaaaaaagaaattcatgcatagcttctgtcagacttctctgaaagccatgcctatcaaaatttgaattcagttcttcattttgcagatggctgaaaggtacaaaggccttgcctcgttatttgtcctttatatgtattcactcctgtctacaggagaattgtcctctgtaaagattaactctgtaaagatttattgaatgcattctttgttctaaaacattgtactcctgaggaatgtaagtctttgtgagaaatatgaacgcttaagtaatggaatatgtgaaacttgtaagaacgtagaatataaaaatactgccatataaaatcctttcatatctgaggaggtaagtaaccacattgaatgggcatattttgctacatcatttaagactacttaaggctttaatttaacaaaaaacaattcttcatgtggttttgaacacccagtgctcaatatacttgtttgttttgatttattttctcagggacgagagaatgatggtgaagctgtgttgctttcccaggtgagccttgattatttcctctgtgctttctcagcttctttggccttctgtaagaggggcttctccaagagcatgtcactagttttctagaagttaaacaagagctaagacaaacaaaacaaaacacagcttatctaatctaatgagaaactcagaaaaaaatgttttgatgaatacaatgtattaaaatataaaacatgtagatcctttgacatgttaattcaattctagaaatcctcagaaatgtttttatattatgcagagatgtgcgtgcaaagaataatcgctgcagttttgtttttatgtgtgaaacgttgagaacaatctaaatgtttatcagttggaagtaagttatggtacatctgttctatgaaatactgtgaaacaataaggtatctctgtatgtactgatatcaaaacatctctaagatacagtatttagtaaaagagaaagtttcaggaaataaaactacatctagaagtataagcataaaactgttaatagtggttttctgcaggaaatgggatggaccagggttatatgcaatgttcagtttttacttttatacttaagtattgtttatgtttgaaaaataaaaagcatttattgtttttgcaataaatgtttaaaatatttcaataaagatagcatgttagaataaaaaaaaaaaaa

SEQ ID NO: 170563 - DNA, 822 bp, Artificial Sequence
  derived and/or modified sequence
atgagccccaagagagacggcctgggcaccggcgacggcctgcacagccaggtgctgcaggagcaggtgagcaccggcgacaacctgcacgagtgcgacagccagggccccagcaaggacaccctggtgagagagggcaagacctacaagtgcaaggagtgcggcagcgtgttcaacaagaacagcctgctggtgagacaccagcagatccacaccggcgtgaagccctacgagtgccaggagtgcggcaaggccttccccgagaaggtggacttcgtgagacccatgagaatccacaccggcgagaagccctgcaagtgcgtggagtgcggcaaggtgttcaacagaagaagccacctgctgtgctacagacagatccacaccggcgagaagccctacgagtgcagcgagtgcggcaagaccttcagctaccacagcgtgttcatccagcacagagtgacccacaccggcgagaagctgttcggctgcaaggagtgcggcaagaccttctactacaacagcagcctgaccagacacatgaagatccacaccggcgagaagccctgcaagtgcagcgagtgcggcaagaccttcacctacagaagcgtgttcttcagacacagcatgacccacaccgccggcaagccctacgagtgcaaggagtgcggcaagggcttctactacagctacagcctgaccagacacaccagaagccacaccggcgagaagccctacgagtgcctggagcacagaaaggacttcggctaccacagcgccttcgcccagcagagcaagatccacagcggcggcaagaacctgtag

SEQ ID NO: 170564 - DNA, 822 bp, Artificial Sequence
  derived and/or modified sequence
atgtcccccaagcgcgatgggctgggcacaggagatgggctacattctcaggtgttgcaggagcaagtgagcacgggcgataatctacatgagtgtgacagccagggcccaagtaaagacactttagtgcgcgaggggaagacgtacaagtgcaaagaatgtggctcagttttcaataaaaattccctcttagtcaggcatcagcagattcatactggcgttaagccttacgagtgtcaggagtgtgggaaggcattccccgaaaaggtggactttgtgaggcccatgaggatccatacgggagagaaaccttgcaaatgcgtcgaatgtggaaaagtgtttaatcggcgatcccaccttctctgctaccggcagattcacaccggtgaaaaaccatatgaatgtagcgaatgcggaaagacattctcttatcattcagtgtttatacagcatcgcgtcacacataccggagagaagctgtttgggtgcaaagagtgcgggaagactttctactataactctagcctgactaggcacatgaagatacatacaggggagaaaccctgtaagtgtagcgagtgcgggaaaaccttcacctaccggagcgtgttttttcggcactccatgactcacactgctggcaaaccctatgaatgcaaggagtgcggaaaggggttctattactcttactcgctgacgagacacaccagaagccataccggagaaaaaccctacgagtgcctggaacatcgcaaggactttggctatcactctgcctttgctcagcaatctaagatacattctggagggaagaatctctag

SEQ ID NO: 170565 - DNA, 822 bp, Artificial Sequence
  derived and/or modified sequence
atgagcccgaaacgggatggcttagggacaggggatggcttgcattctcaagtgttgcaggagcaggtgtctacgggagataacctgcacgagtgtgactctcagggccccagcaaagacacactggttcgtgaaggaaagacctacaaatgtaaggagtgcgggagtgtgttcaataaaaattcccttctggtgaggcaccagcagattcatactggcgtgaagccttacgagtgccaggaatgcggcaaggcttttcctgaaaaagtagattttgtgcggcctatgcggattcacaccggagaaaagccctgcaaatgcgtagaatgtggcaaggtgtttaaccggagatcacatctactctgttaccgtcagatccataccggcgagaagccatacgagtgttccgagtgtgggaagaccttctcctaccactctgtgtttattcagcacagggtgacccacacgggggaaaagctctttggttgtaaggagtgtggcaaaacattttattacaattcttctctcacgagacacatgaagattcatactggtgaaaagccctgcaagtgttcagagtgcggtaaaaccttcacgtatcgctccgtgttctttcgtcacagcatgacgcacactgcaggaaaaccttatgagtgtaaagaatgtgggaaaggattttattacagctactctttgacaaggcacacaagatcacacacgggggaaaagccttacgagtgtctcgagcacaggaaggatttcggatatcacagcgctttcgcccagcaatccaagatacatagcggcgggaaaaatctgtag

SEQ ID NO: 170566 - DNA, 822 bp, Artificial Sequence
  derived and/or modified sequence
atgagccccaagagagatggcctgggcactggagatggcctgcacagccaggtgctgcaggagcaggtgtccactggagacaacctgcatgaatgtgacagccagggccccagcaaggacaccctggtgcgggagggcaagacctacaagtgcaaggaatgtggcagcgtcttcaacaagaacagcctgctggtgcgccaccagcagatccacactggagtgaagccctatgagtgccaggagtgtgggaaggccttccctgagaaggtggactttgtgcggcccatgaggatccacactggagagaagccctgcaagtgtgtggagtgtgggaaggtgttcaacagaagaagccacctgctgtgctaccggcagatccacactggagagaagccctatgagtgcagtgaatgtgggaagaccttctcctaccacagcgtcttcatccagcaccgggtgacccacactggagagaagctgtttggctgcaaggaatgtgggaagaccttctactacaacagcagcctgaccaggcacatgaagatccacactggagagaagccctgcaagtgcagtgaatgtgggaagaccttcacctaccgcagcgtcttcttccgccacagcatgacccacacagctgggaagccctatgagtgcaaggaatgtgggaagggcttctactacagctacagcctgaccaggcacaccaggagccacactggagagaagccctatgagtgcctggagcacaggaaggactttggctaccacagcgcctttgcccagcagagcaagatccacagcggcggcaagaacctgtag

SEQ ID NO: 170567 - DNA, 822 bp, Artificial Sequence
  derived and/or modified sequence
atgagccccaagcgggacggcctgggcaccggcgacggcctgcacagccaggtgctgcaggagcaagtgtccactggagacaacctgcatgaatgcgactcacaaggcccaagcaaagacactctggtgagagaaggaaagacttataaatgcaaagagtgtgggtccgtgtttaacaagaacagcctcttggtgagacaccagcagatccacactggagttaaaccttatgaatgccaggagtgcggaaaagcatttcctgagaaggtcgatttcgtgagaccaatgcggatccataccggtgagaagccatgtaaatgtgtggagtgtggcaaagtgtttaaccgaagatcccatctcttgtgttacaggcagattcatacgggtgagaagccttacgagtgctccgagtgtggcaagacattctcttaccacagcgtgtttattcaacatagggtcactcataccggggaaaaattgtttgggtgtaaagaatgcggcaagacattttactataatagctccctcaccagacacatgaaaatccacaccggggagaagccctgtaagtgcagcgagtgcggaaagaccttcacataccgctccgtgttcttcagacattctatgacccatacggccggcaagccatacgagtgcaaagaatgcggcaagggtttctactactcctactctctgacccgccacacacgcagccatactggagagaagccgtatgagtgtttagagcacagaaaagacttcggctatcactccgccttcgcacagcagagtaaaatccacagcggtggcaaaaatttatag

SEQ ID NO: 170568 - DNA, 822 bp, Artificial Sequence
  derived and/or modified sequence
atgagccccaagcgggacggcctgggcaccggcgacggcctgcacagccaggtgcttcaagaacaggtctccacgggtgacaacctccacgagtgtgattcccagggcccttcaaaagacacactggtgcgggaaggcaagacatacaagtgcaaagagtgcgggtccgtcttcaataaaaatagccttcttgtgagacaccaacagatccacactggagtgaaaccttatgagtgccaggaatgcgggaaagccttccctgaaaaagttgactttgtccggcctatgcggatccacacaggcgaaaaaccgtgcaagtgtgtcgaatgtggcaaggtttttaaccgtcggtcccacctgttgtgctaccgccagatacataccggagagaaaccttatgaatgctcagagtgcggcaaaactttcagctatcactccgtctttatccagcacagggtaacccatacaggggagaaactgtttggttgtaaggaatgcgggaaaaccttctactataattctagtttaacacggcatatgaagatccataccggggaaaaaccatgtaaatgtagtgagtgtggcaagacattcacctaccggtctgtcttctttcgacacagtatgactcataccgctgggaagccatacgagtgtaaagagtgcggaaaaggattctactattcctacagtttgacccgtcataccagatctcacacaggcgagaagccctatgagtgcctggagcataggaaggatttcggataccactccgccttcgcacagcagagtaaaatccatagtggagggaagaacctgtag

SEQ ID NO: 170569 - DNA, 822 bp, Artificial Sequence
  derived and/or modified sequence
atgagccctaagcgggatggactcgggaccggcgacggccttcactcccaggtgctgcaagagcaggttagtactggcgataatctgcatgaatgcgactctcaaggaccaagtaaggacactctcgtgcgtgagggaaagacttataaatgcaaagaatgtgggtcagtgtttaataagaattcactgttggttcgacaccagcagatccacaccggagtgaagccttacgaatgccaggaatgcggcaaggcgttccccgaaaaagtggatttcgtccgtccaatgagaattcacactggagagaaaccctgcaaatgtgtcgagtgtggcaaagtttttaacagaaggagccacttgctctgttatagacagatacacaccggcgaaaaaccatacgaatgcagcgaatgtggaaaaacgttctcatatcactcagtctttattcaacatagagtgacccatactggcgaaaagctcttcggctgtaaagaatgtggcaaaactttttattacaacagctctctgacccgtcacatgaagatccacactggcgaaaaaccatgcaaatgctctgaatgtggaaagacttttacctataggagcgttttttttcgccatagtatgacacacaccgcaggaaagccttacgaatgcaaagagtgcggcaaagggttttactattcatactccttgactcgacataccaggtcccacaccggagagaagccttatgagtgtcttgaacataggaaggattttggctaccattcagccttcgcccagcaatccaagattcattccgggggaaagaacctttag

SEQ ID NO: 170570 - DNA, 822 bp, Artificial Sequence
  derived and/or modified sequence
atgtctccaaaaagagacggactcggcaccggagacggcttacatagtcaagtactgcaagagcaggtgtctactggagataacctgcatgaatgtgacagccagggcccatcaaaagacactcttgtcagagaaggaaagacctataaatgtaaagagtgtgggagcgtgtttaacaaaaatagcctgctggttaggcaccagcagattcatacaggcgtgaagccttatgagtgccaagagtgcgggaaggcctttcccgaaaaagttgacttcgtgaggccgatgcgcatccataccggagaaaaaccctgcaaatgtgtcgaatgtggcaaggtcttcaaccggagatcccatttgctctgttatcgacagatacacacgggggagaaaccctacgagtgcagcgagtgtggaaagacattttcttatcattcagtgtttattcagcatcgggtgactcacaccggcgagaagctcttcggctgcaaagaatgcggaaagacattttactataattcttcgctaacccgacatatgaaaatccataccggcgagaagccttgcaaatgttccgaatgcggtaagactttcacctataggtcagtcttttttagacattctatgacccatacagccggtaaaccttatgagtgtaaagagtgcggcaagggattctactacagttatagcctgaccagacacacacgatcacatacaggagagaaaccatatgaatgtttggagcaccgcaaagactttgggtaccactctgcgttcgcacagcagagcaagatccatagcgggggaaaaaacctgtag

SEQ ID NO: 170571 - DNA, 2555 bp, Artificial Sequence
  derived and/or modified sequence
gccggagccagcagtggcaacccgctggggtccctttccacactgtggaagctttgttctttcgctctttgcaataaatcttgctacttctcactctttgggtccacactgcttttaccagctgtaacactcaccgcaaacgtctgcagcttcactcctgaagccagcgagaccacgagcccaccgggaggaacgaacaactccagacgcgccgccttaagccttaagagctgtaacactcaccacgaaggtctgcagcttcactcctgagccagcgagaccacgaacccgccagaaggaagaaactccgaacacatccgaacatcagaaggaacaaactctagacgcgccaccttaagagctgtaacactcaccacaagggtccgcggcttcattcttgaagtcagtgagaccaagaacccaccaattccggacacagttggaaatgcagaagggcacttgagtttggctgcagtctcccacacggagaccttctggaggaagatgagccctaaacgcgatgggttggggacaggtgatggtctgcactcacaggttttacaggagcaggtctccacaggagacaatctccatgaatgtgactcccagggaccaagtaaagacactttggttcgtgaggggaagacctacaaatgcaaggaatgtgggagcgtgtttaacaaaaacagcctccttgttcgacatcagcagattcacactggggtgaagccttatgaatgccaggagtgtggaaaagcctttcctgaaaaggtcgacttcgttcgacccatgaggattcacacaggggagaagccctgtaagtgcgtggagtgcgggaaggtcttcaaccgcaggtcgcacctcctgtgctaccgccagattcacactggagagaagccctatgagtgcagcgagtgtggaaagaccttcagctatcactctgtcttcatccagcatcgtgtgacccacactggagaaaaactctttgggtgcaaagaatgtggaaaaaccttttactacaactcttccttaacccggcacatgaagattcacactggagagaagccctgcaagtgcagtgagtgcgggaagaccttcacctaccgctctgttttcttccgacatagtatgacccacactgcaggaaagccctacgagtgcaaagaatgtgggaaaggtttttactacagctattccctcactcgacatacaaggagtcacactggagagaaaccttatgagtgccttgaacatagaaaggactttggctaccactctgcttttgcccaacagagtaagatccactctggaggaaaaaacctttgagtgcaaatgatgtgggaatttgtgggttttctttttttttttttctttgatacatagagagccacactgaggagaagcactctgaattcagtggcagtaggaaagctgtgacctgcagctcatcctcacttggcattgaagaattccttccagagataaactctatgagatatgtgggaaggccttttgcaagtgggcccacatcagtcaacgtcagagaacttaaactgcgaaaagacattttgacaaaaactagtgaagaaaatcttttggccacaggaaatatcttcctcagcatctgagaatttttccaggagggagacctgttggttattgtgcacttaaaagaaccacccacacctctctccatagtttatatcactaagccacttcaggattttttttttttaagtaagaagggaactgtaaaagagaaaaaaagaaattcatgcatagcttctgtcagacttctctgaaagccatgcctatcaaaatttgaattcagttcttcattttgcagatggctgaaagggacgagagaatgatggtgaagctgtgttgctttcccaggtgagccttgattatttcctctgtgctttctcagcttctttggccttctgtaagaggggcttctccaagagcatgtcactagttttctagaagttaaacaagagctaagacaaacaaaacaaaacacagcttatctaatctaatgagaaactcagaaaaaaatgttttgatgaatacaatgtattaaaatataaaacatgtagatcctttgacatgttaattcaattctagaaatcctcagaaatgtttttatattatgcagagatgtgcgtgcaaagaataatcgctgcagttttgtttttatgtgtgaaacgttgagaacaatctaaatgtttatcagttggaagtaagttatggtacatctgttctatgaaatactgtgaaacaataaggtatctctgtatgtactgatatcaaaacatctctaagatacagtatttagtaaaagagaaagtttcaggaaataaaactacatctagaagtataagcataaaactgttaatagtggttttctgcaggaaatgggatggaccagggttatatgcaatgttcagtttttacttttatacttaagtattgtttatgtttgaaaaataaaaagcatttattgtttttgcaataaatgtttaaaatatttcaataaagatagcatgttagaa

SEQ ID NO: 170572 - DNA, 2939 bp, Artificial Sequence
  derived and/or modified sequence
gccggagccagcagtggcaacccgctggggtccctttccacactgtggaagctttgttctttcgctctttgcaataaatcttgctacttctcactctttgggtccacactgcttttaccagctgtaacactcaccgcaaacgtctgcagcttcactcctgaagccagcgagaccacgagcccaccgggaggaacgaacaactccagacgcgccgccttaagccttaagagctgtaacactcaccacgaaggtctgcagcttcactcctgagccagcgagaccacgaacccgccagaaggaagaaactccgaacacatccgaacatcagaaggaacaaactctagacgcgccaccttaagagctgtaacactcaccacaagggtccgcggcttcattcttgaagtcagtgagaccaagaacccaccaattccggacacagttggaaatgcagaagggcacttgagtttggctgcagtctcccacacggagaccttctggaggaagatgagccctaaacgcgatgggttggggacaggtgatggtctgcactcacaggttttacaggagcaggtctccacaggagacaatctccatgaatgtgactcccagggaccaagtaaagacactttggttcgtgaggggaagacctacaaatgcaaggaatgtgggagcgtgtttaacaaaaacagcctccttgttcgacatcagcagattcacactggggtgaagccttatgaatgccaggagtgtggaaaagcctttcctgaaaaggtcgacttcgttcgacccatgaggattcacacaggggagaagccctgtaagtgcgtggagtgcgggaaggtcttcaaccgcaggtcgcacctcctgtgctaccgccagattcacactggagagaagccctatgagtgcagcgagtgtggaaagaccttcagctatcactctgtcttcatccagcatcgtgtgacccacactggagaaaaactctttgggtgcaaagaatgtggaaaaaccttttactacaactcttccttaacccggcacatgaagattcacactggagagaagccctgcaagtgcagtgagtgcgggaagaccttcacctaccgctctgttttcttccgacatagtatgacccacactgcaggaaagccctacgagtgcaaagaatgtgggaaaggtttttactacagctattccctcactcgacatacaaggagtcacactggagagaaaccttatgagtgccttgaacatagaaaggactttggctaccactctgcttttgcccaacagagtaagatccactctggaggaaaaaacctttgagtgcaaatgatgtgggaatttgtgggttttctttttttttttttctttgatacatagagagccacactgaggagaagcactctgaattcagtggcagtaggaaagctgtgacctgcagctcatcctcacttggcattgaagaattccttccagagataaactctatgagatatgtgggaaggccttttgcaagtgggcccacatcagtcaacgtcagagaacttaaactgcgaaaagacattttgacaaaaactagtgaagaaaatcttttggccacaggaaatatcttcctcagcatctgagaatttttccaggagggagacctgttggttattgtgcacttaaaagaaccacccacacctctctccatagtttatatcactaagccacttcaggattttttttttttaagtaagaagggaactgtaaaagagaaaaaaagaaattcatgcatagcttctgtcagacttctctgaaagccatgcctatcaaaatttgaattcagttcttcattttgcagatggctgaaaggtacaaaggccttgcctcgttatttgtcctttatatgtattcactcctgtctacaggagaattgtcctctgtaaagattaactctgtaaagatttattgaatgcattctttgttctaaaacattgtactcctgaggaatgtaagtctttgtgagaaatatgaacgcttaagtaatggaatatgtgaaacttgtaagaacgtagaatataaaaatactgccatataaaatcctttcatatctgaggaggtaagtaaccacattgaatgggcatattttgctacatcatttaagactacttaaggctttaatttaacaaaaaacaattcttcatgtggttttgaacacccagtgctcaatatacttgtttgttttgatttattttctcagggacgagagaatgatggtgaagctgtgttgctttcccaggtgagccttgattatttcctctgtgctttctcagcttctttggccttctgtaagaggggcttctccaagagcatgtcactagttttctagaagttaaacaagagctaagacaaacaaaacaaaacacagcttatctaatctaatgagaaactcagaaaaaaatgttttgatgaatacaatgtattaaaatataaaacatgtagatcctttgacatgttaattcaattctagaaatcctcagaaatgtttttatattatgcagagatgtgcgtgcaaagaataatcgctgcagttttgtttttatgtgtgaaacgttgagaacaatctaaatgtttatcagttggaagtaagttatggtacatctgttctatgaaatactgtgaaacaataaggtatctctgtatgtactgatatcaaaacatctctaagatacagtatttagtaaaagagaaagtttcaggaaataaaactacatctagaagtataagcataaaactgttaatagtggttttctgcaggaaatgggatggaccagggttatatgcaatgttcagtttttacttttatacttaagtattgtttatgtttgaaaaataaaaagcatttattgtttttgcaataaatgtttaaaatatttcaataaagatagcatgtt

SEQ ID NO: 170573 - DNA, 1554 bp, Artificial Sequence
  derived and/or modified sequence
atggtggacaagacccccgtgatgtgcagccacttcgcccaggacgtgtggcccgagcacagcatcaaggacagcttccagaaggtgatcctgagaacctacggcaagtacggccacgagaacctgcagctgagaaaggaccacaagagcgtggacgcctgcaaggtgtacaagggcggctacaacggcctgaaccagtgcctgaccaccaccgacagcaagatcttccagtgcgacaagtacgtgaaggtgttccacaagttccccaacgtgaacagaaacaagatcagacacaccggcaagaagcccttcaagtgcaagaacagaggcaagagcttctgcatgctgagccagctgacccagcacaagaagatccacaccagagagtacagctacaagtgcgaggagtgcggcaaggccttcaactggagcagcaccctgaccaagcacaagatcatccacaccggcgagaagccctacaagtgcgaggagtgcggcaaggccttcaacagaagcagcaacctgaccaagcacaagatcatccacaccggcgagaagccctacaagtgcgaggagtgcggcaaggccttcaacagaagcagcaccctgaccaagcacaagagaatccacaccgaggagaagccctacaagtgcgaggagtgcggcaaggccttcaaccagttcagcatcctgaacaagcacaagagaatccacatggaggacaagccctacaagtgcgaggagtgcggcaaggccttcagagtgttcagcatcctgaagaagcacaagatcatccacaccggcgagaagccctacaagtgcgaggagtgcggcaaggccttcaaccagttcagcaacctgaccaagcacaagatcatccacaccggcgagaagccctacaagtgcgacgagtgcggcaaggccttcaaccagagcagcaccctgaccaagcacaagagaatccacaccggcgagaagccctacaagtgcgaggagtgcggcaaggccttcaagcagagcagcaccctgaccgagcacaagatcatccacaccggcgagaagccctacaagtgcgagaagtgcggcaaggccttcagctggagcagcgccttcaccaagcacaagagaaaccacatggaggacaagccctacaagtgcgaggagtgcggcaaggccttcagcgtgttcagcaccctgaccaagcacaagatcatccacaccagagagaagccctacaagtgcgaggagtgcggcaaggccttcaaccagagcagcatcttcaccaagcacaagatcatccacaccgagggcaagagctacaagtgcgagaagtgcggcaacgccttcaaccagagcagcaacctgaccgccagaaagatcatctacaccggcgagaagccctacaagtacgaggagtgcgacaaggccttcaacaagttcagcaccctgatcacccaccagatcatctacaccggcgagaagccctgcaagcacgagtgcggcagagccttcaacaagagcagcaactacaccaaggagaagctgcagacctag

SEQ ID NO: 170574 - DNA, 1554 bp, Artificial Sequence
  derived and/or modified sequence
atggtagataagactccggtgatgtgcagccattttgctcaggatgtttggcctgagcactccataaaggacagtttccaaaaggtcatccttcgcacatatgggaaatatggccatgaaaaccttcagcttcgcaaagaccacaagagcgtcgatgcctgcaaagtgtataaaggaggttataatggactgaaccagtgtctgactaccaccgactctaagatctttcagtgtgataagtatgtcaaggttttccataagttcccgaacgttaatcgcaacaagatcaggcataccggcaaaaagcccttcaagtgcaaaaatcgtgggaaatcattctgtatgctcagccagttaacccagcacaagaagattcatacacgggagtacagctacaagtgcgaggaatgcggcaaggcattcaattggtcttccacgctgacaaagcacaaaatcattcatacaggcgagaaaccatacaagtgtgaggaatgcgggaaagcgtttaatcggagctctaatttgactaagcacaaaataatccacaccggagagaagccgtataaatgtgaggagtgcgggaaggccttcaacaggagcagtacacttactaagcataaacggattcacaccgaggagaagccatacaagtgcgaggagtgtggtaaggctttcaaccagtttagtattctcaacaagcataagcggatacatatggaagacaagccctataagtgtgaagagtgcgggaaagctttcagggtcttttccatcctcaagaagcacaaaataattcataccggcgagaagccctacaagtgtgaggagtgcggtaaggccttcaaccagttctccaacttgacaaaacataagataatccatactggcgaaaagccttacaagtgtgacgaatgcgggaaggccttcaaccagagctccactctgacaaaacacaagcgcattcataccggcgaaaagccctacaagtgcgaggagtgtggcaaagccttcaaacagtcctctaccctcaccgagcacaaaattatccacacaggggaaaagccctacaaatgcgagaagtgtggcaaagcgttcagctggtcctctgctttcactaagcacaagaggaatcacatggaggataagccttataaatgtgaagagtgcggaaaggcattcagcgtgttctcgacactgacaaagcacaaaataattcacactcgcgagaagccctacaaatgtgaagagtgcgggaaagcttttaatcagtcttcaatatttactaaacacaagataattcacacagagggcaagtcttacaaatgcgagaagtgtggcaatgcatttaatcaaagcagtaacctgacagcccggaagatcatttatactggtgaaaagccttacaagtatgaggagtgtgacaaagctttcaataaattcagcaccttgatcacacaccagattatctacactggcgaaaagccctgtaaacatgagtgcgggagagcattcaacaaatcaagcaattatacaaaagagaaactccagacttag

SEQ ID NO: 170575 - DNA, 1554 bp, Artificial Sequence
  derived and/or modified sequence
atggtggacaagacccctgtgatgtgcagccactttgcccaggatgtgtggccagagcacagcatcaaggacagcttccagaaggtgatcctgcggacctacggcaagtatggccacgagaacctgcagctgaggaaggaccacaagtctgtggatgcctgcaaggtgtacaagggcggctacaacggcctgaaccagtgcctgaccaccacagacagcaagatcttccagtgtgacaagtatgtgaaggtgttccacaagttccccaacgtgaacagaaacaagatccgccacacaggcaagaagcccttcaagtgcaagaacagaggcaagagcttctgcatgctgagccagctgacccagcacaagaagatccacacccgggagtacagctacaagtgtgaggagtgtgggaaggccttcaactggagcagcaccctgaccaagcacaagatcatccacactggagagaagccctacaagtgtgaggagtgtgggaaggccttcaacagaagcagcaacctgaccaagcacaagatcatccacactggagagaagccctacaagtgtgaggagtgtgggaaggccttcaacagaagcagcaccctgaccaagcacaagaggatccacacagaggagaagccctacaagtgtgaggagtgtgggaaggccttcaaccagttcagcatcctgaacaagcacaagaggatccacatggaggacaagccctacaagtgtgaggagtgtgggaaggccttccgggtcttcagcatcctgaagaagcacaagatcatccacactggagagaagccctacaagtgtgaggagtgtgggaaggccttcaaccagttcagcaacctgaccaagcacaagatcatccacactggagagaagccctacaagtgtgatgaatgtgggaaggccttcaaccagagcagcaccctgaccaagcacaagaggatccacactggagagaagccctacaagtgtgaggagtgtgggaaggccttcaagcagagcagcaccctgacagagcacaagatcatccacactggagagaagccctacaagtgtgagaagtgtgggaaggccttctcctggagcagcgccttcaccaagcacaagaggaaccacatggaggacaagccctacaagtgtgaggagtgtgggaaggccttcagcgtcttcagcaccctgaccaagcacaagatcatccacacccgggagaagccctacaagtgtgaggagtgtgggaaggccttcaaccagagcagcatcttcaccaagcacaagatcatccacacagagggcaagagctacaagtgtgagaagtgtggaaatgccttcaaccagagcagcaacctgacagccaggaagatcatctacacaggagagaagccctacaagtatgaggagtgtgacaaggccttcaacaagttcagcaccctcatcacccaccagatcatctacacaggagagaagccctgcaagcatgaatgtggccgggccttcaacaagagcagcaactacaccaaggagaagctgcagacctag

SEQ ID NO: 170576 - DNA, 1554 bp, Artificial Sequence
  derived and/or modified sequence
atggtggacaagacccccgtgatgtgcagccacttcgcccaggacgtgtggcctgagcactctattaaggatagcttccaaaaagtgatactgcgcacatatgggaagtacgggcacgagaacctgcagcttcgtaaggaccacaagtccgtggacgcgtgtaaagtttacaagggtggatataatgggctgaaccaatgtttgaccaccacagattctaaaatcttccagtgtgacaaatacgtgaaggtctttcacaagttcccaaacgtcaaccgaaataaaataagacatactggcaagaaaccatttaagtgtaagaatagagggaagtcgttctgcatgctgtctcagttgacgcagcataagaagatacacacccgagaatactcctataagtgtgaggagtgcggtaaggccttcaactggagcagcaccctcaccaaacataagattatccataccggcgagaagccctataagtgcgaggaatgtggcaaagccttcaaccgatcctcaaatctgactaagcataagattatccatacaggcgaaaagccctacaaatgcgaagagtgtggcaaagcttttaacagaagctcgacactgactaagcacaaaagaatacatacagaagagaagccttacaagtgcgaggagtgtggcaaagcattcaaccagttttcaatcttaaataaacataagagaattcacatggaagataaaccctataagtgcgaggagtgcggaaaagcttttcgtgtgttttcaatcctcaaaaagcacaaaatcatccacactggagaaaagccctataagtgcgaggaatgcggtaaggccttcaaccagtttagcaacctgacgaaacataaaatcatccacacaggggagaagccatataagtgcgacgaatgcgggaaagcattcaatcagtcctcaacccttaccaaacacaaacggatacacacaggagaaaaaccctacaaatgcgaggagtgtggaaaagcattcaaacagagttcaactctcaccgagcacaagataattcacaccggcgagaagccttataagtgcgaaaagtgtggcaaagctttttcatggtcttccgctttcacaaaacacaagaggaaccacatggaagataagccgtacaagtgtgaggagtgcggcaaggccttctcagtgttcagtacattgactaagcataaaattattcacacaagggaaaagccatacaagtgcgaggaatgtggcaaggcttttaatcagtcaagtatctttacgaagcacaaaataatccacacagagggtaagagctacaaatgtgagaagtgcgggaatgccttcaaccagagttccaatttaacggcgcgaaagatcatctacaccggggaaaagccttacaaatatgaagaatgcgataaagcctttaataaattttccactctcatcacacaccagataatttatacaggggaaaagccctgtaagcatgagtgtggccgggcgtttaataagagctctaattacactaaggagaagctgcaaacatag

SEQ ID NO: 170577 - DNA, 1554 bp, Artificial Sequence
  derived and/or modified sequence
atggtggacaagacacccgtaatgtgtagtcacttcgctcaggacgtttggccagagcacagcataaaagattcctttcagaaagtaatcctcaggacatacggtaagtatggtcacgaaaacctccagctaagaaaggaccacaagagtgtggatgcctgcaaagtttacaagggcggttataatggactgaaccagtgtctgactaccactgattctaaaatctttcagtgcgacaaatacgtcaaggtgtttcataagttccccaatgtcaaccggaacaaaattcggcacactggaaagaaacccttcaaatgcaagaatcggggaaaaagcttttgtatgctgtctcagctgacacagcataagaagatccatacaagggaatatagctacaagtgtgaggagtgcgggaaagcatttaattggtcgagtactttgaccaaacataaaattatacacacaggagagaaaccatataaatgtgaagaatgcggcaaagcattcaaccggtccagtaaccttactaaacacaagataattcacacaggcgagaagccctataagtgtgaggagtgcggtaaggccttcaatcgctctagcacactgacaaaacataagcgtattcatacagaggagaagccatacaagtgcgaagagtgcggcaaggctttcaatcaatttagcatattgaacaagcacaaacgtatccatatggaagataagccctataagtgcgaagaatgtggaaaggcatttagagttttttctattttgaagaagcataaaattatacatacaggagagaaaccctacaagtgcgaggagtgcggaaaggcatttaatcaattcagcaacctcaccaagcacaagataattcacaccggggaaaaaccctacaagtgcgacgagtgtggcaaagcgtttaatcagtcaagcaccctgacgaaacataagagaatccataccggagagaaaccgtataaatgcgaggagtgcgggaaagcttttaaacagagcagcaccttgaccgagcacaagatcatacatacaggtgaaaagccctataagtgcgaaaaatgcgggaaagccttttcctggagctccgcttttaccaagcataagcggaaccacatggaggataagccctataagtgtgaagagtgcggcaaagccttttccgtcttttctactctgacaaagcataaaataatccacacacgagagaaaccatacaagtgcgaggaatgtggcaaagcattcaaccagtcctccatttttacgaagcacaagatcatccacaccgagggaaagagttacaagtgcgagaagtgtggcaacgcgtttaatcagagctctaacctgactgctcggaagataatttataccggagagaagccttataagtacgaagagtgtgataaggccttcaataagttctcaacactgattacacatcagatcatttatacaggagaaaaaccctgcaagcacgaatgcgggcgagcgtttaataagagctctaattatacaaaagagaaactccaaacttag

SEQ ID NO: 170578 - protein, 711 aa, Artificial Sequence
  derived and/or modified sequence
MPADVNLSQKPQVLGPEKQDGSCEASVSFEDVTVDFSREEWQQLDPAQRCLYRDVMLELYSHLFAVGYHIPNPEVIFRMLKEKEPRVEEAEVSHQRCQEREFGLEIPQKEISKKASFQKDMVGEFTRDGSWCSILEELRLDADRTKKDEQNQIQPMSHSAFFNKKTLNTESNCEYKDPGKMIRTRPHLASSQKQPQKCCLFTESLKLNLEVNGQNESNDTEQLDDVVGSGQLFSHSSSDACSKNIHTGETFCKGNQCRKVCGHKQSLKQHQIHTQKKPDGCSECGGSFTQKSHLFAQQRIHSVGNLHECGKCGKAFMPQLKLSVYLTDHTGDIPCICKECGKVFIQRSELLTHQKTHTRKKPYKCHDCGKAFFQMLSLFRHQRTHSREKLYECSECGKGFSQNSTLIIHQKIHTGERQYACSECGKAFTQKSTLSLHQRIHSGQKSYVCIECGQAFIQKAHLIVHQRSHTGEKPYQCHNCGKSFISKSQLDIHHRIHTGEKPYECSDCGKTFTQKSHLNIHQKIHTGERHHVCSECGKAFNQKSILSMHQRIHTGEKPYKCSECGKAFTSKSQFKEHQRIHTGEKPYVCTECGKAFNGRSNFHKHQITHTRERPFVCYKCGKAFVQKSELITHQRTHMGEKPYECLDCGKSFSKKPQLKVHQRIHTGERPYVCSECGKAFNNRSNFNKHQTTHTRDKSYKCSYSVKGFTKQ

SEQ ID NO: 170579 - DNA, 3788 bp, Artificial Sequence
  derived and/or modified sequence
agagcgaccatttagcttctgttgttaagtggatctaagcctatgtcgcttactggacgctgaagtgattgggaatattagcagtgggggttctgtagggtcaggaaggggcggctggctttgggggagtgatgaggggcttgttgggggtgggggtgcgtgataaagggatttctcggctgaagacgaggctgtgaggcttctgcagaacccccaggtcaggccacatcattgaggctgcaggatctctcttcatagcccagtacgactctccgccgtgtccctggttggaaaatccaaacacctatccagcttctggctcctgggaaaagtggagttgtcagcaagagagaccgagagtagaagcccagagtggagatgcctgctgatgtgaatttatcccagaagcctcaggtcctgggtccagagaagcaggatggatcttgcgaggcatcagtgtcatttgaggacgtgaccgtggacttcagcagggaggagtggcagcaactggaccctgcccagagatgcctgtaccgggatgtgatgctggagctctatagccatctcttcgcagtggggtatcacattcccaacccagaggtcatcttcagaatgctaaaagaaaaggagccgcgtgtggaggaggctgaagtctcacatcagaggtgtcaagaaagggagtttgggcttgaaatcccacaaaaggagatttctaagaaagcttcatttcaaaaggatatggtaggtgagttcacaagagatggttcatggtgttccattttagaagaactgaggctggatgctgaccgcacaaagaaagatgagcaaaatcaaattcaacccatgagtcacagtgctttcttcaacaagaaaacattgaacacagaaagcaattgtgaatataaggaccctgggaaaatgattcgcacgaggccccaccttgcttcttcacagaaacaacctcagaaatgttgcttatttacagaaagtttgaagctgaacctagaagtgaacggtcagaatgaaagcaatgacacagaacagcttgatgacgttgttgggtctggtcagctattcagccatagctcttctgatgcctgcagcaagaatattcatacaggagagacattttgcaaaggtaaccagtgtagaaaagtctgtggccataaacagtcactcaagcaacatcaaattcatactcagaagaaaccagatggatgttctgaatgtggggggagcttcacccagaagtcacacctctttgcccaacagagaattcatagtgtaggaaacctccatgaatgtggcaaatgtggaaaagccttcatgccacaactaaaactcagtgtatatctgacagatcatacaggtgatataccctgtatatgcaaggaatgtgggaaggtctttattcagagatcagaattgcttacgcaccagaaaacacacactagaaagaagccctataaatgccatgactgtggaaaagcctttttccagatgttatctctcttcagacatcagagaactcacagtagagaaaaactctatgaatgcagtgaatgtggcaaaggcttctcccaaaactcaaccctcattatacatcagaaaattcatactggtgagagacagtatgcatgcagtgaatgtgggaaagcctttacccagaagtcaacactcagcttgcaccagagaatccactcagggcagaagtcctatgtgtgtatcgaatgcgggcaggccttcatccagaaggcacacctgattgtccatcaaagaagccacacaggagaaaaaccttatcagtgccacaactgtgggaaatccttcatttccaagtcacagcttgatatacatcatcgaattcatacaggggagaaaccttatgaatgcagtgactgtggaaaaaccttcacccaaaagtcacacctgaatatacaccagaaaattcatactggagaaagacaccatgtatgcagtgaatgcgggaaagccttcaaccagaagtcaatactcagcatgcatcagagaattcacaccggagagaagccttacaaatgcagtgaatgtgggaaagccttcacttctaagtctcaattcaaagagcatcagcgaattcacacgggtgagaaaccctatgtgtgcactgaatgtgggaaggccttcaacggcaggtcaaatttccataaacatcaaataactcacactagagagaggccttttgtctgttacaaatgtgggaaggcttttgtccagaaatcagagttgattacccatcaaagaactcacatgggagagaaaccctatgaatgccttgactgtgggaaatcgttcagtaagaaaccacaactcaaggtgcatcagcgaattcacacgggagaaagaccttatgtgtgttctgaatgtggaaaggccttcaacaacaggtcaaacttcaataaacaccaaacaactcataccagagacaaatcttacaaatgcagttattctgtgaaaggctttaccaagcaatgaattcctagtgcatcagcatattcataaatgaaatatactccgagtttcttgaagaagagaaaatcttctcagaatcaggtctaattatatgttattgaattcatgcttcagaaaaactctagggatgcactgcatgtgtgaacacatgataaaaaagtcatgctttattttagtgagggcaattacagagaaaagagtaagcagaaatgtccttctgagtactggcctcattaaggattataaattttctccccgggaagaaaccctgactaacgcattgagaaaagcctttctgtaaagaatggtacaagacaggttgttactcgattatttatagtaaaatatgtgggaaattatatcaatgataaccctgtttattgtgggatatcaatatttttaaagtgccaacacagtcatgataggacaatattttatgtgtgtgtgtgcgccttatgtatataagcatatatataatatataagcatattattatatacaggttgagtatcccttctccaaaatgcctgggatcagaagcattttggatttcagatacttacagattttggaatatttgcattatatttattggttgagcatccctaatctgaaaatccaagattaaatgctccaattagcatttcctttgagcgtcatgttagagttcaaaaagtttcagattttgggttttcagattaggaatacccaacctgtatgtacgtatatttctgtatctatgtatgtatatatatgcatatgcagacatatgtatatggtctggtcagcatatgtgtatgtatgcgtatgtatgtatgtatgtatgccctcagtgcagtggggtttgctgcagaattcactgcatagcaggagatgtaagcagatgagttattttttaagagaatctaatctaattgtttttataaaaattattccctattgaatatttatataatgaggttgtatcaacaatgattaactcctttattatacatacacatgaatgtgcatttttggtaaatgcataaatgagattctataatgtttactgatctttatattacagattttctcttcttttaggattagctcagcttgccccccctttccatctccaccatctatagtgagcctctccataattagtgccaaccattagtctcgttcatatttttacaccaggagtcaacaaactgtggccattggccaaatatggcctcccaactgtttttttaaaataaagttttattggaacacagccatgttcatttggaaaa

SEQ ID NO: 170580 - DNA, 2136 bp, Artificial Sequence
  derived and/or modified sequence
atgcccgccgacgtgaacctgagccagaagccccaggtgctgggccccgagaagcaggacggcagctgcgaggccagcgtgagcttcgaggacgtgaccgtggacttcagcagagaggagtggcagcagctggaccccgcccagagatgcctgtacagagacgtgatgctggagctgtacagccacctgttcgccgtgggctaccacatccccaaccccgaggtgatcttcagaatgctgaaggagaaggagcccagagtggaggaggccgaggtgagccaccagagatgccaggagagagagttcggcctggagatcccccagaaggagatcagcaagaaggccagcttccagaaggacatggtgggcgagttcaccagagacggcagctggtgcagcatcctggaggagctgagactggacgccgacagaaccaagaaggacgagcagaaccagatccagcccatgagccacagcgccttcttcaacaagaagaccctgaacaccgagagcaactgcgagtacaaggaccccggcaagatgatcagaaccagaccccacctggccagcagccagaagcagccccagaagtgctgcctgttcaccgagagcctgaagctgaacctggaggtgaacggccagaacgagagcaacgacaccgagcagctggacgacgtggtgggcagcggccagctgttcagccacagcagcagcgacgcctgcagcaagaacatccacaccggcgagaccttctgcaagggcaaccagtgcagaaaggtgtgcggccacaagcagagcctgaagcagcaccagatccacacccagaagaagcccgacggctgcagcgagtgcggcggcagcttcacccagaagagccacctgttcgcccagcagagaatccacagcgtgggcaacctgcacgagtgcggcaagtgcggcaaggccttcatgccccagctgaagctgagcgtgtacctgaccgaccacaccggcgacatcccctgcatctgcaaggagtgcggcaaggtgttcatccagagaagcgagctgctgacccaccagaagacccacaccagaaagaagccctacaagtgccacgactgcggcaaggccttcttccagatgctgagcctgttcagacaccagagaacccacagcagagagaagctgtacgagtgcagcgagtgcggcaagggcttcagccagaacagcaccctgatcatccaccagaagatccacaccggcgagagacagtacgcctgcagcgagtgcggcaaggccttcacccagaagagcaccctgagcctgcaccagagaatccacagcggccagaagagctacgtgtgcatcgagtgcggccaggccttcatccagaaggcccacctgatcgtgcaccagagaagccacaccggcgagaagccctaccagtgccacaactgcggcaagagcttcatcagcaagagccagctggacatccaccacagaatccacaccggcgagaagccctacgagtgcagcgactgcggcaagaccttcacccagaagagccacctgaacatccaccagaagatccacaccggcgagagacaccacgtgtgcagcgagtgcggcaaggccttcaaccagaagagcatcctgagcatgcaccagagaatccacaccggcgagaagccctacaagtgcagcgagtgcggcaaggccttcaccagcaagagccagttcaaggagcaccagagaatccacaccggcgagaagccctacgtgtgcaccgagtgcggcaaggccttcaacggcagaagcaacttccacaagcaccagatcacccacaccagagagagacccttcgtgtgctacaagtgcggcaaggccttcgtgcagaagagcgagctgatcacccaccagagaacccacatgggcgagaagccctacgagtgcctggactgcggcaagagcttcagcaagaagccccagctgaaggtgcaccagagaatccacaccggcgagagaccctacgtgtgcagcgagtgcggcaaggccttcaacaacagaagcaacttcaacaagcaccagaccacccacaccagagacaagagctacaagtgcagctacagcgtgaagggcttcaccaagcagtag

SEQ ID NO: 170581 - DNA, 2136 bp, Artificial Sequence
  derived and/or modified sequence
atgccggccgatgtcaatttgagtcaaaaacctcaagtgctgggccctgaaaaacaagacgggtcttgcgaggcttctgtgtcctttgaggatgtcaccgtagatttttccagagaggaatggcagcagctagaccctgcccagaggtgcctctaccgcgacgtcatgctcgagctctactcacacctcttcgcggtcgggtatcacatacctaatcccgaagtgatctttcggatgcttaaggaaaaagaaccgcgggtggaggaggctgaagtttcccaccagcgatgccaggaaagagagttcggcctggagataccccagaaggaaatctcaaaaaaagcctcctttcagaaagatatggtgggcgagtttacacgggatggctcttggtgtagcatcctggaggagctgaggttggacgcggacagaactaaaaaggacgagcaaaatcagatccagccaatgtcgcattcagctttttttaacaagaagaccctgaacacggaatctaactgtgaatataaggaccctggcaagatgatccgtactcgtccacatctggcctcctcccagaagcagccccaaaagtgctgcttgtttactgagagcctcaaattaaatttagaagtgaatggccagaatgaatctaacgatacagagcaactagatgatgtagtcggctcaggacagctgttctcacatagttccagcgatgcctgttcaaaaaacattcacaccggcgaaacgttctgtaaggggaaccagtgcagaaaggtgtgtggccacaagcagtccctgaagcagcaccagatacacacacagaaaaagcctgacgggtgctctgaatgcggtggctccttcactcagaaaagccacttattcgctcagcagcggattcattccgtgggcaacctacacgaatgtgggaagtgcggaaaggcattcatgccgcaacttaaactgagcgtttacctcactgaccacacaggcgatattccatgcatctgcaaggaatgtggaaaagttttcatccagaggagcgaactgttaacccaccaaaaaacccacaccagaaagaaaccctacaaatgccacgattgtggtaaagccttcttccagatgctatcactctttaggcaccaaaggactcactctcgcgagaagctctacgaatgtagcgagtgcgggaaagggttcagtcagaactctaccctgatcatccaccaaaagattcatacgggtgaacgccagtacgcatgttccgagtgcgggaaggcctttactcagaaatctactctatcacttcatcagaggatacattctggtcaaaaatcatacgtctgcattgagtgcggacaggcttttattcaaaaggcgcatctgattgtccaccaaaggtcccacacgggagaaaaaccttaccagtgccataattgtggcaaatctttcatatcgaaaagccaactggacatccatcacagaatccataccggtgaaaaaccctacgagtgcagcgactgtgggaagacattcacacaaaagtcgcacctgaatatccaccagaagatacatacgggcgaacggcatcacgtctgctccgaatgtggtaaggcattcaaccagaaatccattctgtccatgcaccagaggatccacaccggtgaaaaaccttacaagtgcagcgagtgcggcaaagcattcacctccaaatctcagttcaaagagcaccaaagaatccacacaggggagaaaccctatgtctgcacggagtgcggaaaggccttcaatggccggagcaattttcacaaacaccagatcactcatacaagggagcgccccttcgtctgctacaagtgtggaaaggccttcgtccagaaatcggagctgatcacccaccagaggacccacatgggcgagaagccttatgaatgcttggactgcgggaaatcttttagtaagaaaccccagctcaaggtgcaccagaggatacatacaggcgagaggccttacgtttgcagcgaatgcggcaaagccttcaacaataggagcaattttaacaaacatcagaccacgcacacacgcgataagtcctacaaatgtagttattcagtgaagggctttacgaaacagtag

SEQ ID NO: 170582 - DNA, 2136 bp, Artificial Sequence
  derived and/or modified sequence
atgccagcagatgtgaacctgagccagaagccccaggtgctgggccctgagaagcaggacggcagctgtgaggcctctgtgtcctttgaagatgtgacagtggacttcagccgggaggagtggcagcagctggaccctgcccagcgctgcctgtacagagatgtgatgctggagctgtacagccacctgtttgctgtgggctaccacatccccaaccctgaggtgatcttcaggatgctgaaggagaaggagccccgggtggaggaggccgaggtgagccaccagcgctgccaggagcgggagtttggcctggagatcccccagaaggagatcagcaagaaggccagcttccagaaggacatggtgggggagttcaccagagatggctcctggtgcagcatcctggaggagctgcggctggatgctgacaggaccaagaaggatgagcagaaccagatccagcccatgagccacagcgccttcttcaacaagaagaccctgaacacagagagcaactgtgagtacaaggaccccgggaagatgatccgcacccggccccacctggccagcagccagaagcagccccagaagtgctgcctcttcacagagagcctgaagctgaacctggaggtgaatggccagaatgaaagcaatgacacagagcagctggatgatgtggtgggcagcggccagctgttcagccacagcagcagtgatgcctgcagcaagaacatccacactggagagaccttctgcaagggcaaccagtgcaggaaggtgtgtggccacaagcagagcctgaagcagcaccagatccacacccagaagaagccagatggctgcagtgaatgtggcggcagcttcacccagaagagccacctgtttgcccagcagaggatccacagcgtgggcaacctgcatgaatgtgggaaatgtgggaaggccttcatgccccagctgaagctgtctgtgtacctgacagaccacactggagacatcccctgcatctgcaaggaatgtgggaaggtgttcatccagaggtctgagctgctgacccaccagaagacccacaccaggaagaagccctacaagtgccacgactgtgggaaggccttcttccagatgctgagcctcttccgccaccagaggacccacagccgggagaagctgtatgagtgcagtgaatgtgggaagggcttcagccagaacagcaccctcatcatccaccagaagatccacactggagagcggcagtatgcctgcagtgaatgtgggaaggccttcacccagaagagcaccctgagcctgcaccagaggatccacagcggccagaagagctatgtgtgcattgaatgtggccaggccttcatccagaaggcccacctgattgtgcaccagaggagccacactggagagaagccctaccagtgccacaactgtgggaagagcttcatcagcaagagccagctggacatccaccaccgcatccacactggagagaagccctatgagtgcagcgactgtgggaagaccttcacccagaagagccacctgaacatccaccagaagatccacactggagagcggcaccacgtgtgcagtgaatgtgggaaggccttcaaccagaagagcatcctgtccatgcaccagaggatccacactggagagaagccctacaagtgcagtgaatgtgggaaggccttcaccagcaagagccagttcaaggagcaccagaggatccacactggagagaagccctacgtgtgcacagaatgtgggaaggccttcaacggccgcagcaacttccacaagcaccagatcacccacacccgggagcggccctttgtgtgctacaagtgtgggaaggcctttgtgcagaagtctgagctgatcacccaccagaggacccacatgggagagaagccctatgagtgcctggactgtgggaagagcttcagcaagaagccccagctgaaggtgcaccagaggatccacactggagagcggccctacgtgtgcagtgaatgtgggaaggccttcaacaacagaagcaacttcaacaagcaccagaccacccacacccgggacaagagctacaagtgcagctacagcgtgaagggcttcaccaagcagtag

SEQ ID NO: 170583 - DNA, 2136 bp, Artificial Sequence
  derived and/or modified sequence
atgcccgccgacgtgaacctgagccagaagccccaggtgctgggccctgaaaagcaggacggaagttgcgaggcttcagtgtcttttgaggatgtgacggtagactttagccgcgaagagtggcagcagctggaccctgcccagaggtgtttataccgagatgtgatgttggagctctattcccatcttttcgccgtaggataccatatcccgaatcctgaggtgatttttaggatgttgaaagagaaggagccaagagtggaggaagccgaggtctcccaccaacggtgccaagagcgagagttcggtttagagattccgcagaaggagattagcaaaaaggccagttttcagaaggacatggttggtgaatttacgagagatggcagttggtgttccatcttagaagagttgcggctggatgccgaccgtaccaaaaaggacgagcagaaccagattcagccaatgagtcactctgctttcttcaataaaaaaacattgaacactgagtccaactgcgagtataaagacccaggtaaaatgatccggacccgcccacaccttgcctcctcccaaaagcagccccagaaatgctgcctgttcactgagagcctcaagctaaacctcgaggtcaacgggcagaacgagtctaacgacacagagcagctggacgacgtcgttggcagcggccaactgttcagccactcatcgtccgatgcctgcagcaagaacattcataccggcgagactttttgcaagggcaaccagtgtaggaaagtgtgtggccacaaacaatccctgaagcagcaccagatccatacccagaagaaacctgatggctgttccgagtgcggcggaagtttcactcagaaatctcatctgttcgcccagcagcggattcatagcgtggggaaccttcacgaatgtggaaaatgcggtaaagcatttatgcctcagctgaaactgagcgtttaccttacggaccacacgggcgatattccgtgcatctgtaaggaatgcggcaaggtgtttatacagagatctgaactactgacccatcagaaaactcacacaaggaagaagccatacaagtgtcacgattgtggtaaagcatttttccagatgctctcattattccgtcatcaacggacccattcacgagagaagctatatgagtgcagcgaatgcggcaaaggtttttcacagaacagcactttgattattcaccaaaaaattcataccggcgagagacaatatgcttgcagcgagtgtggaaaagcattcactcagaaatctacactgagcttacatcagcgaatacacagcggccaaaagtcttacgtgtgtattgaatgcggtcaggcatttatccagaaggcgcatcttattgttcaccagcgaagtcacaccggggaaaaaccctaccagtgccacaactgtggcaagagcttcatctcgaaaagccagttagacattcatcatcggatccataccggcgagaaaccgtatgaatgcagcgattgcgggaagacctttacacagaaatcccacctgaatatccatcagaagattcacacgggagaacgccatcatgtctgcagcgagtgtggcaaggctttcaatcaaaaatccatcctgtcaatgcaccagcggatccataccggcgagaagccatataagtgcagtgagtgcggtaaggcctttacatcaaagagccagtttaaagagcatcaaagaattcacaccggggagaagccttacgtttgcactgagtgtggcaaagccttcaacggccgctcaaacttccataaacaccagatcacccatactagggagaggcccttcgtgtgctataagtgtggaaaagcgttcgtgcagaagtctgagctgattacccaccagcgcacccacatgggggagaaaccctatgaatgcctggactgcgggaagtcattctccaaaaaaccacagctcaaagtccaccaacggattcataccggcgaacgcccgtatgtttgtagcgagtgcggaaaggccttcaataatagaagcaacttcaataagcatcagactacgcatactcgagataaaagttataagtgtagctatagcgtaaagggattcaccaaacagtag

SEQ ID NO: 170584 - DNA, 2136 bp, Artificial Sequence
  derived and/or modified sequence
atgccagcagacgttaacctgtctcagaaacctcaggtgctggggccagagaagcaggatgggagctgcgaggcgtctgtgagcttcgaggacgtgactgtcgactttagcagggaagagtggcaacagctggatccggcacagaggtgtttgtatcgggacgtcatgttggagctgtacagtcatctttttgccgtcggttaccacatcccaaaccctgaagtcatattccgcatgctgaaggagaaggaaccgagagttgaggaagctgaggtctcccatcagcggtgccaagaaagggaatttggcctcgaaatcccgcaaaaagaaattagtaagaaggcatccttccagaaagacatggtgggagagtttacacgcgacgggtcttggtgctctattctagaagaattacggctggatgcagacagaactaaaaaggacgaacagaatcaaattcaacctatgtcccactccgcgttctttaataagaaaactctaaacactgaatcgaattgtgagtacaaggacccgggtaaaatgattcggacccgaccacatcttgcctctagtcagaaacaacctcagaaatgctgtctgttcactgagtcactgaagctgaacctcgaggtgaatggccagaatgaatccaacgacactgaacaactggatgacgtggtaggcagcgggcagctgttcagccactcttcctcggacgcctgtagtaagaatattcacaccggggagacattttgcaagggcaatcaatgccggaaggtgtgcggccacaagcagtctttgaagcaacaccagattcatacccagaagaagcctgacggctgctctgagtgcgggggatcttttacccagaaatcccacttgttcgcccagcagaggattcacagcgtgggtaatctgcacgagtgcggaaaatgtggcaaagccttcatgcctcagctgaagctgagtgtgtaccttacagaccatacaggagacatcccttgtatatgcaaggaatgtggtaaagtgtttatccagagaagcgagctgctgactcatcaaaaaacacacacccggaaaaagccatataagtgccacgactgtggtaaggccttcttccagatgctatcgctgtttaggcaccagcgaactcacagcagggagaaactgtatgaatgtagcgagtgtgggaaaggtttcagccaaaactccacgctgatcatccatcagaaaatccataccggggaacgtcaatacgcatgcagcgagtgcggaaaggccttcacccagaagtcaacgctgtccctgcaccagcgcattcattccggccagaaatcctacgtgtgcattgaatgtggccaggcatttatccaaaaggcccacttaatcgtgcaccagcgctctcataccggagagaagccttaccagtgtcacaattgtgggaagtctttcatctctaaaagccagcttgacatccaccacagaattcatacaggagagaagccgtatgaatgtagcgattgcggaaagactttcacacaaaaaagtcacctgaatatccaccagaagattcacactggcgagcgacatcatgtgtgttctgagtgtggtaaggcttttaaccagaaaagtatcctaagcatgcaccagcggatccacacaggtgagaagccctataaatgctccgagtgtggaaaggcatttactagcaagtctcagtttaaagaacatcagagaatccacaccggagagaaaccctatgtatgcaccgaatgcggaaaagccttcaatggtcgctccaattttcataaacatcaaatcacacacactagggaacggccattcgtatgctacaagtgcggcaaggccttcgtgcagaagtcagagctgataacccaccagaggacacacatgggagagaagccatatgaatgtcttgactgtggcaaaagtttctccaaaaaacctcagctgaaggtgcatcagcgcatccacacaggtgagcgcccttacgtatgctctgagtgcggtaaggccttcaataaccgtagcaattttaacaagcatcagacgacgcatacccgggataagtcatacaagtgtagctattctgtgaaaggctttactaagcagtag

SEQ ID NO: 170585 - DNA, 3742 bp, Artificial Sequence
  derived and/or modified sequence
gttgttaagtggatctaagcctatgtcgcttactggacgctgaagtgattgggaatattagcagtgggggttctgtagggtcaggaaggggcggctggctttgggggagtgatgaggggcttgttgggggtgggggtgcgtgataaagggatttctcggctgaagacgaggctgtgaggcttctgcagaacccccaggtcaggccacatcattgaggctgcaggatctctcttcatagcccagtacgactctccgccgtgtccctggttggaaaatccaaacacctatccagcttctggctcctgggaaaagtggagttgtcagcaagagagaccgagagtagaagcccagagtggagatgcctgctgatgtgaatttatcccagaagcctcaggtcctgggtccagagaagcaggatggatcttgcgaggcatcagtgtcatttgaggacgtgaccgtggacttcagcagggaggagtggcagcaactggaccctgcccagagatgcctgtaccgggatgtgatgctggagctctatagccatctcttcgcagtggggtatcacattcccaacccagaggtcatcttcagaatgctaaaagaaaaggagccgcgtgtggaggaggctgaagtctcacatcagaggtgtcaagaaagggagtttgggcttgaaatcccacaaaaggagatttctaagaaagcttcatttcaaaaggatatggtaggtgagttcacaagagatggttcatggtgttccattttagaagaactgaggctggatgctgaccgcacaaagaaagatgagcaaaatcaaattcaacccatgagtcacagtgctttcttcaacaagaaaacattgaacacagaaagcaattgtgaatataaggaccctgggaaaatgattcgcacgaggccccaccttgcttcttcacagaaacaacctcagaaatgttgcttatttacagaaagtttgaagctgaacctagaagtgaacggtcagaatgaaagcaatgacacagaacagcttgatgacgttgttgggtctggtcagctattcagccatagctcttctgatgcctgcagcaagaatattcatacaggagagacattttgcaaaggtaaccagtgtagaaaagtctgtggccataaacagtcactcaagcaacatcaaattcatactcagaagaaaccagatggatgttctgaatgtggggggagcttcacccagaagtcacacctctttgcccaacagagaattcatagtgtaggaaacctccatgaatgtggcaaatgtggaaaagccttcatgccacaactaaaactcagtgtatatctgacagatcatacaggtgatataccctgtatatgcaaggaatgtgggaaggtctttattcagagatcagaattgcttacgcaccagaaaacacacactagaaagaagccctataaatgccatgactgtggaaaagcctttttccagatgttatctctcttcagacatcagagaactcacagtagagaaaaactctatgaatgcagtgaatgtggcaaaggcttctcccaaaactcaaccctcattatacatcagaaaattcatactggtgagagacagtatgcatgcagtgaatgtgggaaagcctttacccagaagtcaacactcagcttgcaccagagaatccactcagggcagaagtcctatgtgtgtatcgaatgcgggcaggccttcatccagaaggcacacctgattgtccatcaaagaagccacacaggagaaaaaccttatcagtgccacaactgtgggaaatccttcatttccaagtcacagcttgatatacatcatcgaattcatacaggggagaaaccttatgaatgcagtgactgtggaaaaaccttcacccaaaagtcacacctgaatatacaccagaaaattcatactggagaaagacaccatgtatgcagtgaatgcgggaaagccttcaaccagaagtcaatactcagcatgcatcagagaattcacaccggagagaagccttacaaatgcagtgaatgtgggaaagccttcacttctaagtctcaattcaaagagcatcagcgaattcacacgggtgagaaaccctatgtgtgcactgaatgtgggaaggccttcaacggcaggtcaaatttccataaacatcaaataactcacactagagagaggccttttgtctgttacaaatgtgggaaggcttttgtccagaaatcagagttgattacccatcaaagaactcacatgggagagaaaccctatgaatgccttgactgtgggaaatcgttcagtaagaaaccacaactcaaggtgcatcagcgaattcacacgggagaaagaccttatgtgtgttctgaatgtggaaaggccttcaacaacaggtcaaacttcaataaacaccaaacaactcataccagagacaaatcttacaaatgcagttattctgtgaaaggctttaccaagcaatgaattcctagtgcatcagcatattcataaatgaaatatactccgagtttcttgaagaagagaaaatcttctcagaatcaggtctaattatatgttattgaattcatgcttcagaaaaactctagggatgcactgcatgtgtgaacacatgataaaaaagtcatgctttattttagtgagggcaattacagagaaaagagtaagcagaaatgtccttctgagtactggcctcattaaggattataaattttctccccgggaagaaaccctgactaacgcattgagaaaagcctttctgtaaagaatggtacaagacaggttgttactcgattatttatagtaaaatatgtgggaaattatatcaatgataaccctgtttattgtgggatatcaatatttttaaagtgccaacacagtcatgataggacaatattttatgtgtgtgtgtgcgccttatgtatataagcatatatataatatataagcatattattatatacaggttgagtatcccttctccaaaatgcctgggatcagaagcattttggatttcagatacttacagattttggaatatttgcattatatttattggttgagcatccctaatctgaaaatccaagattaaatgctccaattagcatttcctttgagcgtcatgttagagttcaaaaagtttcagattttgggttttcagattaggaatacccaacctgtatgtacgtatatttctgtatctatgtatgtatatatatgcatatgcagacatatgtatatggtctggtcagcatatgtgtatgtatgcgtatgtatgtatgtatgtatgccctcagtgcagtggggtttgctgcagaattcactgcatagcaggagatgtaagcagatgagttattttttaagagaatctaatctaattgtttttataaaaattattccctattgaatatttatataatgaggttgtatcaacaatgattaactcctttattatacatacacatgaatgtgcatttttggtaaatgcataaatgagattctataatgtttactgatctttatattacagattttctcttcttttaggattagctcagcttgccccccctttccatctccaccatctatagtgagcctctccataattagtgccaaccattagtctcgttcatatttttacaccaggagtcaacaaactgtggccattggccaaatatggcctcccaactgtttttttaaaataaagttttattg

SEQ ID NO: 170586 - protein, 631 aa, Artificial Sequence
  derived and/or modified sequence
MPRPALSVTSFCHRLGKRERKQSFMGNSGNSWSHTPFPKLELGLGPQPMAPRELPTCSICLERLRDPISLDCGHDFCIRCFSTHRLPGCEPPCCPECRKICKQKRGLRSLGEKMKLLPQRPLPPALQETCPVRAEPLLLVRINASGGLILRMGAINRCLKHPLARDTPVCLLAVLGEQHSGKSFLLNHLLQGLPGLESGEGGRPRGGEASLQGCRWGANGLARGIWMWSHPFLLGKEGKKVAVFLVDTGDAMSPELSRETRIKLCALTTMLSSYQILSTSQELKDTDLDYLEMFVHVAEVMGKHYGMVPIQHLDLLVRDSSHPNKAGQGHVGNIFQRLSGRYPKVQELLQGKRARCCLLPAPGRRRMNQGHASPGDTDDDFRHLLGAYVSDVLSAAPQHAKSRCQGYWNEGRAVARGDRRLLTGQQLAQEIKNLSGWMGRTGPGFTSPDEMAAQLHDLRKVEAAKREFEEYVRQQDVATKRIFSALRVLPDTMRNLLSTQKDAILARHGVALLCKGRDQTLEALEAELQATAKAFMDSYTMRFCGHLAAVGGAVGAGLMGLAGGVVGAGMAAAALAAEAGMVAAGAAVGATGAAVVGGGVGAGLAATVGCMEKEEDERLLEGDREPLLQEE

SEQ ID NO: 170587 - DNA, 3252 bp, Artificial Sequence
  derived and/or modified sequence
gtgtctcctccccctggggtgagtccagcagcagcctcctctttcctgactgtcacatttcttttccagctctgaccgggagtcagctcctcggggataccatcccccgacctcaccttctacctaccgcagcctgctagcctttccgggagaaaaggcatccttacctctggttgaaggtctcggggcctccccctctgcatccggaccctctccccatcccagcctcccatgccaaggcccgccttgtcagtcacttccttttgtcatcggcttggcaaacgggagagaaaacagagcttcatgggaaacagcggcaacagttggtcccatacacctttccccaagttggagctaggcctggggccccagcccatggcgccccgggagctccctacctgctccatctgcctggagaggttgcgcgaccccatctcgctggactgtggccacgacttctgcatacggtgcttcagcacacaccgtctcccgggctgtgagccgccctgctgtcctgagtgccggaagatatgcaagcagaagaggggcctccggagcctgggcgagaagatgaagctcctgccgcagcggccgctgccccctgcactgcaggagacgtgtcctgtgagggcggagccgctgctgctggttcgcatcaatgcctctgggggcctcatccttaggatgggggccatcaaccgctgcctgaagcaccctctggccagggacaccccagtctgcctcctcgctgtcctgggggagcagcactcagggaagtccttcctcctcaaccatttgcttcagggcttgccgggcctggagtctggtgagggcggccggccaagaggaggagaggcatccctgcagggctgcaggtggggcgccaatggcctcgccaggggcatatggatgtggagccaccccttcttgctggggaaagaagggaagaaggtggcggtgttcctggtggacacaggggatgccatgagccctgagctgagcagggaaacaaggatcaagctctgtgctctcaccacgatgctgagctcctaccagatcctcagcacctcccaggagctgaaggatacagacctggactatctggagatgtttgtccacgtggccgaggtgatgggcaagcattatgggatggtgccaatccagcatctggacctcttagttcgtgactcatcccaccccaacaaggcagggcaggggcatgtaggcaacatcttccagagattgtctggcagataccccaaggtgcaggagctgctgcaagggaagcgagcccgttgctgcctcttgcctgccccagggaggcggcggatgaaccaaggccatgcaagccctggtgacacagatgatgacttccgccaccttctgggggcctacgtctcagatgtgctgagtgcggccccccagcacgctaagagccgctgccaggggtactggaacgaggggcgcgccgtggccaggggggacagacgcctactcacggggcagcagctagctcaggaaatcaagaacctctcaggatggatggggaggacagggcccggtttcacctctccggatgagatggctgctcagctgcacgacctgaggaaggtggaagctgccaagagggagttcgaggagtatgtgaggcagcaggacgtagccaccaagcgcatattctctgcgctgcgggtcctgccagacaccatgcggaacctcctctccacccagaaagatgccattctggcccgccatggtgtggccttactctgcaaggggagagatcagaccttggaggcactggaagctgagctgcaggccacggccaaggccttcatggactcctacacgatgcgcttctgtggccacctagctgctgtggggggtgctgtgggggccgggctcatgggcctggcagggggcgtggtgggtgctggcatggcagcagctgcactggctgcagaggctgggatggtggctgctggagctgccgtgggggccacaggggccgctgtggttgggggtggcgtgggtgctgggttggctgccacagtgggctgcatggagaaggaggaggatgagaggcttctggaaggggaccgagagccccttctccaggaagagtaacagccccaggaggtattgaaggacaggagagatgtcaggtggggatgaagaagaggggcaggtcgggggagggtgatgccagggattccaaggcaccgccatgtactgcactgccctggtcgaatgctcggtgtctgggtggcagctgagctgggactcaaggtggctcttggaacctgggaggcagcatctgggggcagtggatagaacacccggcctgtttctggttgcagatggttgccgatctgcccttgtcacagataggctacatcccagggtttctggctgcaagtgagactccaccctccccacctggctcatttccccgatgaccctggattgtaggaaagttaagcaggcaccatcctggaagtctacccctaggtggtcgagagacctgttctttcacagatgtgagaagccccaggatgattgaccatggtgttcaggagcggggagcactgatgaggtgctggggatgacaggaaggaaggaacactgggcagaaccagagagatgggacatggtagactgtggcccagaccccagagcagagaaacttgttcccatgacccttcccaaatctgctccagcaggactaaggtggctttcccactcctggcccacagccccagagagcctgtctgtgcatcctgaaccactctttgctgggcctccgcaagggcctctcttgggtctgtgtcctttttcaagcctgtttagatgggggagtgcccatgccctctgtgaagtgcccaaatgcgaaagaataacaccttttcttgcattctgagctaagccagacagcctttatactagattctatcaaaatcttgcaaaggaaaacaaaatgaacaacttctacccttaaacacatcctttctcccctgggcttgtaagaagatgcagcttgatgcagctcctcaaacaccaggccccctgggaactgggggtgcgggagttctccctctgggggacagaaaatctgactactaggaagacttctaggctatgaaactgacttctaggctatgaaacttacagggtatgggtgggcacattatcctttattttatgaaaaataaaatgtgtgtatgtgaaaaaaaaaaaaaaaaaaaaaaaaaa

SEQ ID NO: 170588 - DNA, 1896 bp, Artificial Sequence
  derived and/or modified sequence
atgccccgccctgctctgagcgtcacctccttctgccataggttaggcaagagagaaaggaagcaaagtttcatgggcaattcaggaaattcttggagccacaccccttttcccaaactcgaactggggctcggcccgcagccaatggctcccagggagctgccaacttgttctatatgtctggagaggttgagagaccctatttctctagattgcggtcatgacttctgcatacgatgtttctccacacaccgtcttcctggatgcgaacctccctgttgtccagaatgcaggaagatctgtaaacagaaacggggcctgcggagtctcggagagaagatgaaacttctgccgcagagacccttgccgcctgcactccaagaaacttgcccagttagagcagaacccctcttgctcgtacgaatcaatgcttccggcgggctcatcctgcgcatgggagccatcaaccggtgtttaaagcaccccctcgcaagagatacaccagtctgtttgctggcagtgcttggagaacagcacagtggtaagagcttcctcctcaatcatcttttgcaggggctgccaggcctcgagagcggcgagggtggacggccccggggaggcgaggcttcactccagggatgcaggtggggtgcaaatggcctggctaggggaatttggatgtggtcccacccgttccttctgggcaaagaaggcaagaaggtcgccgtctttctagtggatactggcgacgccatgtcaccagagctgtcgcgagaaactagaattaaactttgcgcacttaccacgatgctgagcagctatcagattctctcgacgagccaggaacttaaagatacagacctggactacttagaaatgtttgttcatgtggcggaagtgatgggcaagcactatggaatggtcccaattcagcacttggatctgctagtgagagactcttctcaccctaataaagcaggtcaaggccatgtgggaaatattttccaacgccttagcggtcggtaccccaaggtacaggaattattgcaaggcaaaagggccagatgttgtctgctcccggctcccggcagaaggcgcatgaatcaaggacatgcaagtccgggcgacaccgatgatgacttcaggcatctgctaggtgcatacgtgtcagatgtgctgtccgccgcccctcaacacgctaagagcagatgtcaaggatattggaacgaaggcagagccgtggccaggggcgatcggcgactgttgacaggccagcagctagcacaagaaattaaaaatttaagcggctggatgggacggaccggcccgggatttacttcaccggatgagatggcagcacaacttcacgacctcagaaaggtggaagccgcaaaacgggaatttgaagagtacgttcgccagcaggacgtcgctaccaagagaattttctccgccctgcgtgttctccccgacaccatgagaaacctgttaagtactcagaaagatgcaatactcgctcggcacggggtcgccttactgtgtaaaggacgcgaccagaccctggaagccttagaagcagagctgcaggccacggctaaagcatttatggattcatataccatgcggttctgcggacacttggctgctgtgggcggggcagtgggcgctggattaatggggttggcaggcggggtggtgggtgccggtatggccgccgccgctctggcagccgaggccggcatggtcgcagcgggggccgcggttggcgccactggtgcagccgtcgtgggtggcggggttggggccgggctggccgctaccgtggggtgtatggaaaaagaagaagatgagaggctcctcgagggcgatcgcgagcctctgctgcaggaagaatag

SEQ ID NO: 170589 - DNA, 1896 bp, Artificial Sequence
  derived and/or modified sequence
atgcccaggcctgccctgtctgtgaccagcttctgccaccggctgggcaagcgggagaggaagcagagcttcatgggcaacagcggcaacagctggagccacacccccttccccaagctggagctgggcctgggcccccagcccatggccccccgggagctgcccacctgcagcatctgcctggagcggctgcgggaccccatcagcctggactgtggccatgacttctgcatccgctgcttcagcacccaccggctgcccggctgtgagcccccctgctgcccagagtgcaggaagatctgcaagcagaagaggggcctgcggagcctgggggagaagatgaagctgctgccccagaggcccctgcccccagccctgcaggagacctgccctgtgcgggcagagcccctgctgctggtgcgcatcaatgccagcggcggcctcatcctgaggatgggcgccatcaaccgctgcctgaagcaccccctggcccgggacacccctgtgtgcctgctggccgtgctgggggagcagcacagcggcaagagcttcctgctgaaccacctgctgcagggcctgcccggcctggagagcggggagggcggccggccccggggcggggaggccagcctgcagggctgccgctggggcgccaacggcctggcccggggcatctggatgtggagccaccccttcctgctgggcaaggagggcaagaaggtggccgtgttcctggtggacacaggagatgccatgagccctgagctgagccgggagacccgcatcaagctgtgtgccctgaccaccatgctgagcagctaccagatcctgagcaccagccaggagctgaaggacacagacctggactacctggagatgtttgtgcacgtggccgaggtgatgggcaagcactacggcatggtgcccatccagcacctggacctgctggtgcgggacagcagccaccccaacaaggccggccagggccacgtgggcaacatcttccagaggctgagcggccgctaccccaaggtgcaggagctgctgcagggcaagagggcccgctgctgcctgctgcctgcccctggaagaagaaggatgaaccagggccacgccagccctggggacacagatgatgacttccgccacctgctgggcgcctacgtgtctgatgtgctgtctgctgccccccagcacgccaagagccgctgccagggctactggaatgaaggccgggctgtggcccggggggaccggcggctgctgaccggccagcagctggcccaggagatcaagaacctgagcggctggatgggccgcactggacctggcttcaccagcccagatgagatggccgcccagctgcatgacctgaggaaggtggaggccgccaagcgggagtttgaggagtatgtgcggcagcaggatgtggccaccaagaggatcttcagcgccctgcgggtgctgcctgacaccatgaggaacctgctgagcacccagaaggatgccatcctggcccggcatggagtggccctgctgtgcaagggccgggaccagaccctggaggccctggaggccgagctgcaggccacagccaaggccttcatggacagctacaccatgaggttctgtggccacctggccgctgtgggcggcgctgtgggcgccggcctgatgggcctggccggcggcgtggtgggcgccggcatggctgctgctgccctggccgctgaggccggcatggtggccgccggggctgctgtgggcgccactggagctgctgtggtgggcggcggcgtgggcgccggcctggccgccaccgtgggctgcatggagaaggaggaggatgagcggctgctggagggggaccgggagcccctgctgcaggaggagtag

SEQ ID NO: 170590 - DNA, 1896 bp, Artificial Sequence
  derived and/or modified sequence
atgccccggcccgccctgagcgtgaccagcttctgccaccggctgggcaaaagagaacggaagcaatcttttatggggaatagcgggaacagttggtcccacaccccttttcctaaacttgaacttgggctcggcccccagcctatggccccgcgggagctcccaacatgttccatttgccttgaaagacttagggatcctatctctctcgattgtggccatgatttctgcatccggtgtttttctacccatcgactgccaggatgcgagcccccatgttgtcctgagtgccgcaagatctgcaagcaaaaaaggggactacggagccttggagagaaaatgaagttgctgccgcaacgaccgctgccacccgctcttcaggaaacttgtcccgtccgggcggaaccgttgctcctcgttcgtatcaatgcttctggcggactcattttgcggatgggggcaatcaaccggtgtctcaagcacccgctggccagagacacccccgtctgtctcctcgcggtccttggcgagcagcatagtggcaaatctttcctcctaaaccacttacttcaaggattaccagggctagagtccggagaaggagggcggccccgcggtggagaggctagtcttcaaggatgcaggtggggagcgaacggattggccaggggtatttggatgtggtctcaccctttccttctggggaaggagggaaagaaagtcgctgtattccttgtcgataccggagatgccatgagcccagagttatccagagagacaagaatcaagctttgtgccttgacaactatgttatcctcctatcaaattctgagcaccagccaggagctgaaggacaccgatctcgattacctggagatgtttgtccacgtggccgaagtgatggggaaacactacggaatggtcccaatccaacacttagatctcctcgtgagggattcaagtcatcccaacaaagccggccagggccatgtcgggaatatctttcagaggctgagcggcagatatccaaaagtccaagaacttcttcaagggaagcgggcaagatgctgcctgttgccagctcccggtcgacgacgaatgaatcagggtcacgcttcccctggagacactgatgacgatttccgccatctgttaggcgcttacgtgtctgatgtactgtccgcagcaccccaacacgctaagtcacgctgtcagggatactggaatgaaggccgtgcagtcgcacgcggcgaccggagactcctgaccgggcaacagctggcccaagaaattaagaatttgtctggatggatggggagaacaggcccggggtttacctctccagacgaaatggcagctcagcttcatgaccttagaaaggtggaggctgccaagcgggagtttgaggagtacgtgaggcagcaggacgtggccactaagagaatattcagcgccctgcgggttttacccgacacgatgaggaacctgctgtcgacccagaaggacgccatcttagccaggcatggggtggcactgctgtgcaaaggccgggaccagactttggaagccttagaggcggaacttcaggccaccgctaaggcctttatggatagttacaccatgagattctgcgggcatttagctgccgtcggaggcgccgtaggggcaggcctgatgggactagctgggggcgtagtgggcgcaggtatggcagctgcggctctggcagctgaggcaggcatggtggctgccggcgctgctgtcggcgcgaccggtgcggccgtcgtgggtgggggagtgggtgccggtctggctgccacagttgggtgtatggagaaggaggaagatgagcgattgttggagggggaccgcgagccattattacaagaagaatag

SEQ ID NO: 170591 - DNA, 1896 bp, Artificial Sequence
  derived and/or modified sequence
atgcctcgcccagcgctgtccgtgacttctttctgtcacaggcttggcaagcgggaacgtaaacaaagttttatgggaaattctggaaacagctggtcgcacactcctttccctaaattggagctcggcttgggccctcagccaatggcaccaagagagctgcctacctgcagcatctgtctggagcggttgagggacccaatctctttggattgtggccatgacttttgtatccgttgtttctctacgcatcggctccctggatgcgaacccccttgctgtccagagtgccggaagatttgcaagcagaaacgtggcctccggtcactgggagaaaaaatgaaactccttcctcaacgaccactgcctcctgccctacaggaaacttgccccgtgcgagctgagccgttactgctagtgcggattaatgcatctggaggtctcatcctccggatgggagcaatcaatagatgtctcaagcatcccttggcacgggacacccctgtgtgtctgctggccgttttgggcgagcaacattctggcaaatcatttctgcttaaccacctgttacagggtctaccagggttggaaagcggggaggggggaagacctaggggcggagaagcgagcttgcaaggctgtcggtggggcgcaaacgggttagccagaggcatttggatgtggtcccatccttttctactcggcaaagagggaaagaaggtggccgtcttcctagtcgataccggggacgccatgtccccagagctatccagagaaaccagaataaaattgtgtgcactgacaaccatgctaagttcgtaccagattctctctacaagtcaggagctgaaggatacagatctcgattacctggagatgttcgtgcacgtggcggaggtgatgggaaagcattacggaatggtgccgatacagcacctggacctactggtgagagattcctctcaccctaacaaggccggtcaggggcatgtgggcaatatttttcagcggctctcaggaagataccccaaagtacaggagcttctccagggcaaacgtgccagatgctgtctactcccagcacccggtagacgacggatgaaccagggccatgcgtcgccaggagatacggatgacgatttccgacatttattgggtgcctatgtgtctgacgtgctgagcgcagccccacagcacgctaaatcccgctgtcagggctattggaatgaaggacgtgcagtcgcaagaggcgaccggcgactcctgacaggccagcaattagcgcaggaaattaaaaatcttagcggatggatgggaagaacaggtcccggttttacaagtcctgatgagatggccgcacagttacacgacctgcgcaaagtggaggctgcaaagagagagtttgaagaatacgtccggcaacaggacgtcgcaaccaagagaatcttttctgccctgcgcgttctgcccgacactatgcggaacttgttatctactcaaaaggacgccattctggctcgtcatggcgtcgctcttctgtgtaagggacgtgatcagacactggaggccctagaagcagagctccaggccacggcaaaggcttttatggacagctatacaatgcggttctgtggccatctcgccgcagtcggcggtgccgttggcgcaggactgatgggcttagcaggcggagtggtcggagccggaatggccgctgcggcactggctgccgaggccggtatggtggcagccggagccgctgtgggggctactggtgccgctgtcgtgggcggaggcgtgggcgcaggcctcgccgcaacagtcggctgcatggaaaaagaggaagatgagcgcctcctcgagggcgatagggagccgctcttgcaggaagagtag

SEQ ID NO: 170592 - DNA, 3212 bp, Artificial Sequence
  derived and/or modified sequence
gggtgagtccagcagcagcctcctctttcctgactgtcacatttcttttccagctctgaccgggagtcagctcctcggggataccatcccccgacctcaccttctacctaccgcagcctgctagcctttccgggagaaaaggcatccttacctctggttgaaggtctcggggcctccccctctgcatccggaccctctccccatcccagcctcccatgccaaggcccgccttgtcagtcacttccttttgtcatcggcttggcaaacgggagagaaaacagagcttcatgggaaacagcggcaacagttggtcccatacacctttccccaagttggagctaggcctggggccccagcccatggcgccccgggagctccctacctgctccatctgcctggagaggttgcgcgaccccatctcgctggactgtggccacgacttctgcatacggtgcttcagcacacaccgtctcccgggctgtgagccgccctgctgtcctgagtgccggaagatatgcaagcagaagaggggcctccggagcctgggcgagaagatgaagctcctgccgcagcggccgctgccccctgcactgcaggagacgtgtcctgtgagggcggagccgctgctgctggttcgcatcaatgcctctgggggcctcatccttaggatgggggccatcaaccgctgcctgaagcaccctctggccagggacaccccagtctgcctcctcgctgtcctgggggagcagcactcagggaagtccttcctcctcaaccatttgcttcagggcttgccgggcctggagtctggtgagggcggccggccaagaggaggagaggcatccctgcagggctgcaggtggggcgccaatggcctcgccaggggcatatggatgtggagccaccccttcttgctggggaaagaagggaagaaggtggcggtgttcctggtggacacaggggatgccatgagccctgagctgagcagggaaacaaggatcaagctctgtgctctcaccacgatgctgagctcctaccagatcctcagcacctcccaggagctgaaggatacagacctggactatctggagatgtttgtccacgtggccgaggtgatgggcaagcattatgggatggtgccaatccagcatctggacctcttagttcgtgactcatcccaccccaacaaggcagggcaggggcatgtaggcaacatcttccagagattgtctggcagataccccaaggtgcaggagctgctgcaagggaagcgagcccgttgctgcctcttgcctgccccagggaggcggcggatgaaccaaggccatgcaagccctggtgacacagatgatgacttccgccaccttctgggggcctacgtctcagatgtgctgagtgcggccccccagcacgctaagagccgctgccaggggtactggaacgaggggcgcgccgtggccaggggggacagacgcctactcacggggcagcagctagctcaggaaatcaagaacctctcaggatggatggggaggacagggcccggtttcacctctccggatgagatggctgctcagctgcacgacctgaggaaggtggaagctgccaagagggagttcgaggagtatgtgaggcagcaggacgtagccaccaagcgcatattctctgcgctgcgggtcctgccagacaccatgcggaacctcctctccacccagaaagatgccattctggcccgccatggtgtggccttactctgcaaggggagagatcagaccttggaggcactggaagctgagctgcaggccacggccaaggccttcatggactcctacacgatgcgcttctgtggccacctagctgctgtggggggtgctgtgggggccgggctcatgggcctggcagggggcgtggtgggtgctggcatggcagcagctgcactggctgcagaggctgggatggtggctgctggagctgccgtgggggccacaggggccgctgtggttgggggtggcgtgggtgctgggttggctgccacagtgggctgcatggagaaggaggaggatgagaggcttctggaaggggaccgagagccccttctccaggaagagtaacagccccaggaggtattgaaggacaggagagatgtcaggtggggatgaagaagaggggcaggtcgggggagggtgatgccagggattccaaggcaccgccatgtactgcactgccctggtcgaatgctcggtgtctgggtggcagctgagctgggactcaaggtggctcttggaacctgggaggcagcatctgggggcagtggatagaacacccggcctgtttctggttgcagatggttgccgatctgcccttgtcacagataggctacatcccagggtttctggctgcaagtgagactccaccctccccacctggctcatttccccgatgaccctggattgtaggaaagttaagcaggcaccatcctggaagtctacccctaggtggtcgagagacctgttctttcacagatgtgagaagccccaggatgattgaccatggtgttcaggagcggggagcactgatgaggtgctggggatgacaggaaggaaggaacactgggcagaaccagagagatgggacatggtagactgtggcccagaccccagagcagagaaacttgttcccatgacccttcccaaatctgctccagcaggactaaggtggctttcccactcctggcccacagccccagagagcctgtctgtgcatcctgaaccactctttgctgggcctccgcaagggcctctcttgggtctgtgtcctttttcaagcctgtttagatgggggagtgcccatgccctctgtgaagtgcccaaatgcgaaagaataacaccttttcttgcattctgagctaagccagacagcctttatactagattctatcaaaatcttgcaaaggaaaacaaaatgaacaacttctacccttaaacacatcctttctcccctgggcttgtaagaagatgcagcttgatgcagctcctcaaacaccaggccccctgggaactgggggtgcgggagttctccctctgggggacagaaaatctgactactaggaagacttctaggctatgaaactgacttctaggctatgaaacttacagggtatgggtgggcacattatcctttattttatgaaaaataaaatgtgtgtatgtgaa

SEQ ID NO: 170593 - DNA, 1896 bp, Artificial Sequence
  derived and/or modified sequence
atgcccagacccgccctgagcgtgaccagcttctgccacagactgggcaagagagagagaaagcagagcttcatgggcaacagcggcaacagctggagccacacccccttccccaagctggagctgggcctgggcccccagcccatggcccccagagagctgcccacctgcagcatctgcctggagagactgagagaccccatcagcctggactgcggccacgacttctgcatcagatgcttcagcacccacagactgcccggctgcgagcccccctgctgccccgagtgcagaaagatctgcaagcagaagagaggcctgagaagcctgggcgagaagatgaagctgctgccccagagacccctgccccccgccctgcaggagacctgccccgtgagagccgagcccctgctgctggtgagaatcaacgccagcggcggcctgatcctgagaatgggcgccatcaacagatgcctgaagcaccccctggccagagacacccccgtgtgcctgctggccgtgctgggcgagcagcacagcggcaagagcttcctgctgaaccacctgctgcagggcctgcccggcctggagagcggcgagggcggcagacccagaggcggcgaggccagcctgcagggctgcagatggggcgccaacggcctggccagaggcatctggatgtggagccaccccttcctgctgggcaaggagggcaagaaggtggccgtgttcctggtggacaccggcgacgccatgagccccgagctgagcagagagaccagaatcaagctgtgcgccctgaccaccatgctgagcagctaccagatcctgagcaccagccaggagctgaaggacaccgacctggactacctggagatgttcgtgcacgtggccgaggtgatgggcaagcactacggcatggtgcccatccagcacctggacctgctggtgagagacagcagccaccccaacaaggccggccagggccacgtgggcaacatcttccagagactgagcggcagataccccaaggtgcaggagctgctgcagggcaagagagccagatgctgcctgctgcccgcccccggcagaagaagaatgaaccagggccacgccagccccggcgacaccgacgacgacttcagacacctgctgggcgcctacgtgagcgacgtgctgagcgccgccccccagcacgccaagagcagatgccagggctactggaacgagggcagagccgtggccagaggcgacagaagactgctgaccggccagcagctggcccaggagatcaagaacctgagcggctggatgggcagaaccggccccggcttcaccagccccgacgagatggccgcccagctgcacgacctgagaaaggtggaggccgccaagagagagttcgaggagtacgtgagacagcaggacgtggccaccaagagaatcttcagcgccctgagagtgctgcccgacaccatgagaaacctgctgagcacccagaaggacgccatcctggccagacacggcgtggccctgctgtgcaagggcagagaccagaccctggaggccctggaggccgagctgcaggccaccgccaaggccttcatggacagctacaccatgagattctgcggccacctggccgccgtgggcggcgccgtgggcgccggcctgatgggcctggccggcggcgtggtgggcgccggcatggccgccgccgccctggccgccgaggccggcatggtggccgccggcgccgccgtgggcgccaccggcgccgccgtggtgggcggcggcgtgggcgccggcctggccgccaccgtgggctgcatggagaaggaggaggacgagagactgctggagggcgacagagagcccctgctgcaggaggagtag

SEQ ID NO: 170594 - protein, 751 aa, Artificial Sequence
  derived and/or modified sequence
MEDLSSPDSTLLQGGHNLLSSASFQEAVTFKDVIVDFTQEEWKQLDPGQRDLFRDVTLENYTHLVSIGLQVSKPDVISQLEQGTEPWIMEPSIPVGTCADWETRLENSVSAPEPDISEEELSPEVIVEKHKRDDSWSSNLLESWEYEGSLERQQANQQTLPKEIKVTEKTIPSWEKGPVNNEFGKSVNVSSNLVTQEPSPEETSTKRSIKQNSNPVKKEKSCKCNECGKAFSYCSALIRHQRTHTGEKPYKCNECEKAFSRSENLINHQRIHTGDKPYKCDQCGKGFIEGPSLTQHQRIHTGEKPYKCDECGKAFSQRTHLVQHQRIHTGEKPYTCNECGKAFSQRGHFMEHQKIHTGEKPFKCDECDKTFTRSTHLTQHQKIHTGEKTYKCNECGKAFNGPSTFIRHHMIHTGEKPYECNECGKAFSQHSNLTQHQKTHTGEKPYDCAECGKSFSYWSSLAQHLKIHTGEKPYKCNECGKAFSYCSSLTQHRRIHTREKPFECSECGKAFSYLSNLNQHQKTHTQEKAYECKECGKAFIRSSSLAKHERIHTGEKPYQCHECGKTFSYGSSLIQHRKIHTGERPYKCNECGRAFNQNIHLTQHKRIHTGAKPYECAECGKAFRHCSSLAQHQKTHTEEKPYQCNKCEKTFSQSSHLTQHQRIHTGEKPYKCNECDKAFSRSTHLTEHQNTHTGEKPYNCNECRKTFSQSTYLIQHQRIHSGEKPFGCNDCGKSFRYRSALNKHQRLHPGI

SEQ ID NO: 170595 - protein, 667 aa, Artificial Sequence
  derived and/or modified sequence
MEDLSSPDSTLLQGGHNLLSSASFQEAVTFKDVIVDFTQEEWKQLDPGQRDLFRDVTLENYTHLVSIGLQVSKPDVISQLEQGTEPWIMEPSIPVGTCADWETRLENSVSAPEPDISEEELSPEVIVEKHKRDDSWSSNLLESWEYEGSLERQQANQQTLPKEIKVTEKTIPSWEKGPVNNEFGKSVNVSSNLVTQEPSPEETSTKRSIKQNSNPVKKEKSCKCNECGKAFSYCSALIRHQRTHTGEKPYKCNECEKAFSRSENLINHQRIHTGDKPYKCDQCGKGFIEGPSLTQHQRIHTGEKPYKCDECGKAFSQRTHLVQHQRIHTGEKPYTCNECGKAFSQRGHFMEHQKIHTGEKPFKCDECDKTFTRSTHLTQHQKIHTGEKTYKCNECGKAFNGPSTFIRHHMIHTGEKPYECNECGKAFSQHSNLTQHQKTHTQEKAYECKECGKAFIRSSSLAKHERIHTGEKPYQCHECGKTFSYGSSLIQHRKIHTGERPYKCNECGRAFNQNIHLTQHKRIHTGAKPYECAECGKAFRHCSSLAQHQKTHTEEKPYQCNKCEKTFSQSSHLTQHQRIHTGEKPYKCNECDKAFSRSTHLTEHQNTHTGEKPYNCNECRKTFSQSTYLIQHQRIHSGEKPFGCNDCGKSFRYRSALNKHQRLHPGI

SEQ ID NO: 170596 - protein, 77 aa, Artificial Sequence
  derived and/or modified sequence
KAFSQRTHLVQHQRIHTGEKPYTCNECGKAFSQRGHFMEHQKIHTGEKPFKCDECDKTFTRSTHLTTSKNSYWRKNL

SEQ ID NO: 170597 - DNA, 2678 bp, Artificial Sequence
  derived and/or modified sequence
gaatcggtgactttcaaggatgtgatagtggactttacccaggaagaatggaaacagctggaccctggccagagagatttgttcagggatgtgacattggaaaattatacacacctggtctctataggactccaagtttctaaacctgatgtgatttcccagttagagcaagggacagagccatggatcatggagccaagcattccagtaggtacctgtgcagactgggagacaagacttgaaaatagtgtgtcagccccagagcctgacatttctgaagaagagctatctccagaggtaatagtggaaaaacacaaaagagatgattcttggagttccaacttgctagaaagttgggaatatgaaggcagtttagagagacagcaggcaaaccaacagacactgccaaaggaaataaaggtaaccgaaaagacaatacccagttgggaaaaaggccctgtaaataatgaatttgggaaaagtgtcaatgtgagttcaaaccttgtaacacaagaaccatctccagaagagacctctactaaaagaagcatcaaacagaattcaaacccagttaaaaaagagaaatcttgtaagtgcaatgaatgtgggaaagcctttagttattgttcagctcttattcgccatcagagaacacatactggagaaaaaccctacaaatgtaatgaatgtgaaaaagccttcagccggagtgaaaaccttataaaccatcaaagaattcatactggagataaaccatataaatgtgatcagtgtggaaaaggcttcattgagggtccatctcttactcgacatcaaagaattcatactggagaaaaaccatataaatgtgatgaatgtgggaaagcctttagtcagaggacccatcttgttcagcatcagagaattcatactggcgagaagccatacacttgtaatgagtgtggaaaagcctttagccagagaggccactttatggaacatcagaaaattcatacgggaggaaaaccttttaaatgtgatgaatgtgataaaaccttcaccaggagcacacaccttactccacatccaaaaattcatactggagaaaaaacctataaatgtaatgaatgtggaaaggccttcaacgggccctcaacttttatccgtcatcatatgattcatactggtgaaaaaccgtacgaatgcaatgaatgtgggaaagccttcagccagcactcaaacctcactcagcatcaaaaaactcatactggggagaaaccctatgattgtgcagaatgtggaaaatcttttagttactggtcatcccttgctcaacacctgaaaattcatactggagaaaaaccttacaaatgcaatgaatgtggaaaggccttcagttactgctcatcccttactcaacatcggagaattcacactggagaaaaaccctttgaatgcagtgaatgtggaaaggctttcagttatctctcaaaccttaatcagcatcagaaaactcatactggagagaaagcttatgaatgtgaagaatgtgggaaagcttttattcggagttcatctcttgctcagcatcagagaattcatactggagagaaaccctatcagtgtcatgaatgtgggaaaaccttcagttatggttcatcccttattcagcataggaagatccatactggagaacgaccttacaagtgtaatgagtgtgggagagcattcaaccagaacatacaccttacacagcataagagaattcatacaggagccaagccttatgagtgtgctgagtgtggtaaagcctttcgacattgttcatctcttgctcaacatcaaaaaactcacacagaagaaaaaccctaccagtgtaataaatgtgaaaagacctttagccagagctcccatctaactcagcatcaacgaattcacactggggagaagccctataagtgcaatgaatgtgacaaagcctttagccggagcactcatctgactgaacatcagaatactcatactggagagaaaccttataactgtaatgaatgcagaaagacttttagccagagcacatatctcattcagcaccagagaattcattcaggagagaagccttttggatgtaatgattgtggaaaatccttcagatatcgctctgctctcaacaaacatcagaaactgcatcctggcatatgacaattctaggaacatcataaatttaggggagatatttactttagtttgtccttttgttaagtactgaagaatcagagtggatttagaaactgccttgaaatcttttaaattttcactatcatgttatggaatggaaagtacattgggctgaactaatccaattgttattaagccactctgtgacattagaaaactctactgttttaagctttagtttcctttatggaatgaaggctttggagtagattatttcaaaggtagtttggagttttataatcagttttgtatatttacaatattttcttgaatgggtttactatacatcagcattttgctgtgttgcatctagaatgtgtatgtttatgcatgttttgccaatagaatttgtgcttcagtaactagatcggggatctagtatgctcctggtctaatgcatttacattgtttaggtaactggttcctaataaaaagaattataaaataaaaaaaaaaaaaaa

SEQ ID NO: 170598 - DNA, 2256 bp, Artificial Sequence
  derived and/or modified sequence
atggaggacctgagcagccccgacagcaccctgctgcagggcggccacaacctgctgagcagcgccagcttccaggaggccgtgaccttcaaggacgtgatcgtggacttcacccaggaggagtggaagcagctggaccccggccagagagacctgttcagagacgtgaccctggagaactacacccacctggtgagcatcggcctgcaggtgagcaagcccgacgtgatcagccagctggagcagggcaccgagccctggatcatggagcccagcatccccgtgggcacctgcgccgactgggagaccagactggagaacagcgtgagcgcccccgagcccgacatcagcgaggaggagctgagccccgaggtgatcgtggagaagcacaagagagacgacagctggagcagcaacctgctggagagctgggagtacgagggcagcctggagagacagcaggccaaccagcagaccctgcccaaggagatcaaggtgaccgagaagaccatccccagctgggagaagggccccgtgaacaacgagttcggcaagagcgtgaacgtgagcagcaacctggtgacccaggagcccagccccgaggagaccagcaccaagagaagcatcaagcagaacagcaaccccgtgaagaaggagaagagctgcaagtgcaacgagtgcggcaaggccttcagctactgcagcgccctgatcagacaccagagaacccacaccggcgagaagccctacaagtgcaacgagtgcgagaaggccttcagcagaagcgagaacctgatcaaccaccagagaatccacaccggcgacaagccctacaagtgcgaccagtgcggcaagggcttcatcgagggccccagcctgacccagcaccagagaatccacaccggcgagaagccctacaagtgcgacgagtgcggcaaggccttcagccagagaacccacctggtgcagcaccagagaatccacaccggcgagaagccctacacctgcaacgagtgcggcaaggccttcagccagagaggccacttcatggagcaccagaagatccacaccggcgagaagcccttcaagtgcgacgagtgcgacaagaccttcaccagaagcacccacctgacccagcaccagaagatccacaccggcgagaagacctacaagtgcaacgagtgcggcaaggccttcaacggccccagcaccttcatcagacaccacatgatccacaccggcgagaagccctacgagtgcaacgagtgcggcaaggccttcagccagcacagcaacctgacccagcaccagaagacccacaccggcgagaagccctacgactgcgccgagtgcggcaagagcttcagctactggagcagcctggcccagcacctgaagatccacaccggcgagaagccctacaagtgcaacgagtgcggcaaggccttcagctactgcagcagcctgacccagcacagaagaatccacaccagagagaagcccttcgagtgcagcgagtgcggcaaggccttcagctacctgagcaacctgaaccagcaccagaagacccacacccaggagaaggcctacgagtgcaaggagtgcggcaaggccttcatcagaagcagcagcctggccaagcacgagagaatccacaccggcgagaagccctaccagtgccacgagtgcggcaagaccttcagctacggcagcagcctgatccagcacagaaagatccacaccggcgagagaccctacaagtgcaacgagtgcggcagagccttcaaccagaacatccacctgacccagcacaagagaatccacaccggcgccaagccctacgagtgcgccgagtgcggcaaggccttcagacactgcagcagcctggcccagcaccagaagacccacaccgaggagaagccctaccagtgcaacaagtgcgagaagaccttcagccagagcagccacctgacccagcaccagagaatccacaccggcgagaagccctacaagtgcaacgagtgcgacaaggccttcagcagaagcacccacctgaccgagcaccagaacacccacaccggcgagaagccctacaactgcaacgagtgcagaaagaccttcagccagagcacctacctgatccagcaccagagaatccacagcggcgagaagcccttcggctgcaacgactgcggcaagagcttcagatacagaagcgccctgaacaagcaccagagactgcaccccggcatctag

SEQ ID NO: 170599 - DNA, 2256 bp, Artificial Sequence
  derived and/or modified sequence
atggaagatctgtcctcaccagatagcacacttctgcagggcgggcacaacctgttgtcatcggcctccttccaagaagccgtgacttttaaagatgtgattgtcgacttcactcaagaggagtggaaacagttggaccctgggcagagggatttgttcagggacgtaactcttgagaactacacgcatctggtctcgataggactgcaagtgagcaagccagatgttatttcgcagttggagcagggaactgaaccctggattatggagccctctatacctgtaggcacttgcgccgactgggaaactagactggaaaacagcgtttccgcccccgaacccgatattagtgaggaggagctgtcacccgaagtcatagttgaaaagcacaaacgggatgattcctggagctccaatctgctggagagctgggaatatgagggctccctagagcggcagcaggctaaccagcagacactccccaaagagatcaaagtaaccgagaaaacaattccctcctgggagaaaggcccggtaaacaacgagtttggtaagtcagtcaatgtatcctccaatcttgtaactcaggagccaagtcctgaagaaacctccacaaagcgatccattaaacaaaacagtaatcccgtgaaaaaagaaaaatcctgtaagtgtaatgagtgcggaaaggccttcagctactgtagtgccctgataaggcaccaaagaactcatacaggggagaaaccatacaaatgcaacgagtgcgagaaagcattttcccgaagcgagaatctgataaaccaccaacgcatacacactggcgacaaaccctacaaatgtgaccagtgtggaaaggggtttatcgaaggcccatctcttacccagcatcaacgaatacacacaggggaaaagccttataagtgtgatgagtgcgggaaggctttcagccagaggacgcacctggttcaacatcagcgcatacatactggcgaaaaaccatatacctgcaatgagtgtggtaaggccttttcccagcgggggcatttcatggaacatcagaagattcacacaggtgagaagcccttcaagtgtgacgagtgcgacaaaacctttacgcgctcaacccatctcactcagcaccagaaaatacatacaggagaaaaaacatacaagtgcaacgagtgcggtaaagctttcaatgggccctcaaccttcattaggcatcacatgatccatacaggggagaagccctacgagtgtaacgagtgtggaaaagccttttcacaacactcaaatttgacgcagcatcagaagacacacacgggcgaaaaaccgtatgattgtgccgagtgtggtaagtccttttcctactggtccagtctcgcgcagcacctcaagattcacaccggagagaagccctataagtgcaacgaatgtggtaaggctttttcttattgttcgtccctgactcagcaccgccggatccacacccgggagaagccatttgaatgttctgagtgtggaaaggcattttcttacctgtctaaccttaatcaacatcaaaagactcatactcaggagaaggcatacgagtgcaaggagtgcggaaaagcttttattagaagtagctcgctggcaaaacacgaacggattcacacaggagagaagccataccagtgccatgaatgcgggaaaactttcagttacggcagcagcctgatccaacaccggaagatccacaccggcgagcgcccgtataaatgcaacgaatgcggcagggccttcaaccagaacatccatcttactcaacacaagaggatccacacaggggctaagccgtacgaatgtgcagaatgtggtaaggcttttagacactgttcatccctagctcaacatcaaaagacccatacagaagagaagccttatcagtgtaataaatgcgaaaaaactttttctcaaagctcacacctcacccagcaccagagaattcacactggcgaaaaaccctataagtgcaatgaatgtgacaaggccttctcccggagtacccatctgaccgaacaccagaacacccacaccggcgaaaaaccatataactgtaacgagtgcagaaaaacctttagccagtccacatacttgatccagcaccagcgcatccatagtggagaaaagccattcggctgcaacgactgcgggaaatcctttagataccgtagtgctctgaacaaacatcaaagactacaccctggaatctag

SEQ ID NO: 170600 - DNA, 2256 bp, Artificial Sequence
  derived and/or modified sequence
atggaggacctgagcagcccagacagcaccctgctgcagggcggccacaacctgctgagcagcgccagcttccaggaggccgtgaccttcaaggatgtgattgtggacttcacccaggaggagtggaagcagctggaccccggccagagggacctcttcagagatgtgaccctggagaactacacccacctggtgtccatcggcctgcaggtgtccaagccagatgtgatcagccagctggagcagggcacagagccctggatcatggagcccagcatccctgtgggcacctgtgccgactgggagacccggctggagaacagcgtgtctgcccctgagccagacatcagcgaggaggagctgagccctgaggtgattgtggagaagcacaagagagatgacagctggagcagcaacctgctggagagctgggagtatgagggcagcctggagcggcagcaggccaaccagcagaccctgcccaaggagatcaaggtgacagagaagaccatccccagctgggagaagggccctgtgaacaatgaatttgggaagtctgtgaatgtgagcagcaacctggtgacccaggagcccagccctgaggagaccagcaccaagaggagcatcaagcagaacagcaaccctgtgaagaaggagaagagctgcaagtgcaatgaatgtgggaaggccttctcctactgcagcgccctgatccgccaccagaggacccacactggagagaagccctacaagtgcaatgaatgtgagaaggccttcagccgctcagaaaatctcatcaaccaccagaggatccacactggagacaagccctacaagtgtgaccagtgtgggaagggcttcatcgagggccccagcctgacccagcaccagaggatccacactggagagaagccctacaagtgtgatgaatgtgggaaggccttcagccagaggacccacctggtgcagcaccagaggatccacactggagagaagccctacacctgcaatgaatgtgggaaggccttcagccagaggggccacttcatggagcaccagaagatccacactggagagaagcccttcaagtgtgatgaatgtgacaagaccttcaccaggagcacccacctgacccagcaccagaagatccacactggagagaagacctacaagtgcaatgaatgtgggaaggccttcaacggccccagcaccttcatccgccaccacatgatccacactggagagaagccctatgaatgtaatgaatgtgggaaggccttcagccagcacagcaacctgacccagcaccagaagacccacactggagagaagccctatgactgtgccgagtgtgggaagagcttctcctactggagcagcctggcccagcacctgaagatccacactggagagaagccctacaagtgcaatgaatgtgggaaggccttctcctactgcagcagcctgacccagcaccggcgcatccacacccgggagaagccctttgaatgttctgaatgtgggaaggccttctcctacctgagcaacctgaaccagcaccagaagacccacacccaggagaaggcctatgagtgcaaggaatgtgggaaggccttcatccgcagcagcagcctggccaagcatgagcgcatccacactggagagaagccctaccagtgccatgaatgtgggaagaccttctcctatggcagcagcctcatccagcacaggaagatccacactggagagcggccctacaagtgcaatgaatgtggccgggccttcaaccagaacatccacctgacccagcacaagaggatccacactggagccaagccctatgaatgtgccgagtgtgggaaggccttccgccactgcagcagcctggcccagcaccagaagacccacacagaggagaagccctaccagtgcaacaagtgtgagaagaccttcagccagagcagccacctgacccagcaccagaggatccacactggagagaagccctacaagtgcaatgaatgtgacaaggccttcagccgcagcacccacctgacagagcaccagaacacccacactggagagaagccctacaactgcaatgaatgtaggaagaccttcagccagagcacctacctgatccagcaccagaggatccacagcggggagaagcccttcggctgcaatgactgtgggaagagcttccgctacagaagtgccctgaacaagcaccagaggctgcaccctggcatctag

SEQ ID NO: 170601 - DNA, 2256 bp, Artificial Sequence
  derived and/or modified sequence
atggaggacctgagcagccccgacagcaccctgctgcagggcggccacaacctgttgtcctctgcaagctttcaagaggctgtgacttttaaggatgtgatcgtcgattttacacaagaagagtggaaacagctagaccctgggcaacgagacctgttccgggacgtcactcttgaaaattatacccacctcgtgagcattgggctccaggtcagcaaacctgatgtcatttctcaactcgagcagggaactgagccctggattatggaaccatccattcctgtcggaacatgtgcagactgggaaacacgcctcgaaaacagcgtgtctgcacccgaacctgatatcagcgaagaagagctctctccggaagtgatcgtggagaagcacaaaagagatgattcatggtcctctaacttgctggagtcatgggagtacgaggggtctttggagcggcagcaggcaaaccagcagactctgcccaaagaaattaaagttacagagaagacaatccccagctgggagaaggggcccgtaaacaacgagttcggcaagtccgtgaatgtctcctcgaacttagtcactcaggagccgagcccagaggagacatcaaccaagcgtagtatcaaacagaattccaacccagtgaaaaaggaaaaaagctgcaaatgcaacgaatgcggtaaggcattcagctactgtagcgccctgattagacatcagaggactcatacaggagaaaagccttataaatgtaatgagtgtgagaaggctttttcgcgctccgaaaatctgatcaaccaccaacggattcacactggtgacaaaccttataagtgcgaccagtgtggcaaaggctttatcgaaggtccctccctgacccagcatcagcgcatacatacgggagagaagccctataagtgcgatgagtgcgggaaagctttctcgcagcggacgcacctggtacagcaccagagaatccacacgggcgagaagccatacacttgcaatgaatgtggaaaggcattctcccagcggggacacttcatggagcatcaaaaaatccacacaggtgaaaagccattcaagtgtgacgaatgcgacaaaacttttacccgaagcactcacctgacacagcaccagaaaatccatacgggcgagaaaacatataagtgtaacgaatgcggaaaggctttcaacggcccctccaccttcattagacaccatatgattcatactggagaaaagccctacgagtgcaacgagtgcggcaaagctttcagtcaacatagcaatctcacacaacatcagaagacccacaccggggagaagccttacgattgcgcagagtgtggcaagagcttctcctactggtcgtccctagcccaacacctcaagattcacacgggtgagaagccatataaatgcaacgagtgcggcaaagcatttagttactgcagctccttgacgcagcaccggagaattcatactagagaaaaacctttcgagtgttccgaatgcggaaaggcgtttagttatctgtctaatctcaaccagcatcaaaagacccatacccaggaaaaggcttacgagtgcaaggagtgtggcaaggcctttatcaggtcaagctccttggccaagcacgaacggattcacacaggcgaaaagccctatcagtgccacgaatgtggcaagaccttttcttatggctctagcctgatccagcatcggaaaattcatacaggcgaaaggccgtataaatgcaacgagtgtggaagggcattcaaccagaacatccatctcacccagcataaacggatccatactggcgctaagccgtacgagtgtgccgagtgcgggaaggctttccgccactgcagctccctagcgcagcatcaaaagactcacacagaggaaaaaccttaccaatgcaataagtgtgagaagaccttctcccagtcctctcacctgacccagcaccagcgtattcatacgggggagaaaccgtacaagtgtaatgagtgcgacaaggcattttcaaggtccactcacttgacagagcaccagaacactcataccggcgaaaaaccctataactgcaacgagtgcagaaagactttttctcagtccacttacctgatacagcaccagaggattcatagcggggagaagcctttcggatgtaacgactgcgggaaaagctttaggtaccgctccgccctgaacaagcaccagcggctgcaccctgggatttag

SEQ ID NO: 170602 - DNA, 2256 bp, Artificial Sequence
  derived and/or modified sequence
atggaagatctgtcatccccggactcaacactcttgcaggggggacacaatctgttatcttcggcctcattccaagaggctgtgacatttaaggacgtgatcgtggatttcacacaggaagagtggaaacagctggacccaggccagagagacctctttcgtgatgtcacactggagaactatacacacttagttagcatcgggttacaagtctccaaacccgatgtaatctctcaactggagcagggaacagagccttggataatggaaccatcgattcccgtgggaacatgtgctgactgggagacacgccttgaaaatagcgtgtccgcccctgagcccgacattagcgaagaagaactcagcccagaagtcatcgtggagaaacacaagcgtgacgacagttggagctccaatctgctggagtcctgggaatatgaaggcagtttggaacgccaacaggccaaccaacagactctccctaaggaaatcaaggtcaccgagaagaccattccatcctgggaaaagggcccagtgaataacgaatttggcaagtctgttaacgtgtcttcaaatctcgttacccaggagccatcacccgaggagacatctacaaagaggtcgataaaacagaactccaatccagtcaaaaaagagaagagctgtaaatgtaatgaatgtgggaaggccttcagctactgcagcgccctgattaggcaccaaaggacccataccggggaaaagccttataaatgtaacgaatgcgaaaaagcgtttagccgctctgagaacttaattaaccaccagcgaatccacacaggcgacaagccttataagtgtgaccaatgtggcaagggctttattgaaggaccgagccttacccagcatcagaggattcacaccggcgagaaaccatataaatgtgatgaatgcggaaaggcattctctcagagaactcatctggtgcagcatcagcggattcacacaggcgaaaagccctatacttgcaacgaatgcggaaaggctttttcacagcggggtcactttatggagcaccagaagatccataccggggagaaaccctttaagtgtgatgagtgtgacaagacttttactaggtccacccatctgacacagcaccaaaagattcacacaggagagaagacatataagtgtaacgagtgtgggaaggccttcaatggcccatctaccttcatccgccaccatatgatccacactggagaaaagccctacgagtgcaacgagtgcggaaaggctttctcgcagcactccaacctaacgcagcaccagaagacgcatacgggggaaaagccatatgactgcgcggagtgcggaaagtccttcagttattggagttccctcgctcagcatctgaagattcatactggtgagaagccctacaaatgtaacgagtgcgggaaagctttttcatactgttcaagcctgacccagcaccggaggatacatactcgcgagaaacctttcgagtgttctgagtgtggcaaagctttctcctacctgagcaatctgaaccagcaccagaagacacacactcaggagaaggcctatgagtgcaaggagtgtggtaaggcgttcattaggagtagtagtttggcaaaacatgaacgcatccacactggcgaaaaaccttaccagtgtcatgaatgtgggaaaacattcagttatggttcctctcttattcagcaccggaagattcacaccggggagcgcccttacaaatgcaacgagtgcggccgagcctttaatcagaacatccatttgacccagcataagcggattcataccggcgctaaaccttacgagtgcgccgaatgtggtaaggcttttaggcattgttccagccttgcccagcatcagaagacacacaccgaggagaagccatatcaatgcaacaagtgcgaaaaaacattttcgcagtcatcacacctaacgcagcaccagcggattcacactggtgagaaaccttataagtgcaatgaatgcgataaggccttctctagatcgacccatctaaccgaacatcaaaacacccacaccggtgagaaaccctataattgtaacgaatgcagaaagacttttagccagtccacttatttgattcagcaccagcgcattcactccggggagaagccttttggctgtaacgattgtggtaagagttttaggtatcgctctgccctgaacaaacaccaacggctgcatccgggaatttag

SEQ ID NO: 170603 - DNA, 2004 bp, Artificial Sequence
  derived and/or modified sequence
atggaggacctgagcagccccgacagcaccctgctgcagggcggccacaacctgctgagcagcgccagcttccaggaggccgtgaccttcaaggacgtgatcgtggacttcacccaggaggagtggaagcagctggaccccggccagagagacctgttcagagacgtgaccctggagaactacacccacctggtgagcatcggcctgcaggtgagcaagcccgacgtgatcagccagctggagcagggcaccgagccctggatcatggagcccagcatccccgtgggcacctgcgccgactgggagaccagactggagaacagcgtgagcgcccccgagcccgacatcagcgaggaggagctgagccccgaggtgatcgtggagaagcacaagagagacgacagctggagcagcaacctgctggagagctgggagtacgagggcagcctggagagacagcaggccaaccagcagaccctgcccaaggagatcaaggtgaccgagaagaccatccccagctgggagaagggccccgtgaacaacgagttcggcaagagcgtgaacgtgagcagcaacctggtgacccaggagcccagccccgaggagaccagcaccaagagaagcatcaagcagaacagcaaccccgtgaagaaggagaagagctgcaagtgcaacgagtgcggcaaggccttcagctactgcagcgccctgatcagacaccagagaacccacaccggcgagaagccctacaagtgcaacgagtgcgagaaggccttcagcagaagcgagaacctgatcaaccaccagagaatccacaccggcgacaagccctacaagtgcgaccagtgcggcaagggcttcatcgagggccccagcctgacccagcaccagagaatccacaccggcgagaagccctacaagtgcgacgagtgcggcaaggccttcagccagagaacccacctggtgcagcaccagagaatccacaccggcgagaagccctacacctgcaacgagtgcggcaaggccttcagccagagaggccacttcatggagcaccagaagatccacaccggcgagaagcccttcaagtgcgacgagtgcgacaagaccttcaccagaagcacccacctgacccagcaccagaagatccacaccggcgagaagacctacaagtgcaacgagtgcggcaaggccttcaacggccccagcaccttcatcagacaccacatgatccacaccggcgagaagccctacgagtgcaacgagtgcggcaaggccttcagccagcacagcaacctgacccagcaccagaagacccacacccaggagaaggcctacgagtgcaaggagtgcggcaaggccttcatcagaagcagcagcctggccaagcacgagagaatccacaccggcgagaagccctaccagtgccacgagtgcggcaagaccttcagctacggcagcagcctgatccagcacagaaagatccacaccggcgagagaccctacaagtgcaacgagtgcggcagagccttcaaccagaacatccacctgacccagcacaagagaatccacaccggcgccaagccctacgagtgcgccgagtgcggcaaggccttcagacactgcagcagcctggcccagcaccagaagacccacaccgaggagaagccctaccagtgcaacaagtgcgagaagaccttcagccagagcagccacctgacccagcaccagagaatccacaccggcgagaagccctacaagtgcaacgagtgcgacaaggccttcagcagaagcacccacctgaccgagcaccagaacacccacaccggcgagaagccctacaactgcaacgagtgcagaaagaccttcagccagagcacctacctgatccagcaccagagaatccacagcggcgagaagcccttcggctgcaacgactgcggcaagagcttcagatacagaagcgccctgaacaagcaccagagactgcaccccggcatctag

SEQ ID NO: 170604 - DNA, 2004 bp, Artificial Sequence
  derived and/or modified sequence
atggaggacctgtcaagtcctgacagcactttattgcagggaggccacaacctactatccagcgcatcattccaggaggctgtcaccttcaaggatgtaattgtcgactttacacaggaggagtggaaacaactggacccaggccagcgggatctgtttagagacgtcacgctggagaactacacacacctcgtgtccatcggacttcaggttagcaagcccgacgtgatctcccagctagaacaagggaccgagccctggatcatggagccctccatccctgttggcacctgcgccgattgggaaactagactggagaatagtgtctctgcaccagagccggatatctcagaggaggaactttcccccgaagttatcgtcgaaaaacacaagcgcgacgacagctggtccagcaatctacttgagagctgggagtatgaagggtcacttgagcgtcaacaggccaatcaacagacactgccgaaagagatcaaggtgactgaaaaaacgataccaagttgggagaaagggccagtcaataacgagttcggaaagtctgttaatgtcagctcaaacctcgtcactcaagagccaagtccggaggagaccagtacaaagcgctctattaagcagaacagcaatcccgtcaaaaaagagaaatcatgcaagtgtaatgagtgcggaaaagcatttagctactgtagcgcattgattcgacatcaacgcacccacactggggaaaagccttacaagtgcaacgaatgtgaaaaagctttttcccggtctgaaaatctgattaatcatcagcggattcacactggggataagccttataaatgcgaccaatgcgggaagggctttatagagggaccatccctgacccagcaccagcggatccacactggagagaaaccttataagtgtgacgagtgcgggaaggctttctctcagaggacgcacctcgttcagcaccagcgaatccataccggagagaagccttacacttgcaacgaatgtggaaaggccttcagccagagaggtcatttcatggagcatcaaaaaatccacacgggagaaaaacccttcaaatgcgatgaatgcgacaaaaccttcacacgcagcacccacctgacacaacaccagaaaattcacactggggagaagacatacaagtgcaacgaatgcggaaaagcatttaatggcccatcaacctttatcagacatcacatgattcataccggagagaaaccgtacgaatgtaacgagtgcggtaaagcattcagccagcacagcaatctaacacagcatcagaaaactcacactcaagagaaagcttatgagtgcaaggagtgcgggaaggcttttataagatcttccagcttggccaaacatgagcgcatccacacaggagaaaaaccctaccaatgccatgaatgcgggaagaccttttcttacggctcttcgttgatccaacatagaaaaatccacactggggaaagaccttataaatgcaacgaatgcggacgggcgttcaaccagaacatccacctgacacagcataaacggatccatactggcgctaaaccatatgagtgcgccgaatgtggtaaggcttttagacactgctcgagcctggctcagcaccaaaagactcatacagaggagaagccgtaccagtgcaataaatgtgaaaaaaccttctctcagagctcccatttaacgcaacatcagagaattcatactggcgagaagccttataaatgcaatgaatgcgataaagccttttccagatccacccacttaacagagcaccaaaacacccatactggcgagaagccatataactgcaacgagtgtaggaagaccttcagtcagtctacatacctgatccaacaccagcggattcactccggtgaaaaacccttcggctgcaatgactgtgggaaatctttccgctatcggtctgccctgaacaagcaccagagactgcatcctggcatctag

SEQ ID NO: 170605 - DNA, 2256 bp, Artificial Sequence
  derived and/or modified sequence
atggaggatttatctagcccagatagcaccctccttcaggggggtcacaatttgttgtcctctgcaagcttccaggaagctgtgacattcaaggacgttatagttgacttcacccaagaagaatggaagcagctcgacccaggccagagggacctcttcagagatgtcaccctggagaactatacacatctggtcagtatcggacttcaagtgtcaaagcccgacgtgatttcccagttagagcaaggcaccgagccttggatcatggagccaagcattcccgttgggacttgtgctgattgggaaactcgactcgagaactcagtgtctgcccctgaacccgacataagtgaggaggagctatcgcccgaggtgattgtggagaaacacaagagagacgacagctggtcctccaatctcctggagtcatgggaatatgaagggagtctggaacgccaacaagcgaatcagcagacactgccgaaagagatcaaggtgaccgaaaagacaatcccaagttgggagaagggtccggtaaataacgagtttggcaagtctgtgaacgtatcctctaatctggtcactcaagagccgagtccagaagaaacttccacaaagaggagcatcaagcagaactcaaaccctgtgaagaaggagaagtcctgtaagtgcaacgagtgtggtaaagccttttcctactgcagtgccctaatcaggcaccaacgtacccatacaggggaaaagccctacaaatgtaatgagtgtgagaaggcattttctaggtccgaaaatttgatcaaccaccaacggatccacacgggcgacaaaccgtacaaatgcgatcagtgcggcaaggggtttattgaaggcccttctcttacccagcaccagagaatacatacaggcgaaaagccatacaaatgtgacgaatgcggcaaggctttctcacaaaggactcatctcgttcagcatcagaggatacacactggtgagaaaccctacacctgcaacgaatgtggaaaagcattcagtcagaggggacatttcatggagcaccaaaagattcacaccggagagaaaccatttaagtgcgacgaatgtgacaaaacatttacaagatccactcacctcactcaacatcaaaaaattcataccggcgagaagacctataagtgcaatgaatgtggaaaagccttcaacgggccttctacattcattcgccaccatatgatccacacgggcgaaaaaccctatgaatgcaatgaatgtggcaaggcctttagtcagcactctaacctgacccagcaccagaagacacacactggcgagaaaccttatgactgtgcagagtgtggcaaaagttttagttattggagttcgctggctcagcatcttaagatccatacaggtgaaaaaccgtataaatgcaatgagtgtgggaaggccttctcttattgttcaagcttgacccaacacagaagaattcatacaagggaaaaacctttcgagtgtagtgagtgtggcaaagcctttagttacctcagcaacctaaaccaacaccagaagacgcatacccaggagaaggcatatgagtgcaaagagtgtgggaaggctttcatccgttcgagctccctggcgaagcatgagcggatccataccggcgaaaagccgtaccagtgccatgaatgtggaaagacctttagttatggatccagcttaatacaacatcggaagatccacacgggggagcgcccttataagtgcaatgagtgtggccgtgccttcaatcagaatattcatcttacccagcacaaacgtatccatacaggtgcgaagccttacgagtgcgccgagtgcggaaaggccttcaggcactgttcatccctggcccaacaccaaaagacgcacaccgaggagaagccctaccagtgtaataagtgcgaaaaaacattttcacaatctagtcacctcacccagcaccagagaattcacacaggggagaagccatacaaatgtaatgagtgcgacaaggccttctccagatccacccaccttaccgagcaccagaacacccacaccggagagaaaccttacaattgcaatgagtgcaggaagacattctcccagtctacgtacctcatccagcatcaacgcatccactctggtgaaaaaccatttggctgcaacgactgcggtaagtcctttagatataggtctgcccttaacaaacaccaacggctgcatcctgggatctag

SEQ ID NO: 170606 - DNA, 2004 bp, Artificial Sequence
  derived and/or modified sequence
atggaggacctgagcagcccagacagcaccctgctgcagggcggccacaacctgctgagcagcgccagcttccaggaggccgtgaccttcaaggatgtgattgtggacttcacccaggaggagtggaagcagctggaccccggccagagggacctcttcagagatgtgaccctggagaactacacccacctggtgtccatcggcctgcaggtgtccaagccagatgtgatcagccagctggagcagggcacagagccctggatcatggagcccagcatccctgtgggcacctgtgccgactgggagacccggctggagaacagcgtgtctgcccctgagccagacatcagcgaggaggagctgagccctgaggtgattgtggagaagcacaagagagatgacagctggagcagcaacctgctggagagctgggagtatgagggcagcctggagcggcagcaggccaaccagcagaccctgcccaaggagatcaaggtgacagagaagaccatccccagctgggagaagggccctgtgaacaatgaatttgggaagtctgtgaatgtgagcagcaacctggtgacccaggagcccagccctgaggagaccagcaccaagaggagcatcaagcagaacagcaaccctgtgaagaaggagaagagctgcaagtgcaatgaatgtgggaaggccttctcctactgcagcgccctgatccgccaccagaggacccacactggagagaagccctacaagtgcaatgaatgtgagaaggccttcagccgctcagaaaatctcatcaaccaccagaggatccacactggagacaagccctacaagtgtgaccagtgtgggaagggcttcatcgagggccccagcctgacccagcaccagaggatccacactggagagaagccctacaagtgtgatgaatgtgggaaggccttcagccagaggacccacctggtgcagcaccagaggatccacactggagagaagccctacacctgcaatgaatgtgggaaggccttcagccagaggggccacttcatggagcaccagaagatccacactggagagaagcccttcaagtgtgatgaatgtgacaagaccttcaccaggagcacccacctgacccagcaccagaagatccacactggagagaagacctacaagtgcaatgaatgtgggaaggccttcaacggccccagcaccttcatccgccaccacatgatccacactggagagaagccctatgaatgtaatgaatgtgggaaggccttcagccagcacagcaacctgacccagcaccagaagacccacacccaggagaaggcctatgagtgcaaggaatgtgggaaggccttcatccgcagcagcagcctggccaagcatgagcgcatccacactggagagaagccctaccagtgccatgaatgtgggaagaccttctcctatggcagcagcctcatccagcacaggaagatccacactggagagcggccctacaagtgcaatgaatgtggccgggccttcaaccagaacatccacctgacccagcacaagaggatccacactggagccaagccctatgaatgtgccgagtgtgggaaggccttccgccactgcagcagcctggcccagcaccagaagacccacacagaggagaagccctaccagtgcaacaagtgtgagaagaccttcagccagagcagccacctgacccagcaccagaggatccacactggagagaagccctacaagtgcaatgaatgtgacaaggccttcagccgcagcacccacctgacagagcaccagaacacccacactggagagaagccctacaactgcaatgaatgtaggaagaccttcagccagagcacctacctgatccagcaccagaggatccacagcggggagaagcccttcggctgcaatgactgtgggaagagcttccgctacagaagtgccctgaacaagcaccagaggctgcaccctggcatctag

SEQ ID NO: 170607 - DNA, 2004 bp, Artificial Sequence
  derived and/or modified sequence
atggaggacctgagcagccccgacagcaccctgctgcagggcggccataacctacttagcagtgctagcttccaagaagccgtaacctttaaagatgtgatcgttgatttcacacaggaagagtggaagcagctggaccccggccagcgggatctgtttcgcgacgtgaccctggagaactacacccatctggtgtccatcggcctccaggtgtctaagccagacgttatttcgcagctcgaacaggggacagagccttggatcatggaaccctcgatccccgtaggaacctgcgcggattgggagacaagactggagaacagtgtctccgcaccagagccagatatttccgaggaagaacttagccccgaagtgatagttgagaagcacaagagggacgattcttggtccagtaacctccttgagtcatgggagtacgaaggatctcttgagagacagcaggccaatcaacagactctccccaaggaaattaaggtaaccgagaagacaatccccagttgggagaaagggccagtaaataatgagttcggaaagagtgttaatgtgtcttccaacttagtgactcaggaacccagccccgaggaaacctcgaccaaacgtagcatcaaacagaactccaatcccgtgaaaaaagaaaaatcctgcaaatgtaatgagtgcggtaaggccttcagctattgttcagcactgattaggcatcagaggacacacactggagagaaaccgtataaatgcaatgaatgtgaaaaggcctttagtcggagcgaaaacctgatcaatcatcagcgtatccacactggcgacaagccatacaagtgcgaccagtgtggaaagggattcattgagggtcctagcctcacccagcatcagagaattcacaccggggaaaagccttataaatgtgacgagtgcggcaaggcgttcagccaacgcactcacctggttcagcatcagcgaattcatacaggggagaagccctacacctgtaatgaatgcggaaaagcattcagtcagcggggacatttcatggaacatcaaaagatacataccggggaaaagccctttaaatgtgacgagtgcgacaagacgttcacccgtagcacccaccttacacagcatcaaaaaatccataccggagagaaaacatacaaatgtaatgaatgtggcaaggcgtttaacgggccctcaacattcatacggcaccatatgatccacactggagagaaaccctatgaatgcaacgagtgcggtaaagcattcagtcaacacagtaatctgacccagcatcaaaaaacccacactcaggagaaagcttatgaatgtaaagaatgcggtaaggccttcatacgttctagttcccttgcaaaacatgaaaggatccatacaggggagaagccttaccagtgccatgagtgcgggaaaactttctcttacgggtcctcactcatacagcatagaaaaattcacactggagagcggccctacaaatgtaacgagtgcggacgggccttcaaccagaatatccatctgacacagcataagcggatccatacgggcgcaaagccttacgaatgcgccgaatgcgggaaagcctttcgccactgcagcagtttggctcagcaccagaaaacacacactgaggagaagccctaccagtgcaataaatgcgagaagactttttcccagtcatcccacctcactcagcatcaaagaattcacaccggcgaaaagccctataaatgtaatgagtgtgataaagccttttcccggagtactcacttaacagaacaccagaatacacacacgggtgaaaagccctacaactgtaatgaatgtcggaagacattctcccagtctacctatctgatccaacatcagcggattcattccggagagaagccttttgggtgtaacgactgtggaaagtcattccgctaccgcagcgccttgaacaaacaccaacggcttcatcctggaatttag

SEQ ID NO: 170608 - DNA, 2256 bp, Artificial Sequence
  derived and/or modified sequence
atggaggacctgagcagccccgacagcaccctgctgcagggcggccataacctcctcagtagtgccagcttccaggaagcggtaacgtttaaggacgtgatcgtagactttacccaagaagaatggaaacaacttgaccctggtcagcgggacctcttcagggacgtgactcttgagaattatacacatctagtgtctatcggccttcaagtctccaagcctgacgtgatcagccaattagaacagggcacggagccctggattatggagccaagcattcctgtcgggacctgcgcggactgggagaccagactggagaacagcgtgtctgctcccgagccagatatcagcgaggaggaactatcccctgaagtcatagtggaaaagcacaaacgggatgattcctggtctagcaatctcctcgaatcctgggaatacgaagggtccctcgagaggcagcaggcaaaccagcaaacgcttcccaaggagataaaggtgactgagaagactatcccctcgtgggaaaaggggcctgttaataatgagttcggaaagtcagtgaatgtgagttctaatcttgtcacccaggaacctagtcccgaagaaacctccacaaagcgctctataaagcagaacagcaacccggtgaaaaaagaaaaaagctgtaagtgcaacgaatgcggcaaggccttctcctactgctccgcccttatccgacatcagaggacacataccggcgaaaagccctacaagtgcaatgagtgtgaaaaggccttcagcaggagcgagaatctgattaatcatcagcgtatccatactggggataaaccctacaaatgtgatcagtgtggaaaaggcttcatcgagggcccctccctcacccagcatcagcggatccacacaggcgagaagccctataagtgcgatgaatgcggcaaagcattcagccaaagaactcacttggtgcaacaccagagaatccatactggcgaaaagccgtatacctgtaacgaatgtggtaaggctttttcccagcgaggacacttcatggagcaccaaaagattcacacaggggaaaagcctttcaagtgtgacgagtgcgacaagaccttcacgcgttctactcacttaactcagcatcaaaaaatacacacgggcgagaagacatataaatgtaacgagtgcggtaaagctttcaacgggccctctacgttcatccggcaccatatgatacacactggagaaaagccttacgagtgtaacgaatgcgggaaagcctttagtcagcattctaacttaacacaacaccagaaaacacacaccggagaaaaaccctatgattgcgcggagtgtggaaagtcgttctcctattggtcctcccttgcccaacatctcaagattcatactggcgaaaagccttataagtgcaacgaatgcggcaaagccttctcatattgttcctctttaactcagcatagacggattcatacaagagaaaaaccctttgagtgctccgagtgtggaaaggcattcagttacttgtccaatctcaatcagcatcaaaagacgcacacacaggagaaggcttacgaatgcaaagagtgcggcaaagccttcatccgttccagctctctggccaagcacgaacggatacataccggcgagaaaccataccagtgccatgagtgcggcaaaactttctcctatggcagttccctgatacagcacaggaagattcacacaggcgaacgaccctacaaatgcaatgaatgcggcagagccttcaaccaaaatattcacctaacgcaacataagcgtatccataccggagccaagccatacgagtgtgccgagtgcggcaaggcatttcgacactgttctagcctggcccaacaccagaagacacatacagaagagaagccctaccaatgcaataagtgcgaaaaaacatttagccagtccagtcacctgactcagcaccagcggatacacactggcgagaagccttacaagtgcaacgagtgtgacaaagccttcagtagaagcacccatttaacagagcatcaaaatacgcacacaggagagaaaccatacaattgcaatgagtgtcggaaaacattcagtcagtctacctacctgattcaacaccagcgcatacactccggagagaagccattcggttgcaatgactgtggcaagagtttcagataccggagcgccctcaacaagcatcagcggctccaccctgggatctag

SEQ ID NO: 170609 - DNA, 2004 bp, Artificial Sequence
  derived and/or modified sequence
atggaggaccttagctccccagactccacactgcttcagggcggacacaacctcttgagcagcgcctcctttcaggaagcagtaacattcaaggacgtaatcgtggactttacccaggaggagtggaagcagctggatccaggacaacgggacttatttagggatgtcactttagaaaattatactcacttggtgtccatcggtctgcaggtctccaagcccgatgtcataagtcaactggaacagggcacagaaccatggattatggaaccttctatccccgttggcacatgcgccgattgggaaacccgactcgagaattccgtatctgctcccgagcccgacataagcgaggaggagctcagtcctgaggtgattgtagaaaaacacaaaagagacgacagttggtcaagtaatctgctcgagagctgggagtatgaaggcagcttggaaagacagcaggccaaccagcagaccctgcccaaggagattaaagtgacagaaaaaacgattcctagctgggaaaagggacctgtgaacaacgagtttggcaagtccgtgaatgtcagcagtaatctggttacacaggaaccaagccccgaagagacatctactaagagaagcatcaagcagaactctaaccctgtgaaaaaggaaaaatcttgtaaatgcaatgagtgtggaaaagcattctcctattgtagtgccctgatcaggcaccagagaacgcacacaggcgagaagccatataaatgcaatgaatgtgaaaaagctttctcccggtctgagaatctgattaaccaccagagaattcacacgggcgacaagccgtataagtgtgatcaatgtggcaaaggattcatcgagggcccaagccttactcaacaccagcggattcacaccggggagaagccctacaagtgcgacgagtgtgggaaggcgtttagtcagcgcactcatctggtccagcaccagcgcattcatacaggggaaaaaccttatacatgtaacgagtgcgggaaggcctttagccaacgaggacactttatggaacatcaaaaaatccacaccggtgagaagccctttaagtgcgacgagtgcgataaaacgtttacaaggtctacccacctcactcagcaccagaagatccacaccggagaaaaaacatacaaatgtaatgaatgcggcaaggccttcaatgggccatccactttcatccggcaccatatgattcatactggagaaaagccctatgaatgtaacgagtgtgggaaagctttctcccagcatagtaacctcacccagcatcagaagacacatacacaggagaaggcttatgaatgtaaagaatgtggtaaggcattcataagatcgtcctcattggctaaacatgaaagaatccacaccggcgagaagccgtaccagtgtcatgaatgtgggaaaaccttttcttacggctccagcctgattcaacaccgtaagattcacacgggtgaacggccttacaagtgcaatgaatgcggcagagcgttcaaccagaacattcatctcactcagcacaaaagaattcatacaggggctaaaccttatgagtgtgccgagtgcggcaaagcgtttaggcactgctcttccctcgcccagcaccagaaaactcacaccgaagaaaagccgtaccaatgtaacaaatgcgaaaaaacatttagccagtcctctcatctgacacaacaccagagaatacacaccggggagaaaccttataaatgtaacgagtgcgacaaggcgttttctcgatccactcatcttacggaacaccagaatacccacaccggggaaaagccctacaactgcaacgagtgcagaaagaccttttcgcagtcaacctatcttattcaacatcagcggattcacagcggcgaaaaaccctttggctgcaatgactgcggcaaatctttcaggtatcgcagcgccctgaacaaacaccagcgactgcatcccggaatctag

SEQ ID NO: 170610 - DNA, 2256 bp, Artificial Sequence
  derived and/or modified sequence
atggaggacctatcttctcccgactcaaccctgctccaagggggtcataacctcttgtcctctgctagctttcaggaggccgtgacgtttaaggacgtgatcgtggatttcacccaggaggagtggaagcagctcgaccctgggcagcgggatttgtttcgggacgtgacattggaaaattatacccacctagtgtctataggcctgcaggttagcaagccagatgtcatctcccagctggagcagggaaccgagccatggataatggaaccctccatccccgttggcacgtgtgccgattgggaaactagattggagaattccgtgtctgccccagagccagatatctcagaagaggagctgtccccagaagttattgtggagaaacacaaaagggatgactcttggtcctctaaccttctggagtcctgggagtacgaggggagcctggaaagacagcaggcaaatcaacagacgctccctaaggaaatcaaggtgacagagaaaaccatccctagctgggagaaagggccagtgaacaatgagtttgggaagagtgtaaatgtttcaagtaacctggttacacaagaacctagcccagaagagacgtctacgaagagatctataaagcagaactctaacccagttaaaaaagagaagtcttgcaaatgcaacgaatgtggcaaggccttctcgtactgttcggccctgatacgacatcaaagaacccatacaggtgagaaaccatacaaatgcaacgagtgcgaaaaggcattttcaagatccgaaaacctgatcaatcatcagcgcatccacacaggtgataagccctacaagtgtgatcagtgcggaaagggcttcatcgaggggcctagcctcacacagcaccaacgaattcacactggtgagaagccttacaagtgcgatgaatgtggaaaggccttctcccaaagaactcaccttgttcagcaccagcgcatccacaccggggaaaagccatacacctgcaacgaatgtgggaaggctttcagccagagaggccacttcatggagcaccaaaaaatccacaccggcgagaagccctttaagtgcgacgaatgtgacaagacttttacaagatctactcacctgacccaacaccagaaaattcatactggagaaaaaacatacaaatgcaacgagtgcggaaaagcctttaacggaccttctacctttatcaggcaccacatgattcacacaggggagaaaccctacgagtgtaatgagtgtggaaaggcattctcgcaacatagcaatctgactcagcatcagaagacacatacaggagaaaaaccttatgactgtgccgaatgcgggaagtcttttagctactggtccagcctcgctcagcatttgaagattcacactggggaaaaaccatacaaatgcaacgagtgtggaaaagcctttagttactgcagtagcctgacccagcaccgtaggattcacactcgagaaaaaccctttgagtgctccgaatgcggcaaggcgttctcctacttgagtaatctcaatcagcatcagaagacccatacacaagagaaagcatacgagtgtaaggaatgtgggaaggccttcattcgctccagctcccttgccaaacacgaacgcatccacacaggcgaaaagccatatcagtgccacgagtgtggcaagacttttagttacggcagctcattaattcagcaccgcaaaatccataccggcgaacgcccatataagtgtaacgagtgtggcagggcgttcaatcagaacatccacttaacacagcacaagagaattcatacaggcgctaagccgtatgagtgtgctgaatgcggtaaggcattccgtcactgttcttccctcgcacagcaccaaaagactcacactgaagagaaaccttaccaatgtaataaatgtgagaagactttctcacagtcctcacacctcacccagcatcaaaggatccacaccggagagaaaccctataaatgcaacgagtgcgacaaggccttctctagatcgacccacctgaccgagcaccagaatacacacacaggggagaagccttataactgcaacgaatgtagaaagacgtttagccaatcaacttatttgatccagcaccagaggattcattccggagaaaagcctttcggatgcaacgattgcggtaagtcgttcaggtatcggagtgctttaaacaagcatcaaagactgcacccgggtatttag

SEQ ID NO: 170611 - DNA, 3101 bp, Artificial Sequence
  derived and/or modified sequence
gttgaagccggttgtaggcgtggaaagaggttggcgcgctggaagtccagttgcttcggctccctgcgttaggtctggtggcggtcaatgcgcttccggacccgggatcagagtgtgtggatcgctatagggggaggggagctcagggtagacaacctcagcgtgttgcagattccctgcaaggggagttagacatctgagtcctagaccgagataccagctgaaggaacgctgcctggcgaaccctggtgttcaagttccagaggaacgggatgagctcctgagatggaagatctgtcctctccagactccacccttctccaagggggacataatctactctcatcagccagttttcaggaagcggtgactttcaaggatgtgatagtggactttacccaggaagaatggaaacagctggaccctggccagagagatttgttcagggatgtgacattggaaaattatacacacctggtctctataggactccaagtttctaaacctgatgtgatttcccagttagagcaagggacagagccatggatcatggagccaagcattccagtaggtacctgtgcagactgggagacaagacttgaaaatagtgtgtcagccccagagcctgacatttctgaagaagagctatctccagaggtaatagtggaaaaacacaaaagagatgattcttggagttccaacttgctagaaagttgggaatatgaaggcagtttagagagacagcaggcaaaccaacagacactgccaaaggaaataaaggtaaccgaaaagacaatacccagttgggaaaaaggccctgtaaataatgaatttgggaaaagtgtcaatgtgagttcaaaccttgtaacacaagaaccatctccagaagagacctctactaaaagaagcatcaaacagaattcaaacccagttaaaaaagagaaatcttgtaagtgcaatgaatgtgggaaagcctttagttattgttcagctcttattcgccatcagagaacacatactggagaaaaaccctacaaatgtaatgaatgtgaaaaagccttcagccggagtgaaaaccttataaaccatcaaagaattcatactggagataaaccatataaatgtgatcagtgtggaaaaggcttcattgagggtccatctcttactcaacatcaaagaattcatactggagaaaaaccatataaatgtgatgaatgtgggaaagcctttagtcagaggacccatcttgttcagcatcagagaattcatactggcgagaagccatacacttgtaatgagtgtggaaaagcctttagccagagaggccactttatggaacatcagaaaattcatacgggagaaaaaccttttaaatgtgatgaatgtgataaaaccttcaccaggagcacacaccttactcaacatcaaaaaattcatactggagaaaaaacctataaatgtaatgaatgtggaaaggccttcaacgggccctcaacttttatccgtcatcatatgattcatactggtgaaaaaccgtacgaatgcaatgaatgtgggaaagccttcagccagcactcaaacctcactcagcatcaaaaaactcatactggggagaaaccctatgattgtgcagaatgtggaaaatcttttagttactggtcatcccttgctcaacacctgaaaattcatactggagaaaaaccttacaaatgcaatgaatgtggaaaggccttcagttactgctcatcccttactcaacatcggagaattcacacgagagaaaagccctttgaatgcagtgaatgtggaaaggctttcagttatctctcaaaccttaatcagcatcagaaaactcatactcaagagaaagcttatgaatgtaaagaatgtgggaaagcttttattcggagttcatctcttgctaagcatgaaagaattcatactggagagaaaccctatcagtgtcatgaatgtgggaaaaccttcagttatggttcatcccttattcagcataggaagatccatactggagaacgaccttacaagtgtaatgagtgtgggagagcattcaaccagaacatacaccttacacagcataagagaattcatacaggagccaagccttatgagtgtgctgagtgtggtaaagcctttcgacattgttcatctcttgctcaacatcaaaaaactcacacagaagaaaaaccctaccagtgtaataaatgtgaaaagacctttagccagagctcccatctaactcagcatcaacgaattcacactggggagaagccctataagtgcaatgaatgtgacaaagcctttagccggagcactcatctgactgaacatcagaatactcatactggagagaaaccttataactgtaatgaatgcagaaagacttttagccagagcacatatctcattcagcaccagagaattcattcaggagagaagccttttggatgtaatgattgtggaaaatccttcagatatcgctctgctctcaacaaacatcagagactgcatcctggcatatgacaattctaggaacatcataaatttaggggagatatttactttagtttgtccttttgttaagtactgaagaatcagagtggatttagaaactgccttgaaatcttttaaattttcactatcatgttatggaatggaaagtacattgggctgaactaatccaattgttattaagccactctgtgacattagaaaactctactgttttaagctttagtttcctttatggaatgaaggatttggagtagattatttcaaaggtagtttggagttttataatcagttttgtatatttacaatattttcttgaatgggtttactatacatcagcattttgctgtgttgcatctagaatgtgtatgtttatgcatgttttgccaatagaatttgtgcttcagtaactagatcggggatctagtatgctcctggtctaatgcatttacattgtttaggtaactggttcctaataaaaagaattataaaataccctcaaattaacaattcaattgcatataatagcctaactcagtaagaatattaaaacttactattattcttcttct

SEQ ID NO: 170612 - DNA, 2289 bp, Artificial Sequence
  derived and/or modified sequence
gttgaagccggttgtaggcgtggaaagaggttggcgcgctggaagtccagttgcttcggctccctgcgttaggtctggtggcggtcaatgcgcttccggacccgggatcagagtgtgtggatcgctatagggggaggggagctcagggtagacaacctcagcgtgttgcagattccctgcaaggggagttagacatctgagtcctagaccgagataccagctgaaggaacgctgcctggcgaaccctggtgttcaagttccagaggaacgggatgagctcctgagatggaagatctgtcctctccagactccacccttctccaagggggacataatctactctcatcagccagttttcaggaagcggtgactttcaaggatgtgatagtggactttacccaggaagaatggaaacagctggaccctggccagagagatttgttcagggatgtgacattggaaaattatacacacctggtctctataggactccaagtttctaaacctgatgtgatttcccagttagagcaagggacagagccatggatcatggagccaagcattccagtaggtacctgtgcagactgggagacaagacttgaaaatagtgtgtcagccccagagcctgacatttctgaagaagagctatctccagaggtaatagtggaaaaacacaaaagagatgattcttggagttccaacttgctagaaagttgggaatatgaaggcagtttagagagacagcaggcaaaccaacagacactgccaaaggaaataaaggtaaccgaaaagacaatacccagttgggaaaaaggccctgtaaataatgaatttgggaaaagtgtcaatgtgagttcaaaccttgtaacacaagaaccatctccagaagagacctctactaaaagaagcatcaaacagaattcaaacccagttaaaaaagagaaatcttgtaagtgcaatgaatgtgggaaagcctttagttattgttcagctcttattcgccatcagagaacacatactggagaaaaaccctacaaatgtaatgaatgtgaaaaagccttcagccggagtgaaaaccttataaaccatcaaagaattcatactggagataaaccatataaatgtgatcagtgtggaaaaggcttcattgagggtccatctcttactcaacatcaaagaattcatactggagaaaaaccatataaatgtgatgaatgtgggaaagcctttagtcagaggacccatcttgttcagcatcagagaattcatactggcgagaagccatacacttgtaatgagtgtggaaaagcctttagccagagaggccactttatggaacatcagaaaattcatacgggagaaaaaccttttaaatgtgatgaatgtgataaaaccttcaccaggagcacacaccttactcaacatcaaaaaattcatactggagaaaaaacctataaatgtaatgaatgtggaaaggccttcaacgggccctcaacttttatccgtcatcatatgattcatactggtgaaaaaccgtacgaatgcaatgaatgtgggaaagccttcagccagcactcaaacctcactcagcatcaaaaaactcatactcaagagaaagcttatgaatgtaaagaatgtgggaaagcttttattcggagttcatctcttgctaagcatgaaagaattcatactggagagaaaccctatcagtgtcatgaatgtgggaaaaccttcagttatggttcatcccttattcagcataggaagatccatactggagaacgaccttacaagtgtaatgagtgtgggagagcattcaaccagaacatacaccttacacagcataagagaattcatacaggagccaagccttatgagtgtgctgagtgtggtaaagcctttcgacattgttcatctcttgctcaacatcaaaaaactcacacagaagaaaaaccctaccagtgtaataaatgtgaaaagacctttagccagagctcccatctaactcagcatcaacgaattcacactggggagaagccctataagtgcaatgaatgtgacaaagcctttagccggagcactcatctgactgaacatcagaatactcatactggagagaaaccttataactgtaatgaatgcagaaagacttttagccagagcacatatctcattcagcaccagagaattcattcaggagagaagccttttggatgtaatgattgtggaaaatccttcagatatcgctctgctctcaacaaacatcagagactgcatcctggcatatga

SEQ ID NO: 170613 - DNA, 2899 bp, Artificial Sequence
  derived and/or modified sequence
tgcacagagggaacacaccagggtagacaacctcagcgtgttgcagattccctgcaaggggagttagacatctgagtcctagaccgagataccagctgaaggaacgctgcctggcgaaccctggtgttcaagttccagaggaacgggatgagctcctgagatggaagatctgtcctctccagactccacccttctccaagggggacataatctactctcatcagccagttttcaggaagcggtgactttcaaggatgtgatagtggactttacccaggaagaatggaaacagctggaccctggccagagagatttgttcagggatgtgacattggaaaattatacacacctggtctctataggactccaagtttctaaacctgatgtgatttcccagttagagcaagggacagagccatggatcatggagccaagcattccagtaggtacctgtgcagactgggagacaagacttgaaaatagtgtgtcagccccagagcctgacatttctgaagaagagctatctccagaggtaatagtggaaaaacacaaaagagatgattcttggagttccaacttgctagaaagttgggaatatgaaggcagtttagagagacagcaggcaaaccaacagacactgccaaaggaaataaaggtaaccgaaaagacaatacccagttgggaaaaaggccctgtaaataatgaatttgggaaaagtgtcaatgtgagttcaaaccttgtaacacaagaaccatctccagaagagacctctactaaaagaagcatcaaacagaattcaaacccagttaaaaaagagaaatcttgtaagtgcaatgaatgtgggaaagcctttagttattgttcagctcttattcgccatcagagaacacatactggagaaaaaccctacaaatgtaatgaatgtgaaaaagccttcagccggagtgaaaaccttataaaccatcaaagaattcatactggagataaaccatataaatgtgatcagtgtggaaaaggcttcattgagggtccatctcttactcaacatcaaagaattcatactggagaaaaaccatataaatgtgatgaatgtgggaaagcctttagtcagaggacccatcttgttcagcatcagagaattcatactggcgagaagccatacacttgtaatgagtgtggaaaagcctttagccagagaggccactttatggaacatcagaaaattcatacgggagaaaaaccttttaaatgtgatgaatgtgataaaaccttcaccaggagcacacaccttactcaacatcaaaaaattcatactggagaaaaaacctataaatgtaatgaatgtggaaaggccttcaacgggccctcaacttttatccgtcatcatatgattcatactggtgaaaaaccgtacgaatgcaatgaatgtgggaaagccttcagccagcactcaaacctcactcagcatcaaaaaactcatactggggagaaaccctatgattgtgcagaatgtggaaaatcttttagttactggtcatcccttgctcaacacctgaaaattcatactggagaaaaaccttacaaatgcaatgaatgtggaaaggccttcagttactgctcatcccttactcaacatcggagaattcacacgagagaaaagccctttgaatgcagtgaatgtggaaaggctttcagttatctctcaaaccttaatcagcatcagaaaactcatactcaagagaaagcttatgaatgtaaagaatgtgggaaagcttttattcggagttcatctcttgctaagcatgaaagaattcatactggagagaaaccctatcagtgtcatgaatgtgggaaaaccttcagttatggttcatcccttattcagcataggaagatccatactggagaacgaccttacaagtgtaatgagtgtgggagagcattcaaccagaacatacaccttacacagcataagagaattcatacaggagccaagccttatgagtgtgctgagtgtggtaaagcctttcgacattgttcatctcttgctcaacatcaaaaaactcacacagaagaaaaaccctaccagtgtaataaatgtgaaaagacctttagccagagctcccatctaactcagcatcaacgaattcacactggggagaagccctataagtgcaatgaatgtgacaaagcctttagccggagcactcatctgactgaacatcagaatactcatactggagagaaaccttataactgtaatgaatgcagaaagacttttagccagagcacatatctcattcagcaccagagaattcattcaggagagaagccttttggatgtaatgattgtggaaaatccttcagatatcgctctgctctcaacaaacatcagagactgcatcctggcatatgacaattctaggaacatcataaatttaggggagatatttactttagtttgtccttttgttaagtactgaagaatcagagtggatttagaaactgccttgaaatcttttaaattttcactatcatgttatggaatggaaagtacattgggctgaactaatccaattgttattaagccactctgtgacattagaaaactctactgttttaagctttagtttcctttatggaatgaaggatttggagtagattatttcaaaggtagtttggagttttataatcagttttgtatatttacaatattttcttgaatgggtttactatacatcagcattttgctgtgttgcatctagaatgtgtatgtttatgcatgttttgccaatagaatttgtgcttcagtaactagatcggggatctagtatgctcctggtctaatgcatttacattgtttaggtaactggttcctaataaaaagaattataaaata

SEQ ID NO: 170614 - protein, 811 aa, Artificial Sequence
  derived and/or modified sequence
MPSALAIFTCRPNSHPFQERHVYLDEPIKIGRSVARCRPAQNNATFDCKVLSRNHALVWFDHKTGKFYLQDTKSSNGTFINSQRLSRGSEESPPCEILSGDIIQFGVDVTENTRKVTHGCIVSTIKLFLPDGMEARLRSDVIHAPLPSPVDKVAANTPSMYSQELFQLSQYLQEALHREQMLEQKLATLQRLLAITQEASDTSWQALIDEDRLLSRLEVMGNQLQACSKNQTEDSLRKELIALQEDKHNYETTAKESLRRVLQEKIEVVRKLSEVERSLSNTEDECTHLKEMNERTQEELRELANKYNGAVNEIKDLSDKLKVAEGKQEEIQQKGQAEKKELQHKIDEMEEKEQELQAKIEALQADNDFTNERLTALQEHLLSKSGGDCTFIHQFIECQKKLIVEGHLTKAVEETKLSKENQTRAKESDFSDTLSPSKEKSSDDTTDAQMDEQDLNEPLAKVSLLKDDLQGAQSEIEAKQEIQHLRKELIEAQELARTSKQKCFELQALLEEERKAYRNQVEESTKQIQVLQAQLQRLHIDTENLREEKDSEITSTRDELLSARDEILLLHQAAAKVASERDTDIASLQEELKKVRAELERWRKAASEYEKEITSLQNSFQLRCQQCEDQQREEATRLQGELEKLRKEWNALETECHSLKRENVLLSSELQRQEKELHNSQKQSLELTSDLSILQMSRKELENQVGSLKEQHLRDSADLKTLLSKAENQAKDVQKEYEKTQTVLSELKLKFEMTEQEKQSITDELKQCKNNLKLLREKGNNKPWPWMPMLAALVAVTAIVLYVPGLARASP

SEQ ID NO: 170615 - DNA, 2436 bp, Artificial Sequence
  derived and/or modified sequence
atgcccagcgccctggccatcttcacctgcagacccaacagccaccccttccaggagagacacgtgtacctggacgagcccatcaagatcggcagaagcgtggccagatgcagacccgcccagaacaacgccaccttcgactgcaaggtgctgagcagaaaccacgccctggtgtggttcgaccacaagaccggcaagttctacctgcaggacaccaagagcagcaacggcaccttcatcaacagccagagactgagcagaggcagcgaggagagccccccctgcgagatcctgagcggcgacatcatccagttcggcgtggacgtgaccgagaacaccagaaaggtgacccacggctgcatcgtgagcaccatcaagctgttcctgcccgacggcatggaggccagactgagaagcgacgtgatccacgcccccctgcccagccccgtggacaaggtggccgccaacacccccagcatgtacagccaggagctgttccagctgagccagtacctgcaggaggccctgcacagagagcagatgctggagcagaagctggccaccctgcagagactgctggccatcacccaggaggccagcgacaccagctggcaggccctgatcgacgaggacagactgctgagcagactggaggtgatgggcaaccagctgcaggcctgcagcaagaaccagaccgaggacagcctgagaaaggagctgatcgccctgcaggaggacaagcacaactacgagaccaccgccaaggagagcctgagaagagtgctgcaggagaagatcgaggtggtgagaaagctgagcgaggtggagagaagcctgagcaacaccgaggacgagtgcacccacctgaaggagatgaacgagagaacccaggaggagctgagagagctggccaacaagtacaacggcgccgtgaacgagatcaaggacctgagcgacaagctgaaggtggccgagggcaagcaggaggagatccagcagaagggccaggccgagaagaaggagctgcagcacaagatcgacgagatggaggagaaggagcaggagctgcaggccaagatcgaggccctgcaggccgacaacgacttcaccaacgagagactgaccgccctgcaggagcacctgctgagcaagagcggcggcgactgcaccttcatccaccagttcatcgagtgccagaagaagctgatcgtggagggccacctgaccaaggccgtggaggagaccaagctgagcaaggagaaccagaccagagccaaggagagcgacttcagcgacaccctgagccccagcaaggagaagagcagcgacgacaccaccgacgcccagatggacgagcaggacctgaacgagcccctggccaaggtgagcctgctgaaggacgacctgcagggcgcccagagcgagatcgaggccaagcaggagatccagcacctgagaaaggagctgatcgaggcccaggagctggccagaaccagcaagcagaagtgcttcgagctgcaggccctgctggaggaggagagaaaggcctacagaaaccaggtggaggagagcaccaagcagatccaggtgctgcaggcccagctgcagagactgcacatcgacaccgagaacctgagagaggagaaggacagcgagatcaccagcaccagagacgagctgctgagcgccagagacgagatcctgctgctgcaccaggccgccgccaaggtggccagcgagagagacaccgacatcgccagcctgcaggaggagctgaagaaggtgagagccgagctggagagatggagaaaggccgccagcgagtacgagaaggagatcaccagcctgcagaacagcttccagctgagatgccagcagtgcgaggaccagcagagagaggaggccaccagactgcagggcgagctggagaagctgagaaaggagtggaacgccctggagaccgagtgccacagcctgaagagagagaacgtgctgctgagcagcgagctgcagagacaggagaaggagctgcacaacagccagaagcagagcctggagctgaccagcgacctgagcatcctgcagatgagcagaaaggagctggagaaccaggtgggcagcctgaaggagcagcacctgagagacagcgccgacctgaagaccctgctgagcaaggccgagaaccaggccaaggacgtgcagaaggagtacgagaagacccagaccgtgctgagcgagctgaagctgaagttcgagatgaccgagcaggagaagcagagcatcaccgacgagctgaagcagtgcaagaacaacctgaagctgctgagagagaagggcaacaacaagccctggccctggatgcccatgctggccgccctggtggccgtgaccgccatcgtgctgtacgtgcccggcctggccagagccagcccctag

SEQ ID NO: 170616 - DNA, 2436 bp, Artificial Sequence
  derived and/or modified sequence
atgccatccgcactggccatattcacatgtcgtcccaacagtcacccctttcaggagaggcacgtttacttggacgagcccatcaagattggtcggagcgtcgcccgctgccgccctgcacagaataatgctactttcgattgtaaagttctctcgcggaatcacgctctggtgtggttcgaccataaaaccggcaaattttacttacaggatacaaaatcaagcaacgggaccttcattaacagtcagaggctcagccgcggctccgaggagtcccccccatgcgaaatattgtctggggacattatccagttcggggtggatgtaaccgaaaacactagaaaggttacccacggttgcattgtgtccactatcaagctgttcctgcccgatggaatggaggcccgactgcgtagtgatgtaatccatgcgcccctaccatccccagttgacaaagttgccgccaatactccttccatgtactctcaggaactgttccagctgtctcaatatctgcaggaagccttgcatagggagcagatgctggagcagaagctagcgacccttcagaggctgcttgccataacacaggaagctagtgatacctcctggcaagccctgatcgatgaggacaggcttctctcccggttggaggtgatgggcaaccagttgcaagcatgctccaaaaaccagaccgaggattcactgcgcaaagagctgatcgcgttgcaggaggataagcacaattatgagacgaccgcaaaagagtcacttcggcgtgtccttcaagaaaagattgaagtcgtcagaaaactcagcgaggtggagcgctctctctcaaacacagaggatgagtgcacccatctcaaggaaatgaatgaaaggacacaggaggagctgagagagttagcaaataaatacaatggagccgtgaatgagatcaaggacttatcagataaacttaaggttgctgagggaaagcaagaagagatccagcagaagggccaagccgaaaagaaagaactgcagcacaagattgatgagatggaagagaaggagcaggagttgcaggccaaaatcgaagccttgcaggccgataacgacttcacaaacgagagactgaccgctctgcaagagcacttactgtctaaaagtgggggcgattgcacctttatccatcaatttattgagtgccagaagaaactaatcgttgaaggacacctaacaaaggctgtcgaggaaacaaaactgagtaaagagaaccagacaagagccaaggagtccgatttcagtgacaccctgtctccttctaaagagaagtcttcggacgataccacagatgcccaaatggacgaacaggacctgaacgaacctttggctaaggtgagtctgctcaaggacgacttacaaggcgcccagtcagaaatagaagccaagcaggagatacagcacctgagaaaagaactaattgaggcgcaggagctcgccagaacttccaaacaaaaatgtttcgaattacaagcactcctcgaagaggaacgtaaggcctacagaaaccaggtggaggaatcgacaaagcaaattcaagtcctccaggctcaactccagcgcttgcatatagacaccgaaaacctacgggaggagaaggattccgagatcacaagtacaagagatgaactcctgtcagctagggatgaaatcttgttgttgcatcaggcagccgccaaggtcgcgagcgagcgagacacggatattgcatccctccaggaggagctcaagaaagtccgagctgagctcgagcggtggagaaaggccgcgtccgaatacgagaaggagatcaccagcctccaaaactcattccaattacggtgtcagcagtgcgaagatcaacagagagaagaggcgactagactgcagggagaactcgaaaaactccgaaaagagtggaatgcactggagactgagtgccactcgctcaagcgcgaaaacgtactacttagctctgaacttcagcggcaggaaaaggagctgcacaattcccagaagcagagcctggagcttacgtctgacttaagcattctgcagatgtctaggaaagaacttgaaaaccaagtcgggagccttaaggagcaacacctgcgagactctgcggatcttaagacgctgctgtctaaggctgagaatcaagcaaaggacgtacagaaagaatacgagaagactcaaaccgtcctgagcgaactgaaactaaaatttgagatgacagaacaggagaagcagagtatcacggacgagctgaaacagtgcaagaacaacttgaaattgctgcgggagaaaggaaacaacaagccttggccatggatgccgatgctagctgcactagtggccgtgaccgctatcgtcctatacgtgccaggactcgccagagcttccccctag

SEQ ID NO: 170617 - DNA, 2436 bp, Artificial Sequence
  derived and/or modified sequence
atgccttctgcattagctattttcacctgccgccctaactcccacccatttcaggagcgccacgtgtacctggatgaaccgatcaagattggaagaagcgtagctaggtgtcggccagcgcaaaacaatgctaccttcgattgtaaggtgttgtctcgcaaccacgccttggtgtggtttgatcacaagaccggtaaattctatctgcaggacacgaagtctagcaacggaaccttcattaacagccagagactgagccgggggtccgaggaaagccctccctgcgaaattctgagtggcgatatcatccaattcggggtcgatgtgaccgagaacacacgcaaagttacccacggttgtatcgtgtctaccattaagctgtttctgcctgacggcatggaagccaggctgcgttcggatgtgatacatgcacccctcccatccccagtagataaagtggctgccaacacaccctccatgtacagccaagagctattccagctgagccagtacctgcaggaggctttgcacagggagcagatgttggaacagaagttggcaacgcttcagagactactggcaataacgcaggaggcctctgacacctcttggcaagcactgattgacgaggaccggctgctgtctagattagaggtcatgggcaaccagctccaggcgtgctcaaagaaccaaactgaagacagtctgcgaaaggaactaatcgccctgcaggaggacaaacacaattacgaaaccactgccaaagagtccctcagacgcgttctgcaagagaagatcgaagttgtgcggaagctcagcgaggttgaaagatccctgtccaatacagaggacgagtgcacccatttaaaagagatgaacgagaggactcaagaagagctgcgggagcttgctaataagtataacggcgcagttaatgaaatcaaagatctgtccgataaactgaaggtggctgagggaaaacaggaagaaatccaacagaagggccaggccgagaagaaggaactgcaacacaagatagatgagatggaggaaaaagagcaagagctgcaggccaagattgaagccctgcaggctgacaacgacttcacaaatgagcggttgaccgctcttcaggagcacctcctcagcaagagtgggggcgactgtacgtttatacatcagtttattgagtgccagaagaaattaattgtagaggggcacctaacaaaggctgtagaggaaaccaagctttccaaagagaaccagactcgcgctaaggaatcagatttttccgacactctgtcgccttccaaggagaagtcttcagatgacacgactgatgcacaaatggacgagcaggacctgaacgagcccctggcaaaagtttccttattaaaagatgatctgcagggagcgcagtccgagatcgaggccaaacaggagatccagcacctgagaaaagaactcatcgaggcgcaggagttggctcggacttctaagcagaagtgctttgaactgcaggcattgctcgaggaggagcgcaaggcttatcgcaaccaggtggaggagtcaacaaagcagatacaagtgctgcaggcacagctgcagcggttgcacattgacactgagaacctgagggaagaaaaggactccgaaatcacttctacacgagatgaattgttgtctgcccgggatgaaatactgctgttacaccaggcggctgccaaggttgccagtgagagagacacagatatcgcctctctacaagaagaactcaaaaaggttagagctgagctcgagagatggcgcaaggcggccagtgagtatgaaaaagaaataacaagtttacagaactcatttcaattgcgttgccagcagtgcgaagaccagcagcgggaagaagcaacaaggcttcagggtgagcttgagaaactccgcaaggagtggaatgctttggagaccgagtgtcactcacttaagcgcgaaaacgtactgctgagcagtgagctccagcgccaggaaaaggaattgcacaacagtcagaagcagtccctcgaactcactagcgatctttctatactgcagatgtctcggaaagaactagagaatcaggtcggcagcctaaaggagcagcacctccgcgatagcgccgatctcaagaccttgctgtctaaggcagagaatcaggccaaagatgtgcagaaggaatacgagaagacacaaacagtgctaagcgagctcaagctgaagtttgaaatgaccgagcaagagaagcagtccatcaccgacgagctgaagcagtgcaagaataatttaaagctgctccgagagaagggaaacaacaaaccgtggccctggatgcctatgcttgccgccttggtcgccgtgacagcgatagttttgtacgtgcctggcctggcaagagcaagcccctag

SEQ ID NO: 170618 - DNA, 2436 bp, Artificial Sequence
  derived and/or modified sequence
atgcccagcgccctggccatcttcacctgccggcccaacagccaccccttccaggagagacatgtgtacctggatgagcccatcaagattggccgctctgtggcccgctgcaggcctgcccagaacaatgccacctttgactgcaaggtgctgagcagaaatcatgccctggtgtggtttgaccacaagacaggcaagttctacctgcaggacaccaagagcagcaatggcaccttcatcaacagccagaggctgagccggggcagcgaggagagccccccctgtgagatcctgagcggggacatcatccagtttggagtggatgtgacagagaacaccaggaaggtgacccacggctgcatcgtgtccaccatcaagctgttcctgcctgatggcatggaggcccggctgcggagtgatgtgattcatgcccccctgcccagccctgtggacaaggtggccgccaacacccccagcatgtacagccaggagctgttccagctgagccagtacctgcaggaggccctgcaccgggagcagatgctggagcagaagctggccaccctgcagaggctgctggccatcacccaggaggccagtgacacctcctggcaggccctgattgatgaggaccggctgctgagccggctggaggtgatgggcaaccagctgcaggcctgcagcaagaaccagacagaggacagcctgaggaaggagctgattgccctgcaggaggacaagcacaactatgagaccacagccaaggagagcctgcggcgggtgctgcaggagaagattgaggtggtgaggaagctgtctgaggtggagaggagcctgagcaacacagaagatgaatgtacccacctgaaggagatgaatgaaagaacccaggaggagctgcgggagctggccaacaagtacaacggggctgtgaatgagatcaaggacctgagtgacaagctgaaggtggccgagggcaagcaggaggagatccagcagaagggccaggccgagaagaaggagctgcagcacaagattgatgagatggaggagaaggagcaggagctgcaggccaagattgaggccctgcaggccgacaatgacttcaccaatgaaaggctgacagccctgcaggagcacctgctgagcaagtctggaggagactgcaccttcatccaccagttcatcgagtgccagaagaagctgattgtggagggccacctgaccaaggctgtggaggagaccaagctgagcaaggagaaccagacccgggccaaggagagtgacttcagtgacaccctgagccccagcaaggagaagagcagtgatgacaccacagatgcccagatggatgagcaggacctgaatgagcccctggccaaggtgtccctgctgaaggatgacctgcagggcgcccagagcgagattgaggccaagcaggagatccagcacctgaggaaggagctgattgaggcccaggagctggcccggaccagcaagcagaagtgctttgagctgcaggccctgctggaggaggagaggaaggcctacagaaaccaggtggaggagagcaccaagcagatccaggtgctgcaggcccagctgcagaggctgcacatcgacacagagaacctgcgggaggagaaggacagcgagatcaccagcaccagagatgagctgctgagcgccagagatgagatcctgctgctgcaccaggccgccgccaaggtggccagcgagcgggacacagacatcgccagcctgcaggaggagctgaagaaggtgcgggcagagctggagcgctggaggaaggccgcctctgaatatgagaaggagatcaccagcctgcagaacagcttccagctgcgctgccagcagtgtgaggaccagcagcgggaggaggccacccggctgcagggcgagctggagaagctgaggaaggagtggaatgccctggagacagagtgccacagcctgaagcgggagaatgtgctgctgagcagcgagctgcagaggcaggagaaggagctgcacaacagccagaagcagagcctggagctgaccagtgacctgagcatcctgcagatgagcaggaaggagctggagaaccaggtgggcagcctgaaggagcagcacctgcgggacagcgctgacctgaagaccctgctgagcaaggccgagaaccaggccaaggatgtgcagaaggagtatgagaagacccagacagtgctgtctgagctgaagctgaagtttgagatgacagagcaggagaagcagagcatcacagatgagctgaagcagtgcaagaacaacctgaagctgctgcgggagaagggcaacaacaagccctggccctggatgcccatgctggccgccctggtggccgtgacagccatcgtgctgtatgtgcccggcctggcccgggccagcccctag

SEQ ID NO: 170619 - DNA, 2436 bp, Artificial Sequence
  derived and/or modified sequence
atgcccagcgccctggccatcttcacctgccggcccaacagccaccctttccaggaacgccacgtttacttggatgaacctatcaaaattggcaggtccgtggcccgatgtcggccagcacaaaacaacgctactttcgattgtaaagtgctgtccagaaaccatgctctggtatggttcgatcataaaacaggtaagttttatctgcaagacacaaaaagctcaaacgggaccttcattaattcacagcggctctcgagaggatccgaagaatcacctccatgtgaaatcctaagcggagacattatccaatttggtgtggacgtgacagagaacacacgaaaagtcactcacggctgtattgtttcgaccataaagttgttccttcctgacggcatggaggcccgtctgcgttcagacgtgatccatgcaccactcccaagccccgtggataaggtagccgctaataccccctccatgtactctcaagagctgtttcagctcagtcagtatctgcaggaagcgctccatagagagcaaatgttggagcagaagcttgccacgctccagaggctattagccatcacacaggaggcttctgataccagctggcaggctctaattgatgaggacaggctgctcagtcggttagaagttatgggaaaccagctgcaagcctgttccaagaaccaaactgaggatagcttacgcaaagaactgatagctctgcaggaagataagcacaattacgaaacaaccgccaaggaaagcctgaggagggtcctgcaggaaaagatagaggtcgtgcggaaactgagtgaggttgaacggagcctgagtaacacggaagacgagtgcactcacctcaaagaaatgaatgagcgcacacaagaggaactccgggaattggctaataagtacaacggggcagtgaacgaaattaaagacttgagtgataaacttaaagtcgcggaggggaaacaagaagagatccagcagaagggccaagccgagaagaaggagctgcagcacaaaatcgatgagatggaggaaaaagagcaggagctgcaagctaagatcgaggcgcttcaggcagacaatgacttcactaatgaacgccttactgcactgcaggaacatctgctttcaaagtcaggtggggactgtacttttattcaccagttcattgaatgtcaaaaaaagctgatcgtggaagggcacctcactaaagccgtagaggagacaaaattgtctaaggagaaccaaacccgagccaaggagtccgacttctcagatacgctctcaccgagtaaagagaagtccagcgacgacaccactgatgcccagatggatgagcaagacttgaatgaaccactggccaaagtctccctgctgaaggatgaccttcagggtgctcagtctgaaatcgaggctaagcaggagatccagcacctcagaaaggagctaatcgaggcccaggaattggcacgtacaagcaagcaaaaatgcttcgagttgcaagcactcctggaggaagagcgtaaggcttacaggaatcaggtcgaggaatccacaaagcagatccaggttttacaggctcagctacagcgtttgcacatagacaccgagaacctgcgagaggagaaagacagtgaaatcacaagcacccgcgacgagctgctgtcagctcgagatgaaatactcctcctccaccaggccgccgccaaggtagcctctgaacgggacacggatatagcttccctgcaggaagagctgaagaaagtccgcgccgaactggagcgctggcgcaaggccgctagcgaatacgaaaaagaaattacatccttgcaaaattccttccaactgcgatgtcagcagtgtgaagatcagcagcgagaggaggccactcgactccagggagagctggagaaactgcggaaggagtggaacgccctcgaaacagagtgccactctctgaagagggagaacgtactcctgtccagcgaactgcaacgtcaggagaaggagctccacaactcccagaagcagtctcttgaactcacatctgaccttagcattttgcagatgtccagaaaggaacttgaaaatcaagtgggatcgctgaaggagcagcatctcagagattccgctgacctcaaaactctcctgagcaaagccgaaaaccaggcaaaagacgtgcagaaagaatacgagaagacccaaactgtcctgtcagagctgaaactaaaattcgagatgacagaacaggagaagcagagcatcaccgacgagctgaagcagtgtaagaataacctgaaattgctgagggagaaggggaataacaaaccttggccttggatgccaatgctcgccgcccttgtcgcagtcacagctatcgtcttgtatgtgcctggactggccagagcaagtccctag

SEQ ID NO: 170620 - DNA, 2436 bp, Artificial Sequence
  derived and/or modified sequence
atgcccagcgccctggccatcttcacctgccggcccaacagccacccgtttcaggaacgccatgtgtatttggatgaaccaatcaaaattggtcgatccgtggcccgctgtagacctgcccagaataatgcaacgtttgactgcaaggtcctgtcacggaatcacgccttagtatggttcgatcataaaactgggaagttttacctgcaggacaccaagtctagcaacggcacctttattaactctcaaagattgtcgaggggctccgaggagtcacctccttgtgagatactgagcggggacatcatccagtttggggtcgatgtgactgaaaatacacgcaaagtgacgcacggatgcatcgtctccacgatcaagctgtttctgcccgacggcatggaggccaggctgaggtcggatgtcatccacgctcctttgccaagccctgtggacaaggtggccgcgaacacgcccagtatgtacagccaagagctgttccagctctcccagtacctgcaggaggctttgcacagggagcaaatgctcgaacagaaacttgccactctccagcgtctcctcgccataactcaggaggcctcagatacgagttggcaggctcttatagacgaggatagactgctgtctagactggaggtgatgggaaatcagctacaggcttgtagcaagaaccagacagaagatagcctgcggaaggagcttatcgctctccaagaagataagcacaattatgaaactactgctaaggagagcttgaggagggtgcttcaggagaagattgaggtggtgcggaagctgtccgaggttgagcgtagtttatccaatacggaggacgagtgtacacatttaaaggaaatgaacgaacgtacccaggaagagctgagagagctggccaacaaatacaacggcgctgtgaatgagatcaaggacctaagcgataagcttaaggtggcggaaggaaaacaggaagagatacagcaaaagggccaggccgagaaaaaagaactgcaacataagatagacgagatggaggagaaggagcaagagttgcaagctaagatcgaggctctgcaagccgacaacgactttacgaacgagagactaacggctctccaggagcatctcctgagtaagtctggaggagattgcacattcatacatcagtttatcgagtgccagaaaaagcttatagttgaagggcacctaaccaaggccgtggaggagacaaagctatctaaggagaaccagacccgggccaaggagtccgacttctctgacactctttcgccctcaaaagaaaaaagttccgacgacaccactgatgcccagatggatgaacaagacctgaacgagcctcttgcaaaagtttctctcttgaaagacgacttgcagggcgctcagtcagagattgaagcgaaacaggaaatccaacacctcagaaaagagctcatagaggcacaggagttggctcgcacttcgaaacagaaatgcttcgaattgcaggcactgctcgaggaggaacgtaaagcatacagaaatcaagtcgaggaaagcaccaagcagattcaggtgcttcaggctcaactgcaacggctgcacatagatacagaaaatctgagagaggagaaagatagcgagattacctctacaagggacgagctgctcagcgctagggatgaaatcttgctcctgcatcaagcggcggcgaaagtcgccagcgagagagacaccgatatcgcttccctgcaggaggaactgaaaaaagttcgtgccgaactggaaaggtggcggaaagcagcttccgagtatgagaaggagataaccagcctgcagaatagctttcaacttcgatgtcagcaatgtgaagaccagcaacgagaagaggccacccgacttcagggcgagctggaaaagttgagaaaggaatggaacgcactcgagaccgagtgccactctctcaaacgggaaaatgtactgctcagtagcgaactccaacggcaggagaaagaactccacaattcccagaagcaaagcctggagttgacttcagacctgtctattctgcagatgtcgcgtaaggagctggaaaaccaggtaggatcattaaaagagcaacacctccgcgattctgccgatcttaagaccctattaagtaaagccgagaaccaagctaaagatgttcaaaaggaatacgaaaaaacacaaacagtcctttcagaacttaagctcaagtttgaaatgaccgaacaggagaagcaatcgataactgatgagctcaagcagtgcaagaacaatctcaagctactccgggaaaaaggaaacaataagccatggccttggatgcccatgctggcagcactggtggccgtgacggcgatcgtcttgtacgtgccgggactggcccgggcatctccttag

SEQ ID NO: 170621 - DNA, 2436 bp, Artificial Sequence
  derived and/or modified sequence
atgccgtctgctttagccattttcacatgtcgccctaattcacaccctttccaggagcggcatgtatacttggatgaacctatcaagatcgggcgaagcgtcgcacgctgtcgcccagctcagaataatgctaccttcgattgcaaagtgctcagcaggaaccatgccctcgtgtggtttgatcacaaaactgggaagttctacctgcaggataccaagtcctcaaacggcacgttcattaactctcagcgactgtctcggggttcagaggagagtccaccctgtgagatactgagcggggacatcattcaatttggagtagacgtgactgagaatacaaggaaggtgacccacggctgtatcgtgagcactattaaactcttcctcccagatgggatggaggccagactgcggtccgacgtgatacatgcaccattgcctagcccagtcgataaggtcgcagcaaatacaccctccatgtactcacaagagctatttcagctgtcccaatacctccaggaggccttgcaccgcgaacagatgctggagcagaagttggccactcttcaacgactgttagccattacccaagaagcctcagacactagctggcaggcccttatcgatgaggatcgccttctgtctcgtctcgaagtcatgggcaatcagcttcaggcttgttctaagaatcagactgaagattccctcagaaaagaattgatcgcgctccaggaggacaaacataactacgagactacagcaaaggagagtctcagacgcgtactgcaggagaaaatagaggttgtgcgtaagttgtccgaggttgagcgcagcttatctaacacagaggacgaatgcacccatctgaaggagatgaatgagcgcacacaggaggaactgcgggagcttgccaataagtacaacggtgcagtgaacgagatcaaggatttaagcgataaacttaaagttgccgaaggcaagcaggaggaaatccaacagaaaggccaggcagaaaagaaagagttacagcataagatagacgaaatggaagaaaaggagcaggaactgcaggcaaaaatcgaggctctacaggctgacaatgacttcacaaatgagcggttaacagccttgcaggagcatctgctcagtaagagcggcggagactgtacctttatccaccaattcatagagtgccagaaaaagttgattgtggaggggcacttgaccaaggcagtagaggaaaccaagctgtcaaaggagaatcagaccagagccaaggagtccgacttctctgataccctctcgcctagtaaggagaagagctccgacgataccactgacgctcaaatggacgagcaggatctgaatgagccactggccaaggttagcctattgaaagatgatcttcagggagcacagagcgagattgaagccaagcaagagattcagcatctgagaaaggaactcatcgaggcgcaagaactagctcgaactagtaagcagaagtgttttgagctccaagcactcttggaggaggagcgtaaagcgtaccggaatcaggttgaggagtccaccaagcaaatccaggtcttacaggctcagctccaacgtctgcacatagatacagagaaccttcgggaagaaaaggactccgaaatcacaagcacgagggacgagctactatctgcacgtgacgagattctgctgctccaccaagctgcggctaaagtggcttctgagcgcgatacagatattgctagtctccaggaggagctgaaaaaagtacgcgcagagttagagaggtggcgaaaagctgctagcgagtacgagaaggagattacgtctctgcaaaattcatttcaactgaggtgccagcaatgcgaggatcagcagcgggaggaagctacccggcttcaaggcgaactggagaaactacgcaaggaatggaacgctttggaaacggagtgccattctttgaaaagggagaatgtgctcttgtcctctgagttacagcggcaggaaaaagaactgcataattctcagaaacagagcctggagctgacaagcgatcttagcatactacaaatgagtcggaaggaactcgagaaccaagtgggaagtcttaaggaacagcacctgagagactcggcagatctaaagactctcctttcaaaagcagagaatcaggcgaaggatgtgcagaaggagtacgagaaaacacagactgtcctgtctgagcttaagctcaaattcgagatgaccgagcaagagaagcagagcattactgacgagttaaagcaatgcaagaataatctgaagctactgagggaaaaaggcaataataagccctggccctggatgccgatgttagcagccctggtggctgtaacagccatagtgctttacgtacccggattggcgcgagcgagtccatag

SEQ ID NO: 170622 - DNA, 2436 bp, Artificial Sequence
  derived and/or modified sequence
atgcccagcgctctcgccatcttcacctgccgcccaaattcccatcccttccaggaacgccacgtctacctagacgagcccataaagatcggacgctctgtggccagatgcagacctgcgcagaataacgctacctttgattgtaaggttctatccaggaatcatgcattagtgtggttcgaccataagacagggaagttttacttgcaggatacaaaaagttccaatgggactttcattaatagtcagagattatcccggggaagcgaagaaagtcctccatgtgagattctctcaggcgatatcattcaattcggagtggacgtgaccgagaatacaagaaaggttacccacgggtgcatagtttccacaatcaagctatttctgccagatggcatggaagctcggcttcgatcagacgtgattcacgcccctctaccaagtccggttgataaggtggcggcaaacacaccttcaatgtattcacaagaactgtttcagttgtcccagtacctgcaggaagcactccacagagagcaaatgcttgagcaaaaactcgccacactgcaacggttactggccatcactcaggaggcatcagacacatcctggcaggcgttgatcgatgaagataggctgctaagcagactcgaggtgatggggaatcagcttcaggcttgctctaaaaaccagaccgaggattcccttcgcaaagaactgatcgccctccaggaggacaagcacaattatgaaacaaccgctaaggaaagcttaagaagggtattgcaggagaaaatcgaggtggtgagaaagctttccgaggtggaaaggtcgctaagtaacactgaggatgaatgcacccacctcaaggaaatgaatgaacggactcaggaagaactgcgcgagttagcaaataagtataatggggctgtcaatgagatcaaggacctaagtgataagctgaaagtggctgagggaaaacaggaagaaattcagcagaagggacaggccgagaaaaaggaactccagcataaaattgatgagatggaggagaaggagcaggaactccaagcgaagatagaggcactgcaggccgataacgatttcaccaacgaacgactcacagccctacaggaacatctgctgtctaagagcggtggagattgcactttcatacaccagttcatcgagtgccagaagaaactgatcgtggagggacatcttacaaaagccgtggaggaaaccaagttaagtaaggaaaaccaaactcgcgctaaggaaagtgacttttccgatactctcagcccttcaaaggaaaaatcctccgacgatactacagatgcccaaatggacgagcaagatctgaatgaaccactcgcaaaggtgtcactgcttaaggacgatctgcaaggagcccaatctgaaatcgaggcaaaacaggaaatacagcacctgagaaaggagcttattgaggcgcaggaactggcccgtacctccaagcaaaagtgtttcgaactgcaggcactcctggaagaagaacgcaaggcatatcgaaaccaggtggaagaaagcaccaaacagatacaggttctgcaagctcagcttcaacgtctccacattgatacagagaacctccgtgaggagaaggattccgagataacatccacacgcgatgaactgctctcagctcgggacgaaatcctactgctgcaccaggcagccgctaaggtggcctcagaaagggataccgacatcgctagccttcaagaggagctgaaaaaagtccgggcagagctcgagagatggaggaaggctgcgagcgaatacgaaaaggagatcacctcactgcagaattcctttcagctaaggtgtcagcagtgcgaggatcaacagagggaagaggcaacccgccttcaaggcgagctggaaaaactgcgaaaagagtggaatgcactcgaaactgaatgtcattccctgaaaagggagaacgtcttattgagcagtgagctccagcgccaggagaaggaactccataactcccaaaagcaatctctggagcttacttccgatctcagtatccttcagatgtcacgcaaagaattagagaatcaggtaggatcccttaaggaacaacatctgcgtgatagcgcagatctgaaaacactgctgtcaaaagcagaaaaccaagccaaggacgttcagaaagaatacgaaaagacccagactgtcctctctgagctcaaactgaagttcgagatgacagagcaggagaagcaaagcattactgacgagcttaaacagtgtaagaacaacctgaagttactcagagaaaaaggtaataataagccttggccatggatgccaatgttagccgcactggtcgctgtcacagcgatagttctctacgtgcctggcctcgctcgggctagcccttag

SEQ ID NO: 170623 - DNA, 5433 bp, Artificial Sequence
  derived and/or modified sequence
ctggactacggcgcgggagagggggtaggagggcccttgaagggtgcgcgttcccgtggcggtgcaccgggtaggtttcagtcagagtcactatggcggccggcgctggcaaggtcggaaagtttcctgcctcgtcgggcgcagcttgagcttgccccatcggccgcgatcggtggaggctgcggcggatccagcccggggcctcaaggcctctccccaacctccgggccagtctccctcccccaccttctcgtccgccgggagctgcggctgccgtccctgagatgcgaccctcgcgggggcgaccctgaggggaggcggcccatgtgctgagcggcggcccagaagcctaggcgtccggggaccaacttcctgccgcctgggaactcgagcctcccggtgtcgcgcctcgctcggtccgcaccggcctgcggagccgggtccccgccctggtcgcggggacgctcgccaggtgcccaggagtcccgacttggccactgcccgcgccccgccggcctccacgcctcgcgcggagaacctcagccaccgccgtctcggatcgtgccaggccggggaccgcgtcccccttcccggggcggcctccgctcagcaggggcgatgcagactgtcccgccggccgtctagagcccctccgtctccgtcacctctcgccccttcactccgggcgaggactggcggtggctgcccagaggtgcccagccacaccttccttcggcccaaaaggactttcctggccgcgccgaaccgacccttcattcatgctgcagtgctgcaacgtttccgccaccaagggggaaaagcggccgcgatctcaaaccaaacacaagaattggcgtgtgactcatctgcttggatacctccagtccccaaactgtgttccaggagttttcttggccgaagctgcccgatgtttgagccttttcttcccagagaagaagatggactgaaagctgccagttggggactttttgtgatcacggcgttgcagcgttttaaaggaggtgatggggcttgcgctggcttgtcttcccacccaagtgaagagttgatgttcactggttatgcttagacaatgtgcagtttgtgttaatttaaaattttgggtgggataggggcataggcttgtgaagggcagtccggatccggaggaactcctctttgtccctggtaggagagacacccccagtctatcctcgatgccgtcagccttggccatcttcacttgccgcccgaactcgcacccgtttcaggagcgtcatgtctacctggacgagcccatcaaaatcggccgctcagtggcccgctgtcgaccagcgcagaataatgccacttttgattgcaaagtgctatcaaggaaccacgctctcgtctggtttgatcacaagacgggcaagttttatcttcaagacactaaaagtagtaatggtacttttataaatagccagagattgagtcgaggctctgaagaaagtccaccatgtgaaattctttccggtgacattatccagtttggagtagacgtgacagagaatacacggaaagttacccatgggtgtattgtttccacaataaaactttttctaccagatggtatggaagcccggctccgctcagatgtcatccatgcaccattaccaagtcctgttgacaaagttgctgctaacactccaagtatgtactctcaggaactattccagctttctcagtatctacaggaggccttacatcgggaacaaatgttggaacagaagttagccacgcttcagcggctactagccatcacccaagaggcttcagataccagttggcaggctttaatagatgaagatagactcttatcacggttagaagttatgggaaaccaattacaggcatgctccaaaaatcaaacagaagatagtttacgaaaggaacttatagcattacaagaggataaacataactatgagacaacagccaaagagtccctgaggcgggttcttcaggagaaaattgaagtggttagaaaactttcagaagttgagcgaagtctgagtaatactgaagatgaatgtacccatctgaaagaaatgaatgaaaggactcaggaagaattaagagaattagccaacaaatataatggagcagttaatgagattaaagatttatctgataaattaaaggtagcagagggaaaacaagaggaaatccaacagaagggacaggctgagaaaaaagaattacaacataaaatagatgaaatggaagaaaaagaacaggagctccaggcaaaaatagaagctttgcaagctgataatgatttcaccaatgaaaggctaacagctttacaagagcacttgctttcaaagagtggcggggactgcacttttattcatcaattcatagaatgccagaagaagctgatcgtcgaagggcatctaaccaaagcggtagaagaaacaaagctttcaaaagaaaatcagacaagagcaaaagaatctgatttttcagatactctgagtccaagcaaggaaaaaagcagtgacgacactacagacgcccaaatggatgagcaagacctaaatgagcctcttgccaaagtgtcccttttaaaagatgacttgcagggtgcacagtcagaaattgaggcaaagcaagaaatacagcatcttcgaaaggaattgatcgaagcccaggagctagctagaacaagtaaacaaaaatgctttgaacttcaagctcttttggaagaagaaagaaaagcctatcgaaatcaagttgaggaatccactaaacaaatacaggttcttcaagcccaattgcagaggttacacatcgatactgagaatctccgggaggagaaggacagtgaaatcacaagtactagagatgaattgcttagtgcccgagatgaaattttgctccttcatcaagcagcagcaaaggttgcctctgagcgggacactgacattgcttctttacaagaagagcttaagaaggtgagagctgagcttgagcggtggcggaaagcagcgtctgaatatgagaaagaaatcacaagtctgcaaaacagttttcagcttagatgtcaacagtgtgaggaccagcagagagaagaagcaacaaggttgcaaggtgaactagagaagttgagaaaggaatggaatgcattggaaaccgaatgccattctctaaaaagggaaaatgttttgctatcatcagaactgcaacggcaagaaaaagaattgcacaattctcagaagcagagtttagagcttaccagtgatctcagcatccttcaaatgtctaggaaagaacttgagaatcaagtgggatccttgaaagaacagcatcttcgggattcagctgatttaaaaactcttctcagtaaggcagaaaaccaagcaaaggatgtgcagaaagagtatgaaaagacacagactgtactctcagaactgaagttgaagtttgaaatgactgagcaggaaaagcagtcaatcacagatgagctcaaacagtgtaaaaacaacctgaagctgctccgagagaaaggaaataataaaccctggccctggatgcccatgttggctgccctggttgcagtaacagccatcgtgctgtacgtgccaggtctggccagagcttctccatgagagcgttccttgagtccgtacaccgtcctccctctagaagctggcatcacactcatgctggggacaaacagaaccattttcttcctctttacctcttaaaacagcagaagtacaagaatacagctgtagggtcattgctttaaattatataaaatgtatctgtctataaagaagatataaaattgtgactttattctactgtaagcaataatttgcttgcaatttttcatgtaatttttaaattagtatgttaagattctgaatattatggtggcctaaagtaggcttcttggtacaccagattatttataacattaaatttatgagtattttactctgaattctgatcaccagataattcatttttctgatttgataactacccaaaccaaacaaccaatacatacatgggaagagaggccctgtgtgctcagtgcctatcagtttgaaatatatacacatatatatattttttacatatttacgccatttttacttgttatgaaaccactgagctattgggaacaagacttagagacaactatttgcgtggatttttttttttttaaggaaaaatacgtttggaaaataaactgttatggtgataatttggggaatatgtgcacgcttgttcagccttaatgtgacttgaagatgtggaggacatcaactttgaaaaactttccatgagagtgtattttcttgagcaaactgaagtatttctgggagcaaaaacatagtaattacacaatttcagtgcagtcaaccaaaatgttgagtcaattggaatgtaatttattaaaccatgtatttaaagagatatttttctttaaaagccaagttactttctcatatacagcattttaggaagcatgattttttttttctatcatctattcctccaagcatgtttaattgaagaaagtattaatatctctttagataagcttgtattgacctaatttggtttatgatgtgtcagagctaattcatgttcagggtgagcgttgtacctaccaacaaatttcctggttgggtatgcaaatggttattttctttttattgttgttaattgggactttctgttaatgaaaagcactattcccaagattaatagtgttctatgcacaatgaagcacctaaaaacactgcttgatattataaatttaaaacacaagtgaaagtttagccatggttttgtgcggcatcatagttatgtcaataaagtttatttaggtcatagaatatcctaaagtatcacatagttaaatttttcagtcagtgaagaccgggagggaatgtcagtgaattggcttgaatgttctgtggcaatccacaggtctagccaaatattgaaataggagtttagggtataatttgccttgtgatgtttggcagtcactgtttatactttaaaggttatattttaagctatttgagattgcttttgggaagatcactagatttatggaggaattagtcacaaatgacttgtagaaaatactgtcatatagttcatttcatcattttctgttgcaggaagccactccaccacagaatgctaatatgccagtggtacccagtacctcttgtatataggttattgcaaatattgttctgaaatgcttaacttcagaattacattttttaaagtaaataattgttttaaatctattttgtaaagatataaagtacaatagaatttctggagtacagattaaactatttgcactaacacacgtgacgtgcatgatttaataaaataactttactctcccta

SEQ ID NO: 170624 - DNA, 4420 bp, Artificial Sequence
  derived and/or modified sequence
tttaaaggaggtgatggggcttgcgctggcttgtcttcccacccaagtgaagagttgatgttcactggttatgcttagacaatgtgcagtttgtgttaatttaaaattttgggtgggataggggcataggcttgtgaagggcagtccggatccggaggaactcctctttgtccctggtaggagagacacccccagtctatcctcgatgccgtcagccttggccatcttcacttgccgcccgaactcgcacccgtttcaggagcgtcatgtctacctggacgagcccatcaaaatcggccgctcagtggcccgctgtcgaccagcgcagaataatgccacttttgattgcaaagtgctatcaaggaaccacgctctcgtctggtttgatcacaagacgggcaagttttatcttcaagacactaaaagtagtaatggtacttttataaatagccagagattgagtcgaggctctgaagaaagtccaccatgtgaaattctttccggtgacattatccagtttggagtagacgtgacagagaatacacggaaagttacccatgggtgtattgtttccacaataaaactttttctaccagatggtatggaagcccggctccgctcagatgtcatccatgcaccattaccaagtcctgttgacaaagttgctgctaacactccaagtatgtactctcaggaactattccagctttctcagtatctacaggaggccttacatcgggaacaaatgttggaacagaagttagccacgcttcagcggctactagccatcacccaagaggcttcagataccagttggcaggctttaatagatgaagatagactcttatcacggttagaagttatgggaaaccaattacaggcatgctccaaaaatcaaacagaagatagtttacgaaaggaacttatagcattacaagaggataaacataactatgagacaacagccaaagagtccctgaggcgggttcttcaggagaaaattgaagtggttagaaaactttcagaagttgagcgaagtctgagtaatactgaagatgaatgtacccatctgaaagaaatgaatgaaaggactcaggaagaattaagagaattagccaacaaatataatggagcagttaatgagattaaagatttatctgataaattaaaggtagcagagggaaaacaagaggaaatccaacagaagggacaggctgagaaaaaagaattacaacataaaatagatgaaatggaagaaaaagaacaggagctccaggcaaaaatagaagctttgcaagctgataatgatttcaccaatgaaaggctaacagctttacaagagcacttgctttcaaagagtggcggggactgcacttttattcatcaattcatagaatgccagaagaagctgatcgtcgaagggcatctaaccaaagcggtagaagaaacaaagctttcaaaagaaaatcagacaagagcaaaagaatctgatttttcagatactctgagtccaagcaaggaaaaaagcagtgacgacactacagacgcccaaatggatgagcaagacctaaatgagcctcttgccaaagtgtcccttttaaaagatgacttgcagggtgcacagtcagaaattgaggcaaagcaagaaatacagcatcttcgaaaggaattgatcgaagcccaggagctagctagaacaagtaaacaaaaatgctttgaacttcaagctcttttggaagaagaaagaaaagcctatcgaaatcaagttgaggaatccactaaacaaatacaggttcttcaagcccaattgcagaggttacacatcgatactgagaatctccgggaggagaaggacagtgaaatcacaagtactagagatgaattgcttagtgcccgagatgaaattttgctccttcatcaagcagcagcaaaggttgcctctgagcgggacactgacattgcttctttacaagaagagcttaagaaggtgagagctgagcttgagcggtggcggaaagcagcgtctgaatatgagaaagaaatcacaagtctgcaaaacagttttcagcttagatgtcaacagtgtgaggaccagcagagagaagaagcaacaaggttgcaaggtgaactagagaagttgagaaaggaatggaatgcattggaaaccgaatgccattctctaaaaagggaaaatgttttgctatcatcagaactgcaacggcaagaaaaagaattgcacaattctcagaagcagagtttagagcttaccagtgatctcagcatccttcaaatgtctaggaaagaacttgagaatcaagtgggatccttgaaagaacagcatcttcgggattcagctgatttaaaaactcttctcagtaaggcagaaaaccaagcaaaggatgtgcagaaagagtatgaaaagacacagactgtactctcagaactgaagttgaagtttgaaatgactgagcaggaaaagcagtcaatcacagatgagctcaaacagtgtaaaaacaacctgaagctgctccgagagaaaggaaataataaaccctggccctggatgcccatgttggctgccctggttgcagtaacagccatcgtgctgtacgtgccaggtctggccagagcttctccatgagagcgttccttgagtccgtacaccgtcctccctctagaagctggcatcacactcatgctggggacaaacagaaccattttcttcctctttacctcttaaaacagcagaagtacaagaatacagctgtagggtcattgctttaaattatataaaatgtatctgtctataaagaagatataaaattgtgactttattctactgtaagcaataatttgcttgcaatttttcatgtaatttttaaattagtatgttaagattctgaatattatggtggcctaaagtaggcttcttggtacaccagattatttataacattaaatttatgagtattttactctgaattctgatcaccagataattcatttttctgatttgataactacccaaaccaaacaaccaatacatacatgggaagagaggccctgtgtgctcagtgcctatcagtttgaaatatatacacatatatatattttttacatatttacgccatttttacttgttatgaaaccactgagctattgggaacaagacttagagacaactatttgcgtggatttttttttttttaaggaaaaatacgtttggaaaataaactgttatggtgataatttggggaatatgtgcacgcttgttcagccttaatgtgacttgaagatgtggaggacatcaactttgaaaaactttccatgagagtgtattttcttgagcaaactgaagtatttctgggagcaaaaacatagtaattacacaatttcagtgcagtcaaccaaaatgttgagtcaattggaatgtaatttattaaaccatgtatttaaagagatatttttctttaaaagccaagttactttctcatatacagcattttaggaagcatgattttttttttctatcatctattcctccaagcatgtttaattgaagaaagtattaatatctctttagataagcttgtattgacctaatttggtttatgatgtgtcagagctaattcatgttcagggtgagcgttgtacctaccaacaaatttcctggttgggtatgcaaatggttattttctttttattgttgttaattgggactttctgttaatgaaaagcactattcccaagattaatagtgttctatgcacaatgaagcacctaaaaacactgcttgatattataaatttaaaacacaagtgaaagtttagccatggttttgtgcggcatcatagttatgtcaataaagtttatttaggtcatagaatatcctaaagtatcacatagttaaatttttcagtcagtgaagaccgggagggaatgtcagtgaattggcttgaatgttctgtggcaatccacaggtctagccaaatattgaaataggagtttagggtataatttgccttgtgatgtttggcagtcactgtttatactttaaaggttatattttaagctatttgagattgcttttgggaagatcactagatttatggaggaattagtcacaaatgacttgtagaaaatactgtcatatagttcatttcatcattttctgttgcaggaagccactccaccacagaatgctaatatgccagtggtacccagtacctcttgtatataggttattgcaaatattgttctgaaatgcttaacttcagaattacattttttaaagtaaataattgttttaaatctattttgtaaagatataaagtacaatagaatttctggagtacagattaaactatttgcactaacacacgtgacgtgcatgatttaataaaataactttactctccct

SEQ ID NO: 170625 - protein, 312 aa, Artificial Sequence
  derived and/or modified sequence
MVNQSSTPGFLLLGFSEHPGLERTLFVVVLTSYLLTLVGNTLIILLSALDPKLHSPMYFFLSNLSFLDLCFTTSCVPQMLVNLWGPKKTISFLDCSVQIFIFLSLGTTECILLTVMAFDRYVAVCQPLHYATIIHPRLCWQLASVAWVIGLVESVVQTPSTLHLPFCPDRQVDDFVCEVPALIRLSCEDTSYNEIQVAVASVFILVVPLSLILVSYGAITWAVLRINSAKGRRKAFGTCSSHLTVVTLFYSSVIAVYLQPKNPYAQERGKFFGLFYAVGTPSLNPLIYTLRNKEVTRAFRRLLGKEMGLTQS

SEQ ID NO: 170626 - protein, 312 aa, Artificial Sequence
  derived and/or modified sequence
MVNQSSTPGFLLLGFSEHPGLERTLFVVVFTSYLLTLVGNTLIILLSVLDPKLHSPMYFFLSNLSFLDLCFTTSCVPQMLVNLWGPKKTISFLDCSVQIFIFLSLGTTECILLTVMAFDRYVAVCQPLHYATIIHPRLCWQLASVAWVIGLVESVVQTPSTLHLPFCPDRQVDDFVCEVPALIRLSCEDTSYNEIQVAVASVFILVVPLSLILVSYGAITWAVLRINSAKGRRKAFGTCSSHLTVVTLFYSSVIAVYLQPKNPYAQERGKFFGLFYAVGTPSLNPLIYTLRNKEVTRAFRRLLGKEMGLTQS

SEQ ID NO: 170627 - protein, 312 aa, Artificial Sequence
  derived and/or modified sequence
MVNQSSTPGFLLLGFSEHPGLERTLFVVVFTSYLLTLVGNTLIILLSALDPKLHSPMYFFLSNLSFLDLCFTTSCVPQMLVNLWGPKKTISFLDCSVQIFIFLSLGTTECILLTVMAFDRYVAVCQPLHYATIIHPRLCWQLASVAWVIGLVESVVQTPSTLHLPFCPDRQVDDFVCEVPALIRLSCEDTSYNEIQVAVASVFILVVPLSLILVSYGAITWAVLRINSAKGRRKAFGTCSSHLTVVTLFYSSVIAVYLQPKNPYAQERGKFFGLFYAVGTPSLNPLIYTLRNKEVTRAFRRLLGKEMGLTQS

SEQ ID NO: 170628 - DNA, 939 bp, Artificial Sequence
  derived and/or modified sequence
atggtgaaccagagcagcacccccggcttcctgctgctgggcttcagcgagcaccccggcctggagagaaccctgttcgtggtggtgctgaccagctacctgctgaccctggtgggcaacaccctgatcatcctgctgagcgccctggaccccaagctgcacagccccatgtacttcttcctgagcaacctgagcttcctggacctgtgcttcaccaccagctgcgtgccccagatgctggtgaacctgtggggccccaagaagaccatcagcttcctggactgcagcgtgcagatcttcatcttcctgagcctgggcaccaccgagtgcatcctgctgaccgtgatggccttcgacagatacgtggccgtgtgccagcccctgcactacgccaccatcatccaccccagactgtgctggcagctggccagcgtggcctgggtgatcggcctggtggagagcgtggtgcagacccccagcaccctgcacctgcccttctgccccgacagacaggtggacgacttcgtgtgcgaggtgcccgccctgatcagactgagctgcgaggacaccagctacaacgagatccaggtggccgtggccagcgtgttcatcctggtggtgcccctgagcctgatcctggtgagctacggcgccatcacctgggccgtgctgagaatcaacagcgccaagggcagaagaaaggccttcggcacctgcagcagccacctgaccgtggtgaccctgttctacagcagcgtgatcgccgtgtacctgcagcccaagaacccctacgcccaggagagaggcaagttcttcggcctgttctacgccgtgggcacccccagcctgaaccccctgatctacaccctgagaaacaaggaggtgaccagagccttcagaagactgctgggcaaggagatgggcctgacccagagctag

SEQ ID NO: 170629 - DNA, 939 bp, Artificial Sequence
  derived and/or modified sequence
atggtcaatcaaagcagcactccgggatttctgctgttaggattctcggagcacccaggcctcgagcgcaccttattcgtggtggttctcaccagttacttgctcacccttgtggggaatactctgattatattattatctgccctcgaccccaaattgcattctcctatgtatttttttctgtccaacctgagtttcctggacctatgcttcacgactagctgtgtcccacaaatgttggtcaacctctgggggcccaaaaagacaatctctttccttgattgttcagtgcaaatctttatctttctcagcttggggacaaccgagtgtatcctgctgaccgtgatggcctttgatcgctacgtggctgtctgccagccgcttcactatgccacgatcattcaccctagactgtgttggcagctggccagcgtcgcctgggttatcgggctcgtggagtccgtcgttcaaaccccaagtaccctccacttacccttttgccctgaccgccaagtggacgatttcgtgtgtgaggtccctgcattgatccgcctctcatgtgaggataccagctataacgagatccaggtggccgtcgcctctgtatttatcttggtggtcccactgagcctcattctggtctcctacggcgctattacttgggcggtgcttcggattaattcggcgaaaggccgacggaaggcctttgggacctgcagttcccacctaaccgtagtaacgttgttttattccagtgttatcgccgtgtacctgcagccaaaaaatccatacgcccaagagcgggggaagttcttcggcttgttctacgccgtgggcacgccgtctctaaatcccctaatttatactcttaggaataaggaggtgacccgagcctttcgcagactgctggggaaagagatgggtctcactcagtcttag

SEQ ID NO: 170630 - DNA, 939 bp, Artificial Sequence
  derived and/or modified sequence
atggtgaatcagagcagtacacctggctttctactacttggattctcagaacacccaggccttgaacgcactctgttcgtggtcgtgctcacgtcctacctcctgaccttggtgggcaacaccctcattatcctactgtctgccttagatcccaaattgcacagcccaatgtattttttcctctccaacttgtctttcttagacctgtgtttcaccacgagctgtgtaccccagatgctggtcaacctgtggggcccgaaaaagacaatctctttcctggattgtagcgtgcagatattcatttttctgagcctgggaactacagaatgcatccttctgaccgtgatggcattcgaccgatatgtggcagtgtgccagcctttgcattacgctaccatcattcaccctcgcttatgttggcaactggcctctgtcgcttgggttattggactagtggagagcgtcgtgcaaacaccatccaccttacatctcccattctgccctgaccgtcaggtggacgactttgtttgcgaagtcccggccctgataagactttcatgtgaggacacttcctacaatgaaattcaggtggccgttgcttctgtctttattctggtcgtgcctctttcgcttatcttagttagctacggtgccattacttgggcagtccttaggatcaactccgctaagggccggaggaaggctttcgggacatgtagctcccatctgaccgttgtgaccctcttctatagcagcgtaatcgcagtgtaccttcagcccaaaaatccatatgcacaggaacggggtaaattcttcggcctattctacgccgtggggacgccttctttgaatcctctgatatacactttgaggaacaaggaggtgacacgtgccttcagaagactgctcggaaaggagatgggcctgactcagagctag

SEQ ID NO: 170631 - DNA, 939 bp, Artificial Sequence
  derived and/or modified sequence
atggtaaatcagagttccactccaggattcctactgttggggttttcagaacaccccgggctcgagagaacgttgtttgttgtggtcctgaccagttacctgctcacgctagtcggaaacacactgataattctgctcagcgcactggacccaaaacttcactcaccgatgtactttttcttgagcaatctgtccttcttagatctatgtttcactacctcctgtgtacctcagatgttggtgaatctctggggtccaaaaaaaactatctccttcttagattgcagcgtgcaaattttcatttttctttctctggggactacggaatgcattctgctaacagtgatggccttcgacagatatgtcgccgtttgtcagccgctgcattacgcaacaatcatccatcctcgcctctgttggcagctcgcaagtgtggcatgggtgattgggctcgtcgaatcggtggtccagacaccatccacgctccacctgcccttctgtccggaccgccaagttgacgatttcgtttgtgaagtgccagccctgattcgactctcttgcgaagacactagttacaatgagatccaggttgctgttgcctcagtgttcatcttggtggtgccactcagcctcatcttagtcagttacggtgctattacatgggctgttctgcggattaatagtgcaaaaggcagacgaaaagccttcggtacctgttccagccacctgaccgtggtaaccttattttacagtagtgtgatcgctgtttatctgcagcccaagaatccttacgcccaggaacggggaaagttctttgggctgttttacgctgtgggtacacccagtctcaaccctttgatttacacccttaggaacaaggaagtaacaagagcctttcgaagactcctgggaaaggaaatgggcctcacgcagtcatag

SEQ ID NO: 170632 - DNA, 939 bp, Artificial Sequence
  derived and/or modified sequence
atggtgaaccagagcagcaccccaggcttcctgctgctgggcttcagcgagcaccctggcctggagaggaccctgtttgtggtggtgctgaccagctacctgctgaccctggtgggcaacaccctcatcatcctgctgagcgccctggaccccaagctgcacagccccatgtacttcttcctgagcaacctgtccttcctggacctgtgcttcaccaccagctgtgtgccccagatgctggtgaacctgtggggccccaagaagaccatctccttcctggactgcagcgtgcagatcttcatcttcctgagcctgggcaccacagagtgcatcctgctgactgtgatggcctttgacagatatgtggccgtgtgccagcccctgcactacgccaccatcatccacccccggctgtgctggcagctggcctctgtggcctgggtgattggcctggtggagagcgtggtgcagacccccagcaccctgcacctgcccttctgcccagaccggcaggtggatgactttgtgtgtgaggtgcctgccctgatccggctgagctgtgaggacaccagctacaatgagatccaggtggccgtggcctctgtgttcatcctggtggtgcccctgagcctcatcctggtgtcctatggagccatcacctgggccgtgctgcgcatcaacagcgccaagggccgcaggaaggccttcggcacctgcagcagccacctgactgtggtgaccctcttctacagctctgtgattgctgtgtacctgcagcccaagaacccctatgcccaggagcggggcaagttcttcggcctcttctatgctgtgggcacccccagcctgaaccccctcatctacaccctgaggaacaaggaggtgacccgggccttccggcggctgctgggcaaggagatgggcctgacccagagctag

SEQ ID NO: 170633 - DNA, 1063 bp, Artificial Sequence
  derived and/or modified sequence
tgacagcctcatccctccaggtacaaacaagaacaggccatggttaaccaaagctccacaccgggcttcctccttctgggcttctctgaacacccagggctggaaaggactctcttcgtggttgtcctcacttcctacctcctaaccctagtgggcaacacactcatcatcctgctgtctgcgctggaccccaagctccactctccaatgtactttttcctctccaacctctccttcttggacctctgtttcaccacgagttgtgttccccaaatgctggtcaacctctggggcccaaagaagaccatcagcttcctggactgctctgtccagatcttcatcttcctgtccctggggacaactgagtgcatcctcttgacagtgatggcttttgatcgctacgtggctgtctgccagcccctccactatgccaccatcatccacccccgcctgtgctggcagctggcatctgtggcctgggtcattgggctagtggagtcagtggtccagacaccatccaccctgcacctgcccttctgccccgatcggcaggtggatgattttgtctgtgaggtcccagctctaattcgactctcctgtgaagacacctcctacaatgagatccaggtggctgttgccagtgtcttcatcttggttgtgcctctcagcctcatccttgtctcttacggagccattacctgggcagtgctgaggattaactctgcaaaagggcggaggaaagcttttgggacctgctcctcccatctcactgtggtcaccctcttctacagctcagtcattgctgtctacctccagcccaaaaatccctatgcccaagagaggggcaagttctttggtctcttctatgcagtgggcactccttcacttaaccctctcatatacaccctgaggaacaaggaggtaaccagggcattcaggagattgctggggaaggaaatggggctcacacaaagctgagggagagctgcttaatgtgctttaaaagagaggagattctatgtgcttttatcagaaagtttgagttccctgcccctctgccttc

SEQ ID NO: 170634 - DNA, 939 bp, Artificial Sequence
  derived and/or modified sequence
atggtgaaccagagcagcacccccggcttcctgctgctgggcttctctgaacacccaggtctggaaaggactttgttcgtggtggtgctcacatcttatctgctgacgctggtgggaaacaccctcattatcctcttatctgccctggacccaaaattacactccccaatgtacttctttctgtccaacctgagcttcctggatttgtgctttacaacatcatgtgtgccacagatgttggtcaatctgtggggtccaaagaagactatttctttcctagattgttcagtgcagatatttattttcttatctcttgggaccactgaatgtatactcctgacagtgatggcctttgacaggtacgtcgccgtgtgtcaaccacttcattacgctacaataattcaccccagactgtgttggcaactggcgtcagtggcatgggttatcgggctagttgagtccgtggtgcaaaccccaagtaccctgcacctgcccttttgtcctgatcgccaggttgacgattttgtatgtgaggtgcctgctcttataaggctgtcatgcgaggataccagttacaacgaaatccaagtcgcggtcgcgagcgttttcattctggtcgtgcccctgagtctcattcttgtcagttacggggcaatcacctgggctgttctgaggatcaactcagctaagggccggcgcaaagctttcggcacatgcagctcacatctgaccgtggtgactctcttctattcctctgttattgccgtatatctacaaccaaaaaatccatacgcacaggaacgggggaagttcttcggcctgttttatgccgttgggacccccagtctcaaccctctaatctacacactgcgcaataaagaggtgacacgggcctttcggcgcttgctgggcaaggaaatggggttgacccagtcttag

SEQ ID NO: 170635 - DNA, 939 bp, Artificial Sequence
  derived and/or modified sequence
atggtgaaccagagcagcacccccggcttcctgctgctgggcttctcagaacatccgggactggaacgtacacttttcgtcgtggtgctgaccagctacctgctcactcttgtcggcaataccttgatcattcttcttagtgccctggatcccaagttacatagtcctatgtacttcttcttgtctaacctctcctttctggacctttgctttaccacctcttgcgtgcctcagatgctggtcaatttgtggggccccaagaaaacgattagtttcctggattgcagtgttcaaattttcatctttttaagcctgggtaccactgagtgtatattgctgaccgtcatggccttcgatcggtatgtcgctgtttgtcagccacttcattacgctaccatcatacaccctaggctgtgttggcagctcgcgtccgtggcctgggtgatcggtctcgtagaatctgtagtgcaaaccccttctactcttcatctccctttctgtccagaccgtcaggtcgatgactttgtatgtgaggtaccggcactcatacggctgagttgtgaagacactagctacaatgagatacaggtggctgtggcttctgtgttcattctagtggtacctctctctctgatcctcgtatcatacggcgccatcacgtgggcagtcctcaggattaattctgcaaaagggaggcgcaaagcctttgggacctgctcgtctcatctgacagtcgtcacccttttttatagcagtgtcatcgccgtctacctccagccgaagaatccttatgctcaggaacgcgggaaattttttggacttttctatgccgtgggaaccccctctctgaacccgctgatttacaccctaagaaacaaggaagtcactcgggcctttcgacgtctgcttggcaaggagatgggtttaactcaatcctag

SEQ ID NO: 170636 - DNA, 939 bp, Artificial Sequence
  derived and/or modified sequence
atggtgaaccagagcagcacccccggcttcctgctgctgggcttcagtgaacatccaggtctggaaaggacgctcttcgtggtcgtgttaacgtcttacctgcttacgctggtcgggaacacattaataatcctgctgagcgctctggatcccaagctacactctcccatgtacttctttctctcaaatttgtcatttctggacctgtgcttcaccactagctgcgtccctcaaatgctggtgaacctctggggccccaagaaaaccatatcctttcttgactgcagtgtgcagatttttatattcctgagtctgggtaccactgaatgcattctcctgaccgttatggcatttgaccgatacgtggcagtctgtcagccactccattatgccacgattatccaccccaggctgtgctggcaacttgcgtctgtggcctgggtgatcggactagttgagtcagtggtgcaaaccccttccactctccacttacccttttgccccgatcgccaggtcgacgattttgtatgtgaggtgcccgctcttatccgcctgtcttgtgaagacacctcctacaatgagatccaggtggccgtggcctctgtgtttatcttagttgtccctctcagcctgattctggtctcttacggggccatcacatgggccgtcttgcggatcaatagtgccaaaggtaggcgaaaggcgtttggcacttgcagttcccacctcaccgtggtgactcttttttattcttcagttatcgcggtatatttacagcccaagaacccctacgcacaagagcggggaaaattcttcgggctgttctatgcggttgggacaccttctctgaatcctcttatctacacactcagaaacaaggaggtgacccgggccttcagaagactgttaggaaaggagatgggcctcactcagtcatag

SEQ ID NO: 170637 - DNA, 939 bp, Artificial Sequence
  derived and/or modified sequence
atggttaaccagtcatccaccccagggtttctgctgttgggattctctgagcatcccggtctggaacgcacattgtttgtggtagttctgacttcatacctcttgacactggtgggaaataccctcatcattctgttgtctgccctggatccaaaattgcattcacccatgtatttctttctcagtaacctctcctttctcgatctgtgcttcactactagctgtgttccacagatgctggtgaatctgtggggcccaaagaagacaatctcttttcttgactgtagtgtgcagatcttcattttcctgagcctgggaacgacagagtgtatactgctaacagttatggccttcgatcgctatgtcgcagtatgccagcccctacactacgccacaattattcatccgcgtttgtgttggcaacttgcaagcgtggcgtgggtcatcggcctcgtagagagtgtggtgcaaaccccatccacactccaccttcccttttgcccagataggcaggtcgacgattttgtctgcgaagtgccagcactgatccgcttaagctgtgaagacacatcctacaacgagatccaggtagcagttgcctctgtctttattcttgtggtaccgttgagcctaatcctggtttcttacggggcaatcacttgggctgtccttagaattaactctgctaagggcagaaggaaggcttttgggacttgtagcagtcatctgactgttgtgacactgttctactctagcgtgattgctgtgtacctccaacccaaaaatccctacgcgcaggaacgtggcaagttcttcgggctcttctatgctgtcggcacaccttcccttaatcctctgatttacactctgcggaataaggaagtgacccgggctttccgtcgccttctaggaaaggaaatgggtctgacccagtcctag

SEQ ID NO: 170638 - DNA, 939 bp, Artificial Sequence
  derived and/or modified sequence
atggtcaatcagtctagcacccccggatttcttctgctgggcttttcagaacatcccggtctggagaggactttgttcgtcgttgtcctgacaagttacctgctaaccctggtcggcaacaccctaatcatcttgctcagtgctctggatccaaaactacatagtcccatgtatttcttcttgtccaatttgtccttcttggacttgtgttttaccaccagctgcgtgccgcagatgttagttaacctgtggggccctaagaaaactataagctttctggactgttctgtgcagattttcatattcctgtctctaggaacgaccgaatgcatactgctgactgtgatggcctttgaccgctacgtcgcagtttgtcagccattgcactatgcaaccattatccatccccgactgtgttggcagctggccagcgtggcctgggtgataggtttagtggagagcgtcgttcagacgccctccacactacatctgccattttgcccagaccgccaagtggacgatttcgtttgcgaggtccctgctctgatccgtctctcctgcgaggatactagctataacgaaatccaagtggcggttgcatccgttttcatcttagtagtcccactgtctcttatattggtgagttacggtgccatcacatgggccgttctgcggatcaatagcgccaaagggaggcgcaaagcctttgggacctgctccagccatctcactgtggtgaccctgttctatagttccgtcatcgccgtgtacttgcaacccaaaaatccgtacgctcaggaacgcggaaagttcttcggacttttctatgccgtagggaccccttcgctgaatcctctcatttacacactcagaaacaaggaggtaacgagggcgtttagaaggctgctggggaaggagatgggactgacccaatcctag

SEQ ID NO: 170639 - DNA, 939 bp, Artificial Sequence
  derived and/or modified sequence
atggtgaatcagtccagcactccgggatttttgctgctaggatttagcgagcatccgggattggagcgaacactgttcgtagtggtactcacatcctatctcctaacactggtggggaacacactgataatcttgctgtcggccctggatcctaagttacacagtccaatgtacttcttcttaagcaacctgagcttcctagacctctgtttcactaccagctgtgtcccccagatgctcgtgaacctctgggggccaaagaagacgatctcgtttctagattgcagtgtgcagatctttattttcctgtcgctgggaactacagaatgcatccttcttactgtgatggccttcgatagatatgtcgcagtgtgccaacccctgcactacgcaaccatcatacatcctagactctgctggcaactcgcttcggtggcctgggtgattggtctcgtggagagcgtagtccagaccccatctacactgcacctgcccttctgtccagatcgacaggtggacgattttgtgtgcgaagtgcctgctctgatcagattgtcttgtgaggacacatcctacaacgaaatccaggttgcagtggcatcagtgttcatcctcgtagtgcccctgtctctgattctggtctcatacggtgctattacgtgggccgtcctgcgaataaattcggctaagggccgtcggaaagcattcggcacttgtagttcgcacctgacggttgttacactcttctattcctcagtgattgcagtgtatctgcaaccgaaaaatccgtacgcccaggagcgtggaaaattcttcggcttgttctacgcagtgggaacaccatctctaaaccccctcatctatacactcagaaataaggaagtgacccgagcctttcgacgactgctcggaaaggagatgggcctcactcagtcctag

SEQ ID NO: 170640 - DNA, 939 bp, Artificial Sequence
  derived and/or modified sequence
atggtgaaccagagcagcacccccggcttcctgctgctgggcttcagcgagcaccccggcctggagagaaccctgttcgtggtggtgttcaccagctacctgctgaccctggtgggcaacaccctgatcatcctgctgagcgtgctggaccccaagctgcacagccccatgtacttcttcctgagcaacctgagcttcctggacctgtgcttcaccaccagctgcgtgccccagatgctggtgaacctgtggggccccaagaagaccatcagcttcctggactgcagcgtgcagatcttcatcttcctgagcctgggcaccaccgagtgcatcctgctgaccgtgatggccttcgacagatacgtggccgtgtgccagcccctgcactacgccaccatcatccaccccagactgtgctggcagctggccagcgtggcctgggtgatcggcctggtggagagcgtggtgcagacccccagcaccctgcacctgcccttctgccccgacagacaggtggacgacttcgtgtgcgaggtgcccgccctgatcagactgagctgcgaggacaccagctacaacgagatccaggtggccgtggccagcgtgttcatcctggtggtgcccctgagcctgatcctggtgagctacggcgccatcacctgggccgtgctgagaatcaacagcgccaagggcagaagaaaggccttcggcacctgcagcagccacctgaccgtggtgaccctgttctacagcagcgtgatcgccgtgtacctgcagcccaagaacccctacgcccaggagagaggcaagttcttcggcctgttctacgccgtgggcacccccagcctgaaccccctgatctacaccctgagaaacaaggaggtgaccagagccttcagaagactgctgggcaaggagatgggcctgacccagagctag

SEQ ID NO: 170641 - DNA, 939 bp, Artificial Sequence
  derived and/or modified sequence
atggtgaaccagagcagcacccccggcttcctgctgctgggcttcagcgagcaccccggcctggagagaaccctgttcgtggtggtgttcaccagctacctgctgaccctggtgggcaacaccctgatcatcctgctgagcgccctggaccccaagctgcacagccccatgtacttcttcctgagcaacctgagcttcctggacctgtgcttcaccaccagctgcgtgccccagatgctggtgaacctgtggggccccaagaagaccatcagcttcctggactgcagcgtgcagatcttcatcttcctgagcctgggcaccaccgagtgcatcctgctgaccgtgatggccttcgacagatacgtggccgtgtgccagcccctgcactacgccaccatcatccaccccagactgtgctggcagctggccagcgtggcctgggtgatcggcctggtggagagcgtggtgcagacccccagcaccctgcacctgcccttctgccccgacagacaggtggacgacttcgtgtgcgaggtgcccgccctgatcagactgagctgcgaggacaccagctacaacgagatccaggtggccgtggccagcgtgttcatcctggtggtgcccctgagcctgatcctggtgagctacggcgccatcacctgggccgtgctgagaatcaacagcgccaagggcagaagaaaggccttcggcacctgcagcagccacctgaccgtggtgaccctgttctacagcagcgtgatcgccgtgtacctgcagcccaagaacccctacgcccaggagagaggcaagttcttcggcctgttctacgccgtgggcacccccagcctgaaccccctgatctacaccctgagaaacaaggaggtgaccagagccttcagaagactgctgggcaaggagatgggcctgacccagagctag

SEQ ID NO: 170642 - DNA, 939 bp, Artificial Sequence
  derived and/or modified sequence
atggtgaaccagtcgagcactcccggtttcctgctgctgggctttagcgagcaccctggccttgagcggacactctttgtcgtggtattcacatcttatctgctcacactggtgggaaatacactgattatactgcttagtgtactggacccaaagctccacagcccaatgtacttttttctttctaacctgagctttctggatctgtgctttacgactagttgtgtgccccagatgctggtaaacctttggggcccgaagaaaacaatttccttcctcgattgtagcgtgcaaattttcatatttctcagccttgggacaaccgaatgtattcttctcaccgtaatggcctttgaccgctatgttgccgtctgccagcccctgcactacgccacaataatccatcctcggctgtgctggcaactggcctcagtggcgtgggtgatcggactggtagaaagcgtcgtgcagacccccagcacactgcaccttcccttttgtcctgacaggcaggtcgacgacttcgtgtgcgaggtgcccgcacttatacggctcagctgtgaagacacaagctacaacgagattcaggtcgccgtcgcctccgtgtttatcctggtagtgcctctgagcctgatcctcgtcagctacggggcgatcacctgggccgtacttaggattaatagcgccaagggtagacggaaagcattcggcacttgtagttcacacttaaccgtggtcacattattctacagctccgttattgcagtgtatctgcaaccaaagaacccctacgcccaggaaaggggcaagttcttcggccttttttacgctgtgggcaccccatcactgaacccactcatctataccctgaggaacaaggaggtgacccgggctttcagacgactgttgggaaaagaaatgggactgacccaatcatag

SEQ ID NO: 170643 - DNA, 939 bp, Artificial Sequence
  derived and/or modified sequence
atggtcaatcaatctagcacccctggttttctcttactgggcttcagtgaacaccctggactagagcggacgcttttcgttgtggtgtttacatcctatctactgactctggtcgggaacactctgataatcttgctttccgcactcgaccccaagttacactctccaatgtacttcttcctctccaacctaagcttcctggatctttgtttcacaacgtcctgcgttcctcagatgctggttaatctgtgggggccaaagaaaactatttcctttcttgattgttctgtccaaattttcatctttctcagcctcggaacaaccgagtgtatcctgttgacagtcatggcttttgaccgatacgtagcagtttgtcagcctctccattacgctaccattattcacccccggttgtgctggcaactcgcttcggtggcatgggtcatcggtcttgtggaaagcgtagtccagactccttctaccttacacctacctttttgtccggaccgccaggtagatgatttcgtgtgcgaagttcccgcactgatacgcctttcttgtgaagatacgtcttacaatgagatccaggtggctgttgccagcgtcttcattctggtggtgcccttgtcactgattttggtgagctacggcgccattacttgggcggtactgaggattaactccgccaagggaaggcgcaaagcatttgggacttgcagctcccacctaactgtggtcaccctgttttactcatccgtgatcgctgtttacctccagccaaaaaacccatacgcgcaagagagaggaaaattctttggcctgttctatgccgtgggaacaccaagcttgaatcctttgatctatactcttcgaaataaggaagtcacccgtgcttttcggagactactcggaaaggagatggggctgacgcagtcttag

SEQ ID NO: 170644 - DNA, 939 bp, Artificial Sequence
  derived and/or modified sequence
atggttaaccaaagctctactcccggattcctgttgcttggattttcagaacaccctgggctggaaaggacgctctttgtagttgtatttacctcctatctgctgactcttgtcggtaacacacttatcattttattaagtgtgctggacccgaagctgcactcacccatgtactttttcttatccaatctgtcctttctggacctttgtttcacgacaagctgtgtgccacagatgttagtgaatctatggggaccaaaaaagacaatctcctttttggattgttctgttcagatctttatctttctatctttggggaccacagagtgtattctgcttaccgttatggcattcgaccgctacgtggcagtgtgccagcccctacattatgccactataattcacccacgtctctgctggcagctggcttctgtcgcttgggtgattggcctggttgaatcagtggtgcaaacaccatccacgttgcacctccccttctgtccagatcgccaggttgacgattttgtgtgtgaagtgcctgcactcatccgtctgagttgcgaagacaccagctataacgaaatacaggtggccgtggcctcggtgtttatactggtagtacctttgtctttgatcctcgtttcatacggagcgatcacatgggccgtgctgcggataaattctgcgaagggacggagaaaagcctttggcacatgcagttctcacctcacagtagtgaccttgttttacagttctgttatcgccgtgtacttgcaacccaagaacccctatgcccaagaaagggggaaattttttggtctcttctacgccgttggaactcctagcctgaaccctttaatttatacactacggaataaggaagttacgcgcgcttttaggagattactggggaaggaaatggggctgacacagagttag

SEQ ID NO: 170645 - DNA, 939 bp, Artificial Sequence
  derived and/or modified sequence
atggtgaatcagtccagcaccccaggctttttactcttgggcttcagcgaacatccagggcttgaaagaaccctgtttgtggtcgtgtttacgtcctatctgcttacactggtcggcaacacccttatcattttgctgtctgtgctggatcctaaacttcattcgcccatgtatttttttctgtcaaacctgagcttccttgatctgtgctttactaccagctgcgttcctcagatgcttgtgaatctgtggggacccaagaaaaccatctcctttctggactgctccgtacagattttcattttcctcagcttaggaaccactgaatgcattctgctgacagtgatggcctttgacaggtatgtggccgtgtgccaacctctgcattatgctacaatcatccatcctagactctgctggcagctcgcctctgtggcctgggtaatcggtctggtagaatccgtggtgcagactccatccacactccacttgcctttttgccctgacaggcaggtggatgacttcgtgtgcgaggtccctgcgttgatacgtctctcttgtgaagataccagctataatgaaattcaggtcgccgtcgcaagtgtgtttatccttgtggtccccctaagtctgatacttgtgagttatggcgccatcacatgggctgttcttcgtattaacagcgcaaagggccggcgaaaagccttcggtacgtgctcttcgcacctaactgtggtaactctgttctactcatccgtaattgccgtatacttacagcctaagaacccctacgcccaggaaagaggcaagttcttcggcctgttttatgcagtgggcactccttcactcaacccgctaatctacactctcaggaacaaggaggtgacgcgtgcattccgccgattattggggaaggagatgggtctgacccagtcatag

SEQ ID NO: 170646 - DNA, 939 bp, Artificial Sequence
  derived and/or modified sequence
atggtgaaccagagcagcaccccaggcttcctgctgctgggcttcagcgagcaccctggcctggagaggaccctgtttgtggtggtgttcaccagctacctgctgaccctggtgggcaacaccctcatcatcctgctgtctgtgctggaccccaagctgcacagccccatgtacttcttcctgagcaacctgtccttcctggacctgtgcttcaccaccagctgtgtgccccagatgctggtgaacctgtggggccccaagaagaccatctccttcctggactgcagcgtgcagatcttcatcttcctgagcctgggcaccacagagtgcatcctgctgactgtgatggcctttgacagatatgtggccgtgtgccagcccctgcactacgccaccatcatccacccccggctgtgctggcagctggcctctgtggcctgggtgattggcctggtggagagcgtggtgcagacccccagcaccctgcacctgcccttctgcccagaccggcaggtggatgactttgtgtgtgaggtgcctgccctgatccggctgagctgtgaggacaccagctacaatgagatccaggtggccgtggcctctgtgttcatcctggtggtgcccctgagcctcatcctggtgtcctatggagccatcacctgggccgtgctgcgcatcaacagcgccaagggccgcaggaaggccttcggcacctgcagcagccacctgactgtggtgaccctcttctacagctctgtgattgctgtgtacctgcagcccaagaacccctatgcccaggagcggggcaagttcttcggcctcttctatgctgtgggcacccccagcctgaaccccctcatctacaccctgaggaacaaggaggtgacccgggccttccggcggctgctgggcaaggagatgggcctgacccagagctag

SEQ ID NO: 170647 - DNA, 939 bp, Artificial Sequence
  derived and/or modified sequence
atggtgaaccagagcagcaccccaggcttcctgctgctgggcttcagcgagcaccctggcctggagaggaccctgtttgtggtggtgttcaccagctacctgctgaccctggtgggcaacaccctcatcatcctgctgagcgccctggaccccaagctgcacagccccatgtacttcttcctgagcaacctgtccttcctggacctgtgcttcaccaccagctgtgtgccccagatgctggtgaacctgtggggccccaagaagaccatctccttcctggactgcagcgtgcagatcttcatcttcctgagcctgggcaccacagagtgcatcctgctgactgtgatggcctttgacagatatgtggccgtgtgccagcccctgcactacgccaccatcatccacccccggctgtgctggcagctggcctctgtggcctgggtgattggcctggtggagagcgtggtgcagacccccagcaccctgcacctgcccttctgcccagaccggcaggtggatgactttgtgtgtgaggtgcctgccctgatccggctgagctgtgaggacaccagctacaatgagatccaggtggccgtggcctctgtgttcatcctggtggtgcccctgagcctcatcctggtgtcctatggagccatcacctgggccgtgctgcgcatcaacagcgccaagggccgcaggaaggccttcggcacctgcagcagccacctgactgtggtgaccctcttctacagctctgtgattgctgtgtacctgcagcccaagaacccctatgcccaggagcggggcaagttcttcggcctcttctatgctgtgggcacccccagcctgaaccccctcatctacaccctgaggaacaaggaggtgacccgggccttccggcggctgctgggcaaggagatgggcctgacccagagctag

SEQ ID NO: 170648 - DNA, 939 bp, Artificial Sequence
  derived and/or modified sequence
atggtgaaccagagcagcacccccggcttcctgctgctgggcttcagcgaacacccagggttggaacgaaccctattcgtggttgtgttcacctcttaccttcttacgctggtgggaaataccctgatcatcctgctcagtgtgcttgaccctaagctccatagcccaatgtactttttcctgtcaaacctgtcctttctggatctctgttttaccacatcttgcgtcccccagatgctggtcaatctctggggccccaaaaaaactatcagctttctagactgtagcgtgcagatatttattttcctatctttaggcacaaccgaatgtatcctgctgaccgttatggcgtttgacaggtacgtcgccgtgtgtcagcctctacactacgcaaccatcatacaccccagactctgctggcagttagcatctgttgcatgggtgatcggtctggtcgaaagcgtcgtccagacgccctctacgttacacctgccattctgtccggacaggcaggttgacgattttgtatgcgaagtacccgccctgatacgactgagttgtgaggataccagttacaatgagatacaggtcgcagttgcctccgtttttatactcgtcgtacctttatccctgattctagtgtcttacggggcgataacctgggcagtgctcagaataaactcagcaaaggggcggcggaaagccttcggaacttgttcctctcatctcaccgtggtgacgctgttttattcctctgtgatcgctgtgtacctgcaacccaagaacccatacgcccaggagcgggggaagtttttcggccttttttatgcagtagggacccctagcctgaaccctcttatctacaccctgcggaataaggaagtgaccagggccttccgacgactcctcggaaaagaaatgggtttaacacagagctag

SEQ ID NO: 170649 - DNA, 939 bp, Artificial Sequence
  derived and/or modified sequence
atggtgaaccagagcagcacccccggcttcctgctgctgggcttctctgagcatcctggattggaacggaccttgttcgtcgtggtgttcaccagctatctactgactctggtggggaatacccttataattctcctgtccgccctagatccaaagctgcattcccccatgtatttttttctctccaatctctcttttctggatctgtgtttcaccacatcctgtgtgccccagatgttggttaacctatgggggccaaagaagacaatttcttttttggactgcagcgtgcagatttttattttcctctccctgggcactactgaatgtatattgctgacagtgatggcctttgatcgctacgtggctgtgtgccagccactgcattacgctacaataatccacccccggctgtgctggcagcttgcaagcgttgcctgggtgatagggctcgttgagtcagtagttcaaacccctagcaccctccatctgcctttttgtcccgaccgccaggtcgacgatttcgtttgtgaggtgcctgcgttgatacgcctgagctgtgaggacacctcatacaatgaaattcaggtcgcggtggcctctgtatttatcctggtggtgccactatcacttattcttgtgtcctacggagccatcacttgggcggtgctgcggattaacagcgcgaaaggccgcaggaaagcattcggcacttgcagtagtcacctcacagtggtaactctattctattctagcgttatagcagtctacctccagcccaaaaacccctatgcgcaggagcgtggcaagttttttggactgttctacgccgttggcacaccgtctctgaatcctctgatttatacactccggaataaggaggtaacgcgtgcatttagaagactgctaggaaaagagatgggtctgacacagagctag

SEQ ID NO: 170650 - DNA, 939 bp, Artificial Sequence
  derived and/or modified sequence
atggtgaaccagagcagcacccccggcttcctgctgctgggcttctcagaacatcccgggttggaacggactctgttcgtagtggtgtttacgagctacctcctcactcttgtgggtaatactctgatcatcctgctgtcagttctggatcccaagctgcactcacccatgtattttttcctgtcgaacctgtcatttctggacctctgctttacaacctcatgtgtgccccagatgctggtaaatctttggggacctaagaaaacaattagcttcctggattgctcagtgcagatatttatctttttgtcattaggaactactgagtgcatattgcttactgttatggcctttgatagatacgttgctgtttgccagccccttcattatgccacaatcatccacccacggttgtgctggcagcttgcctctgttgcttgggtcatcggcttggtcgaatccgtggttcagacccctagcacgcttcacctgccattttgccccgataggcaggtagacgactttgtatgcgaagtgcctgcattaattagactgtcctgcgaagatacttcttataatgaaattcaggtggcagtcgcttccgtgttcatcctcgtcgtgccactgtcgctgattctggtgagctacggtgccatcacttgggcagtgctaaggatcaatagcgccaagggccgtcgcaaggcgttcgggacctgcagctcccatctgacagtggtgactctgttttacagcagtgtgattgccgtgtatctgcaaccaaagaatccttacgctcaggagcgagggaagttcttcggcttgttttacgccgtgggaacaccctctcttaatcctttgatctatactctgagaaataaggaggtgacccgcgccttcagacgccttctggggaaggagatgggactgacacagagttag

SEQ ID NO: 170651 - DNA, 939 bp, Artificial Sequence
  derived and/or modified sequence
atggtgaaccagagcagcacccccggcttcctgctgctgggcttcagcgaacaccccggactggagcggaccctcttcgtggtcgtgttcacaagctacttgctcactctagtaggtaataccctgataatcctcctcagcgtcctggacccgaaactgcatagtcctatgtacttttttcttagcaacctgtcttttcttgatctgtgtttcacaacatcttgtgtgccccaaatgttggtaaatctgtggggaccaaaaaaaaccatttcctttcttgattgttccgttcaaattttcatctttctatctcttggcacaaccgaatgcatcttattgaccgtgatggcctttgatcgatatgtggctgtttgccagccgttgcattacgccaccatcatacacccgagactttgttggcagttagccagtgtcgcctgggttatcggtctcgttgaaagcgtggtccaaaccccgtcaaccctgcatctgcctttttgcccagaccgccaggtggatgacttcgtctgtgaggttcccgccctcatccgcttgagctgcgaggatacgtcatacaacgagattcaggttgctgtcgccagcgttttcattttagtcgtcccactgagcttgattttagtgagctacggagctatcacatgggcggtcctccgcatcaatagcgcgaaaggtcgcaggaaagctttcggcacttgtagctctcaccttactgtggtaacccttttttatagctccgttatcgctgtatacctccaacctaagaacccttacgctcaggaaaggggaaaattttttggcctgttctatgcagtgggtacccctagcctgaacccgttgatctataccctgcggaataaggaggtgacccgagcgtttcgtcgtctgctagggaaggagatgggactgacacagagctag

SEQ ID NO: 170652 - DNA, 1063 bp, Artificial Sequence
  derived and/or modified sequence
tgacagcctcatccctccaggtacaaacaagaacaggccatggttaaccaaagctccacaccgggcttcctccttctgggcttctctgaacacccagggctggaaaggactctcttcgtggttgtcttcacttcctacctcctaaccctagtgggcaacacactcatcatcctgctgtctgtgctggaccccaagctccactctccaatgtactttttcctctccaacctctccttcttggacctctgtttcaccacgagttgtgttccccaaatgctggtcaacctctggggcccaaagaagaccatcagcttcctggactgctctgtccagatcttcatcttcctgtccctggggacaactgagtgcatcctcttgacagtgatggcttttgatcgctacgtggctgtctgccagcccctccactatgccaccatcatccacccccgcctgtgctggcagctggcatctgtggcctgggtcattgggctagtggagtcagtggtccagacaccatccaccctgcacctgcccttctgccccgatcggcaggtggatgattttgtctgtgaggtcccagctctaattcgactctcctgtgaagacacctcctacaatgagatccaggtggctgttgccagtgtcttcatcttggttgtgcctctcagcctcatccttgtctcttacggagccattacctgggcagtgctgaggattaactctgcaaaagggcggaggaaagcttttgggacctgctcctcccatctcactgtggtcaccctcttctacagctcagtcattgctgtctacctccagcccaaaaatccctatgcccaagagaggggcaagttctttggtctcttctatgcagtgggcactccttcacttaaccctctcatatacaccctgaggaacaaggaggtaaccagggcattcaggagattgctggggaaggaaatggggctcacacaaagctgagggagagctgcttaatgtgctttaaaagagaggagattctatgtgcttttatcagaaagtttgagttccctgcccctctgccttc

SEQ ID NO: 170653 - DNA, 1063 bp, Artificial Sequence
  derived and/or modified sequence
tgacagcctcatccctccaggtacaaacaagaacaggccatggttaaccaaagctccacaccgggcttcctccttctgggcttctctgaacacccagggctggaaaggactctcttcgtggttgtcttcacttcctacctcctaaccctagtgggcaacacactcatcatcctgctgtctgcgctggaccccaagctccactctccaatgtactttttcctctccaacctctccttcttggacctctgtttcaccacgagttgtgttccccaaatgctggtcaacctctggggcccaaagaagaccatcagcttcctggactgctctgtccagatcttcatcttcctgtccctggggacaactgagtgcatcctcttgacagtgatggcttttgatcgctacgtggctgtctgccagcccctccactatgccaccatcatccacccccgcctgtgctggcagctggcatctgtggcctgggtcattgggctagtggagtcagtggtccagacaccatccaccctgcacctgcccttctgccccgatcggcaggtggatgattttgtctgtgaggtcccagctctaattcgactctcctgtgaagacacctcctacaatgagatccaggtggctgttgccagtgtcttcatcttggttgtgcctctcagcctcatccttgtctcttacggagccattacctgggcagtgctgaggattaactctgcaaaagggcggaggaaagcttttgggacctgctcctcccatctcactgtggtcaccctcttctacagctcagtcattgctgtctacctccagcccaaaaatccctatgcccaagagaggggcaagttctttggtctcttctatgcagtgggcactccttcacttaaccctctcatatacaccctgaggaacaaggaggtaaccagggcattcaggagattgctggggaaggaaatggggctcacacaaagctgagggagagctgcttaatgtgctttaaaagagaggagattctatgtgcttttatcagaaagtttgagttccctgcccctctgccttc

SEQ ID NO: 170654 - DNA, 939 bp, Artificial Sequence
  derived and/or modified sequence
atggttaatcagagctctacaccaggcttcttgctgctgggattcagcgaacatcccggactcgaaagaacactgttcgttgtcgtttttacgtcgtatctgttgaccctggtgggaaacacactcatcattctactgtctgtactggaccccaagctccacagtccaatgtacttctttctgagtaacctgtcttttctggatctctgctttaccacaagctgtgtaccccagatgctcgtcaatctgtggggtcctaagaaaacaatcagcttcctggactgttccgtgcagatatttattttcctttccctgggaacaaccgaatgtatcttgctgacagttatggcttttgatcgctacgtggccgtgtgtcagcccctgcattacgctactatcatccatccccgactgtgttggcagttggccagtgtggcatgggtcatcgggctggttgaaagtgttgtccaaactccctctactttgcatctgcctttctgtcccgacaggcaggtggatgatttcgtgtgcgaggtgccggcactgatccggctttcttgtgaggacaccagctacaacgagatccaggtcgctgttgccagcgttttcatacttgtggtgccactgagtctgattctggttagctacggcgctattacatgggccgtactaagaataaacagcgcgaaaggtcgcagaaaagctttcggtacctgctcatcgcatttgaccgtcgtgacactattttatagttcggttattgccgtctatctccagcccaagaacccttatgcccaagagcgcggaaagttttttggactcttttatgccgttggcactccaagcctgaacccactcatctataccctcaggaataaggaggtcacgagagcctttcgacggctcctcggcaaggaaatgggcctgacccagagctag

SEQ ID NO: 170655 - DNA, 939 bp, Artificial Sequence
  derived and/or modified sequence
atggtgaaccagtcgtcaacaccgggattcctacttctgggattttccgaacatccagggctagaacgcactctattcgtggtggtctttaccagttaccttctgacactcgttgggaataccttgattattttgctatctgcactggatccaaagctgcatagcccgatgtacttttttttatccaacctgtcgtttctggatctctgtttcacaacctcttgcgtgccccaaatgttagtcaacctgtggggcccaaagaagacaatatccttcctggattgctctgtgcaaatcttcatcttcctgtcattgggaaccacagaatgtattcttcttaccgttatggctttcgaccgctatgtggccgtgtgccagcccttgcactacgctactataattcaccccagactatgctggcaattagccagcgtggcttgggttatcggcctagttgaatccgttgtacagaccccatcaactttgcatctgcccttctgccccgaccgacaggtggatgatttcgtatgcgaggtgccagcactgatccggctgagttgtgaagacactagttacaatgagatccaagtcgctgtggcctcagtgtttatcctcgtcgtgcccctgtcactaatcttagtcagttacggcgcaataacatgggctgtcctacggatcaatagcgccaagggtcgcagaaaagcattcggcacctgtagcagccaccttaccgtggttacccttttttatagtagtgtgatagcagtgtacctgcagcctaagaatccatacgctcaagaaagagggaaattcttcggcctcttctatgccgtcggcaccccaagcctaaaccctctgatttatacattgagaaataaagaggttactcgggcatttcggcgtctcctcggcaaggaaatgggcctaactcaaagttag

SEQ ID NO: 170656 - DNA, 939 bp, Artificial Sequence
  derived and/or modified sequence
atggtaaaccagtcaagtacccctggcttcctcctacttggcttctccgagcacccaggcttggagcggactctgtttgtagtggtgttcacaagttaccttttgaccctcgtgggaaacacacttattatactcctgagcgttttggaccctaagctgcactcgcctatgtatttctttctgagtaatctttccttcctcgacttatgtttcacaacttcttgcgtgccacaaatgctggttaacctttggggtccaaagaagacgatatcttttctagattgcagtgttcagatatttatctttctaagtcttggtacaaccgaatgcattctgctcactgtaatggcttttgaccgctatgtcgctgtctgtcagcccttgcactacgcaacaatcattcacccacgactgtgttggcagttggcctctgtcgcctgggtgatcggcctggttgagtcagtggtgcagactccttccaccttgcacctcccgttctgtcctgataggcaagttgatgatttcgtgtgtgaagtgcctgctctcatcaggctgagctgcgaggacacatcctataatgagatccaggtggctgtagcctctgtgttcatactggtggtgcctctctctctcatcctggtgtcctatggtgctatcacttgggctgtgctgaggatcaattctgctaagggtagaagaaaggcgttcgggacatgctcttcccatctgacagttgttacgctgttttattctagcgtgattgctgtctacttacagcctaagaacccatacgcccaggaaagaggaaagttcttcggtctcttttatgccgtcggcactccaagtctcaatccgctgatctatactttgcgtaataaagaggtcacaagagcctttcggcgtcttcttggcaaggaaatgggactcactcagagttag

SEQ ID NO: 170657 - DNA, 939 bp, Artificial Sequence
  derived and/or modified sequence
atggtgaaccagagtagcacgcctggcttcctgttattaggcttttctgaacaccccggattggagcgtactttattcgttgtggtgtttacctcctatctgttaactctggttggcaatacactcataatacttctgagcgtgctagacccaaagctgcactcacccatgtacttttttctttccaacctgtcctttctggatctgtgtttcaccacttcctgcgtgccgcagatgttggtaaacctgtgggggccaaaaaagaccatctcatttcttgattgttctgtgcaaatcttcatcttcctctcactcggaaccaccgaatgtatcctactgactgtaatggcttttgaccggtacgtggcagtgtgccagccactgcactacgccaccatcatccacccccgtctgtgttggcagctggcttccgttgcctgggttataggcctggtcgagtcagtcgttcagacccccagtactctgcacctcccattctgccctgatcgacaggtggatgacttcgtgtgtgaggtccctgccttgattcgcctctcctgcgaggacacctcatataatgagatccaggtcgctgttgcctcagtctttatcttagtggttccactaagcttgatcttggtgtcttacggtgccattacatgggctgtgctgaggatcaattctgccaaaggaaggagaaaagcgttcggtacctgtagtagtcacctcaccgtagtaacacttttctactctagcgttattgccgtgtacttgcagcctaagaatccctacgcccaggaacgtggaaagttcttcggactcttttatgctgttggaacaccaagtctcaaccctctgatctacacactgaggaacaaagaggtgactcgcgcttttcgtcgtttgcttggaaaagagatggggctcacccagagctag

SEQ ID NO: 170658 - protein, 652 aa, Artificial Sequence
  derived and/or modified sequence
MSGQSLTDRITAAQHSVTGSAVSKTVCKATTHEIMGPKKKHLDYLIQCTNEMNVNIPQLADSLFERTTNSSWVVVFKSLITTHHLMVYGNERFIQYLASRNTLFNLSNFLDKSGLQGYDMSTFIRRYSRYLNEKAVSYRQVAFDFTKVKRGADGVMRTMNTEKLLKTVPIIQNQMDALLDFNVNSNELTNGVINAAFMLLFKDAIRLFAAYNEGIINLLEKYFDMKKNQCKEGLDIYKKFLTRMTRISEFLKVAEQVGIDRGDIPDLSQAPSSLLDALEQHLASLEGKKIKDSTAASRATTLSNAVSSLASTGLSLTKVDEREKQAALEEEQARLKALKEQRLKELAKKPHTSLTTAASPVSTSAGGIMTAPAIDIFSTPSSSNSTSKLPNDLLDLQQPTFHPSVHPMSTASQVASTWGDPFSATVDAVDDAIPSLNPFLTKSSGDVHLSISSDVSTFTTRTPTHEMFVGFTPSPVAQPHPSAGLNVDFESVFGNKSTNVIVDSGGFDELGGLLKPTVASQNQNLPVAKLPPSKLVSDDLDSSLANLVGNLGIGNGTTKNDVNWSQPGEKKLTGGSNWQPKVAPTTAWNAATMAPPVMAYPATTPTGMIGYGIPPQMGSVPVMTQPTLIYSQPVMRPPNPFGPVSGAQIQFM

SEQ ID NO: 170659 - DNA, 1959 bp, Artificial Sequence
  derived and/or modified sequence
atgagcggccagtctttgaccgatcgcatcaccgcggcccagcattcagtaacaggctcagctgtctctaagacagtctgtaaggcaaccacacatgaaatcatgggcccaaagaagaaacacctggactacctcatacagtgcacaaatgagatgaatgtgaacattccccagctcgcggactctctgtttgagcgcacgaccaatagtagctgggtagtcgtgttcaaatccctgattaccacccaccacctgatggtttatggcaacgagagatttattcagtatctcgcgagcagaaacacgctgttcaacctctcaaatttcttggataagtcaggactgcagggctatgatatgagcacttttattagaagatattcccggtacctcaatgagaaggcagtgtcctaccggcaagtggcctttgacttcactaaagtaaagaggggggccgacggagtgatgcggacaatgaacactgagaagctcttgaagacagtgccaattatacagaaccagatggacgcgctccttgactttaacgtgaatagtaatgagctgactaacggtgttattaacgcagcctttatgctgctgtttaaagacgctatacggcttttcgcagcctacaacgaaggaatcattaacctgctcgaaaaatacttcgatatgaagaagaatcagtgtaaagaggggttggacatatacaagaagttcctgactcggatgactcgcatctctgagttcctcaaggtggccgaacaagttggcatagatcggggagacatccccgatcttagccaagccccgtcaagcttgctcgacgccttagagcaacatctggcttctctggaaggcaaaaaaattaaggactctacggcggctagtcgcgctactactctgagcaacgcagtgtcttctctcgcgtccaccggccttagccttacgaaggtggacgaacgcgagaagcaagccgcattggaagaggaacaggctcgactgaaggcactaaaggagcagagactaaaagagttggctaagaaaccacacacaagtcttacgacagctgcatctcccgttagcacatcagcaggtgggatcatgactgcccccgctatcgacatcttttctactcctagcagttcaaattctacatctaaactccccaatgacctccttgatctgcagcagccgaccttccatccctctgtccaccccatgagcacggcatcccaggtggcaagtacctggggtgatcccttcagcgctacagtggatgctgtagatgacgcgatccccagcttaaacccattcttgaccaagtcgtctggggatgtgcatctgtcaatttcaagcgacgtgagtacatttacaaccaggactcctacacacgaaatgttcgtaggatttacccccagccctgtggcccagccacatccgtccgctggccttaatgtggatttcgagagtgtatttgggaacaagtcaaccaacgtgatagttgattccggtggcttcgacgagttaggcgggctgctcaaaccaacagtagctagccagaaccagaacttaccggtggccaaacttccgccctcgaagctggtgagcgatgacctcgattctagcttggcaaatcttgttggaaacttaggcatcggaaacggaacaacgaaaaatgatgtgaactggtcccagcccggcgaaaaaaagcttaccggcggcagcaactggcaacccaaggtcgcgcctactaccgcctggaacgctgccactatggctcctccggtgatggcctatcccgcgacaaccccaacgggtatgattggctacggcatacccccgcagatgggctctgtaccggtcatgacccagccaaccctcatctacagccaaccagtgatgcgtcccccaaatccctttggaccggtttctggggcacaaatccagtttatgtag

SEQ ID NO: 170660 - DNA, 1959 bp, Artificial Sequence
  derived and/or modified sequence
atgtcaggccagagcttaactgacagaatcacagcggcccagcactccgtgaccgggtccgctgtgagtaaaactgtctgtaaagcgacaacacacgagatcatgggcccaaagaagaaacacctggattacctgattcagtgcacaaacgaaatgaacgtcaacattccacaactcgctgactctctattcgagcggaccacgaacagctcatgggttgttgtttttaagtcactcatcaccacccatcatctgatggtgtacggaaatgagagatttatccaatacttggcctcccgcaacactctctttaatctgagtaattttttagacaagagtggtctgcagggctatgatatgtcaacttttatcagacggtacagtaggtatctgaacgagaaggcggtatcataccgtcaggttgcttttgacttcactaaagtcaaaagaggagcagacggggtgatgagaaccatgaacaccgagaaactactgaagacagtaccgatcatccaaaatcagatggacgcgctgttagactttaacgtgaattccaacgagctcactaatggtgtgattaatgcggcgtttatgctgctgttcaaagatgctattagactgtttgctgcctataacgaagggatcattaacctgctcgagaaatactttgacatgaaaaaaaaccagtgcaaggaaggtctcgatatatataagaaatttctcacccggatgacacgcatctccgaattcttgaaggtggcggagcaggttggcatcgatcgcggggacattccggatctcagccaggcccccagctcactgctggatgcactggagcagcacctggccagcctggaagggaagaaaatcaaggactcaacggccgcttcgagggcaacaaccctaagtaatgccgtttccagtctggcaagcaccgggctgtccctgaccaaggtggatgagagagagaagcaggcagcgctggaggaagagcaagcccgcctgaaggcgctaaaagagcagcgcctgaaggagctggctaaaaaaccccacaccagccttaccaccgccgcttctccagtctccactagcgctggggggatcatgacagcacccgcgatcgatattttctccacaccctcttcttccaattcaacctctaaattacctaacgatctgcttgacctgcagcagcctaccttccaccccagtgtccatccgatgagtaccgctagtcaagtcgcttccacatggggcgatccatttagtgccacagtcgacgccgttgatgacgccataccctcactgaaccccttcttgacaaagtctagcggcgacgtgcacctgtccattagctcggatgtctcgaccttcaccactcgtacgcccacgcacgagatgttcgtcggttttacaccaagccctgtggcgcagccacacccatcagccggcttgaacgtggatttcgaatctgtctttggaaacaagagtaccaatgtgatcgtggactccggcggttttgatgagctgggaggcctgttgaagcccactgtagcctctcagaaccagaacctgccagttgcgaaattgcctcccagcaagttggtttccgatgacctcgactcatcactggcaaatctggtcggaaacctgggcattgggaatggaactaccaagaatgacgtgaactggtctcaacccggagaaaaaaagctgaccggaggctcgaactggcagcccaaggtagctccaaccactgcgtggaacgccgccaccatggctcctccggtgatggcatatcctgcaaccacaccaacaggcatgatcggctacggaatcccaccacaaatggggtcagtgccagtgatgacacagcccacattgatatattcccagccagtaatgcgacctcccaacccttttgggcccgtttccggcgctcagattcagtttatgtag

SEQ ID NO: 170661 - DNA, 1959 bp, Artificial Sequence
  derived and/or modified sequence
atgagcggccagagcctgacagaccgcatcacagctgcccagcacagcgtgacaggcagcgctgtgtccaagacagtgtgcaaggccaccacccatgagatcatgggccccaagaagaagcacctggactacctgatccagtgcaccaatgagatgaatgtgaacatcccccagctggccgacagcctgtttgagaggaccaccaacagctcctgggtggtggtgttcaagagcctcatcaccacccaccacctgatggtgtatggaaatgaacgcttcatccagtacctggccagcaggaacaccctcttcaacctgagcaacttcctggacaagagcggcctgcagggctatgacatgagcaccttcatccgccgctacagccgctacctgaatgagaaggctgtgtcctaccggcaggtggcctttgacttcaccaaggtgaagagaggagcagatggagtgatgaggaccatgaacacagagaagctgctgaagacagtgcccatcatccagaaccagatggatgccctgctggacttcaacgtgaacagcaatgagctgaccaacggggtcatcaatgctgccttcatgctgctcttcaaggatgccatccggctgtttgctgcctacaatgaaggcatcatcaacctgctggagaagtactttgacatgaagaagaaccagtgcaaggagggcctggacatctacaagaagttcctgaccaggatgacccgcatcagcgagttcctgaaggtggccgagcaggtgggcatcgacagaggagacatcccagacctgagccaggcccccagcagcctgctggatgccctggagcagcacctggccagcctggagggcaagaagatcaaggacagcacagctgccagccgggccaccaccctgagcaatgctgtgagcagcctggccagcacaggcctgagcctgaccaaggtggatgagcgggagaagcaggccgccctggaggaggagcaggcccggctgaaggccctgaaggagcagaggctgaaggagctggccaagaagccccacaccagcctgaccacagctgccagccctgtgtccaccagcgctgggggcatcatgacagccccagccatcgacatcttcagcacccccagcagcagcaacagcaccagcaagctgcccaatgacctgctggacctgcagcagcccaccttccaccccagcgtgcaccccatgagcacagccagccaggtggccagcacctggggagaccccttcagcgccaccgtggatgctgtggatgatgccatccccagcctgaaccccttcctgaccaagagcagtggagatgtgcacctgagcatcagcagtgatgtgtccaccttcaccaccaggacccccacccatgagatgtttgtgggcttcacccccagccctgtggcccagccccaccccagcgctggcctgaatgtggactttgaatctgtgtttggaaacaagagcaccaacgtgattgtggacagcggcggctttgatgagctgggcggcctgctgaagcccaccgtggccagccagaaccagaacctgcctgtggccaagctgccccccagcaagctggtgtctgatgacctggacagcagcctggccaacctggtgggcaacctgggcattggaaatggcaccaccaagaatgatgtgaactggagccagcctggagagaagaagctgactggaggcagcaactggcagcccaaggtggcccccaccacagcctggaatgctgccaccatggcccctcctgtgatggcctacccagccaccacccccaccggcatgattggctacggcatccccccccagatgggctctgtgcctgtgatgacccagcccaccctcatctacagccagcctgtgatgaggcctcccaacccctttggacctgtgtctggggcccagatccagttcatgtag

SEQ ID NO: 170662 - DNA, 1959 bp, Artificial Sequence
  derived and/or modified sequence
atgagcggccagagcctgaccgaccggatcaccgccgcccagcactccgtgaccggatcagcggtcagtaagaccgtgtgtaaagctaccacacatgagattatgggacccaaaaagaagcatctggattacctcattcagtgtaccaatgagatgaatgtgaacattccacagttggcagactccctgttcgaacggacaacaaattccagttgggtggtagttttcaaaagtctcattacaactcaccacttaatggtttacggaaacgaaagatttatacagtatctggcttcaagaaatactctgtttaacctgagcaactttctggacaaatccggcctccagggctacgacatgtctacgtttatccgcagatactccaggtatttaaacgagaaggccgtgagttatcggcaggtcgcttttgacttcactaaggttaaaaggggcgccgatggcgtgatgaggaccatgaatacggagaaactgctgaagaccgtgcctatcatccagaaccaaatggacgccctcctggactttaacgtgaacagtaacgagttaactaatggggtgataaatgccgccttcatgctacttttcaaagatgcaattcggctatttgctgcctataacgaggggatcattaaccttctggagaagtattttgatatgaaaaaaaatcagtgtaaagaaggcctggacatctacaagaagttcctgacccggatgactcgaatatcagaatttctcaaagtagccgagcaagtgggcatcgaccggggagatatcccagaccttagccaggctcctagcagtctgttagatgcgctggagcagcacctcgccagccttgagggaaagaagatcaaagactctactgccgctagcagagccacaaccctgagtaatgcggtgtcgtccctggcaagcacagggctttcgttgactaaggttgatgagcgtgaaaagcaagcagccctcgaggaagagcaggctcgtctcaaggccctaaaagagcagagattgaaggaactagcaaagaagcctcacacatcgctgacaaccgctgcttcaccagtctcgacttccgccggcggcattatgaccgcacccgcaatcgacatcttttctacaccatcatcttccaattccacgtctaagttacccaatgacctcctggaccttcagcagccgaccttccaccccagtgtacaccctatgagtacggccagccaggtcgctagtacatggggggatcccttttcagcgacagttgatgccgtcgatgatgctataccctccctaaaccccttccttacgaaaagctccggggacgtgcacttatctatttcgtccgacgtgtctacattcacaactcgcactccaacacacgaaatgttcgtgggatttactccttcccctgtggcacagccgcacccctccgccggactcaacgttgacttcgaaagcgtgtttggaaacaaatcaaccaacgtgatagtcgatagcggcgggttcgacgaacttggcgggctgctaaaacccaccgtcgcttctcagaatcagaacctcccagtggccaagctgccccccagtaaattggtgtccgacgaccttgactcctccctcgccaacctggtggggaacttgggaatcggtaatggcacaactaaaaacgatgtgaactggtctcaacctggagagaaaaagctgacagggggcagcaactggcagccaaaggtcgcccccactactgcctggaatgctgctacaatggctcctcccgtcatggcatatcctgctaccacccctacaggaatgataggctatggaattcctccacagatgggcagcgtccccgtaatgacccaacctacattaatctattctcagccggtcatgcgccctcccaatccatttggtccagtatccggggcccagatccagtttatgtag

SEQ ID NO: 170663 - DNA, 1959 bp, Artificial Sequence
  derived and/or modified sequence
atgagcggccagagcctgaccgaccggatcaccgccgcccagcactccgtgacaggcagtgccgtctcaaagacagtgtgtaaagccacaactcacgaaatcatgggacccaagaaaaaacacttggattacctaatccagtgcactaacgaaatgaatgtgaatattcctcagttggcagattcactcttcgagcgaacgaccaactccagctgggttgtggtctttaaatctctaatcactacgcatcacctgatggtgtacggcaacgagcgattcatccaatacctggcatcccggaacactctgttcaatctgtcaaattttctcgataagagtggactgcagggctatgatatgtcaacatttattagacggtattcccgctacctgaacgagaaggccgtgtcctaccgccaggttgcatttgactttaccaaggtcaaaaggggggcagacggtgtcatgcgcactatgaatacagaaaaacttctgaagactgtgccaatcattcagaaccagatggatgctctgcttgacttcaacgtgaattctaacgaactcactaacggagtgattaatgctgcttttatgctcctgtttaaggacgcaatacgcctgttcgctgcgtataacgaaggaatcattaacctacttgagaagtacttcgacatgaagaaaaatcagtgcaaagaagggttggacatctataaaaaattcctgacgagaatgacaaggatctcagaattcttgaaagtcgcagaacaggtagggattgacagaggcgatattcccgacctcagccaggccccgtcctctttgctggacgctcttgagcagcacctagcctcattagagggtaagaaaattaaggattctactgccgcgtcacgagcgacaacactcagcaacgccgtgagctccctggcaagtacaggcttgtctctgactaaggtggatgagagagaaaagcaggccgctctcgaggaagagcaagctaggcttaaagctttgaaagagcagagactgaaggagttggctaaaaagccgcacacctcgttgaccactgctgccagtcctgtgagcacctctgccggcgggattatgaccgcaccggccattgacatattttccacaccatcttcctcaaacagcacaagcaagctgcctaacgatctgctggaccttcagcaaccaacatttcatccatctgtccatccaatgtccacagcatcacaggtggccagtacatggggagatcccttttcagctactgtggacgccgtcgacgatgccatccccagcttgaacccattcctgactaaatcttctggcgatgtacacctatcgatttcgagcgatgtgagcaccttcactactcgcaccccaactcatgaaatgttcgttgggttcacgcctagcccagtcgcccagccccatccatccgctgggctgaatgtggatttcgagagcgtatttggcaacaagtccaccaatgtgatcgtggattcaggggggtttgatgaactaggcggtctcttgaagcctacagtggctagtcagaaccaaaacctgccagtagctaagctccccccctcgaaactggttagcgatgacttggacagcagtttagccaatctcgtgggcaacctagggatcggaaacgggaccacgaagaatgatgtgaattggagtcagcccggggaaaagaagctgaccggcggctctaactggcagccaaaggtggcccccaccacggcgtggaatgccgccactatggctcctcccgtcatggcatatccagccaccacacccactggaatgatcggctacgggataccaccacagatggggagtgtgcctgtgatgacccaaccaacgctgatctattcgcaacccgtcatgagaccccctaatccctttggccccgtctccggagcgcagatccagtttatgtag

SEQ ID NO: 170664 - DNA, 2340 bp, Artificial Sequence
  derived and/or modified sequence
gcgcggccccgaaccgcgccccaggccggcaggcggggaaggagccggtgggggtagggggtgcggtggggggtggggaccctccggctcttgggggtcccagtccccgccggctgctgagcgggtggggtggtggaggagctgcagagatgtccggccagagcctgacggaccgaatcactgccgcccagcacagtgtcaccggctctgccgtatccaagacagtatgcaaggccacgacccacgagatcatggggcccaagaaaaagcacctggactacttaattcagtgcacaaatgagatgaatgtgaacatcccacagttggcagacagtttatttgaaagaactactaatagtagttgggtggtggtcttcaaatctctcattacaactcatcatttgatggtgtatggaaatgagcgttttattcagtatttggcttcaagaaacacgttgtttaacttaagcaattttttggataaaagtggattgcaaggatatgacatgtctacatttattaggcggtatagtagatatttaaatgagaaagcagtttcatacagacaagttgcatttgatttcacaaaagtgaagagaggggctgatggagttatgagaacaatgaacacagaaaaactcctaaaaactgtaccaattattcagaatcagatggatgcacttcttgattttaatgttaatagcaatgaacttacaaatggggtaataaatgctgccttcatgctcctgttcaaagatgccattagactgtttgcagcatacaatgaaggaattattaatttgttggaaaaatattttgatatgaaaaagaaccaatgcaaagaaggtcttgacatctataagaagttcctaactaggatgacaagaatctcagagttcctcaaagttgcagagcaagttggaattgacagaggtgatataccagacctttcacaggcccctagcagtcttcttgatgctttggaacaacatttagcttccttggaaggaaagaaaatcaaagattctacagctgcaagcagggcaactacactttccaatgcagtgtcttccctggcaagcactggtctatctctgaccaaagtggatgaaagggaaaagcaggcagcattagaggaagaacaggcacgtttgaaagctttaaaggaacagcgcctaaaagaacttgcaaagaaacctcatacctctttaacaactgcagcctctcctgtatccacctcagcaggagggataatgactgcaccagccattgacatattttctacccctagttcttctaacagcacatcaaagctgcccaatgatctgcttgatttgcagcagccaacttttcacccatctgtacatcctatgtcaactgcttctcaggtagcaagtacatggggagatcctttctctgctactgtagatgctgttgatgatgccattccaagcttaaatcctttcctcacaaaaagtagtggtgatgttcacctttccatttcttcagatgtatctacttttactactaggacacctactcatgaaatgtttgttggattcactccttctccagttgcacagccacacccttcagctggccttaatgttgactttgaatctgtgtttggaaataaatctacaaatgttattgtagattctgggggctttgatgaactaggtggacttctcaaaccaacagtggcctctcagaaccagaaccttcctgttgccaaactcccacctagcaagttagtatctgatgacttggattcatctttagccaaccttgtgggcaatcttggcatcggaaatggaaccactaagaatgatgtaaattggagtcaaccaggtgaaaagaagttaactgggggatctaactggcaaccaaaggttgcaccaacaaccgcttggaatgctgcaacaatggcaccccctgtaatggcctatcctgctactacaccaacaggcatgataggatatggaattcctccacaaatgggaagtgttcctgtaatgacgcaaccaaccttaatatacagccagcctgtcatgagacctccaaacccctttggccctgtatcaggagcacagatacagtttatgtaacttgatggaagaaaatggaattactccaaaaagacaagtgctcaagcagcaaaatccttacttccagcaaaatccaaactgctgtctcttaaatctcttaaactctcttcttccattagaatgctacaagtaactcagtgaaggcccatgaaggaaattgggactagtttataggagaacgtatcaatacagtttataaagccaagaattgctatgatttaagactaagatc

SEQ ID NO: 170665 - DNA, 2618 bp, Artificial Sequence
  derived and/or modified sequence
gaggaggagcctggcgccgccattttcctgcagctgcctgttcctcttaccctgcccggctccagctgacccgggaaggggtgggctgaactgaggcgggggcaagggtggggaccctccggctcttgggggtcccagtccccgccggctgctgagcgggtggggtggtggaggagctgcagagatgtccggccagagcctgacggaccgaatcactgccgcccagcacagtgtcaccggctctgccgtatccaagacagtatgcaaggccacgacccacgagatcatggggcccaagaaaaagcacctggactacttaattcagtgcacaaatgagatgaatgtgaacatcccacagttggcagacagtttatttgaaagaactactaatagtagttgggtggtggtcttcaaatctctcattacaactcatcatttgatggtgtatggaaatgagcgttttattcagtatttggcttcaagaaacacgttgtttaacttaagcaattttttggataaaagtggattgcaaggatatgacatgtctacatttattaggcggtatagtagatatttaaatgagaaagcagtttcatacagacaagttgcatttgatttcacaaaagtgaagagaggggctgatggagttatgagaacaatgaacacagaaaaactcctaaaaactgtaccaattattcagaatcagatggatgcacttcttgattttaatgttaatagcaatgaacttacaaatggggtaataaatgctgccttcatgctcctgttcaaagatgccattagactgtttgcagcatacaatgaaggaattattaatttgttggaaaaatattttgatatgaaaaagaaccaatgcaaagaaggtcttgacatctataagaagttcctaactaggatgacaagaatctcagagttcctcaaagttgcagagcaagttggaattgacagaggtgatataccagacctttcacaggcccctagcagtcttcttgatgctttggaacaacatttagcttccttggaaggaaagaaaatcaaagattctacagctgcaagcagggcaactacactttccaatgcagtgtcttccctggcaagcactggtctatctctgaccaaagtggatgaaagggaaaagcaggcagcattagaggaagaacaggcacgtttgaaagctttaaaggaacagcgcctaaaagaacttgcaaagaaacctcatacctctttaacaactgcagcctctcctgtatccacctcagcaggagggataatgactgcaccagccattgacatattttctacccctagttcttctaacagcacatcaaagctgcccaatgatctgcttgatttgcagcagccaacttttcacccatctgtacatcctatgtcaactgcttctcaggtagcaagtacatggggagatcctttctctgctactgtagatgctgttgatgatgccattccaagcttaaatcctttcctcacaaaaagtagtggtgatgttcacctttccatttcttcagatgtatctacttttactactaggacacctactcatgaaatgtttgttggattcactccttctccagttgcacagccacacccttcagctggccttaatgttgactttgaatctgtgtttggaaataaatctacaaatgttattgtagattctgggggctttgatgaactaggtggacttctcaaaccaacagtggcctctcagaaccagaaccttcctgttgccaaactcccacctagcaagttagtatctgatgacttggattcatctttagccaaccttgtgggcaatcttggcatcggaaatggaaccactaagaatgatgtaaattggagtcaaccaggtgaaaagaagttaactgggggatctaactggcaaccaaaggttgcaccaacaaccgcttggaatgctgcaacaatggcaccccctgtaatggcctatcctgctactacaccaacaggcatgataggatatggaattcctccacaaatgggaagtgttcctgtaatgacgcaaccaaccttaatatacagccagcctgtcatgagacctccaaacccctttggccctgtatcaggagcacagatacagtttatgtaacttgatggaagaaaatggaattactccaaaaagacaagtgctcaagcagcaaaatccttacttccagcaaaatccaaactgctgtctcttaaatctcttaaactctcttcttccattagaatgctacaagtaactcagtgaaggcccatgaaggaaattgggactagtttataggagaacgtatcaatacagtttataaagccaagaattgctatgatttaagactaagatctgtctttttggtgactaacccttcaattctttcaactcctgttaatacccataatcagtaacctatcaagaaaagcccttatttggaaagtgtgaaatttgtatttggaaaagctgcctggagagaagaactgtgtcctttactgtatttcaacaggactcttttgggggatcaaaattaaaattcctaattatgcattatctttcttttctccagtcctcacaaatacagaaacaataactg

SEQ ID NO: 170666 - DNA, 1959 bp, Artificial Sequence
  derived and/or modified sequence
atgtctggtcagtcactgaccgaccgcattaccgctgcacagcattctgtgaccggctccgcggtgagcaaaactgtttgtaaagccaccacccacgagatcatgggccctaaaaagaagcacttagactacctgatccagtgcaccaatgagatgaacgtgaacatcccacaacttgcggattccttgttcgagagaaccacaaattcaagttgggtcgttgtgttcaaaagtctgatcacaactcaccacctgatggtatatggaaatgaacggtttatccagtatctggctagccggaacactctgttcaacctctctaattttctagacaaatctggtctgcagggatatgacatgtccaccttcatccgccgatattcccgctacctcaatgaaaaagcagtgtcctatcgtcaggtggcttttgattttacaaaggtgaagaggggagccgacggtgtgatgaggactatgaatacggaaaaattgctcaaaaccgtccctatcattcagaatcaaatggacgccctgctggacttcaacgttaattctaatgaacttaccaacggggttatcaacgccgcttttatgctgttattcaaggacgctatccgcttatttgccgcatataacgaaggcatcataaacctacttgagaaatattttgatatgaaaaagaatcagtgcaaagaaggactcgacatctacaagaaattccttacccgcatgaccagaatctcagaattcctgaaagtggccgagcaggtaggaatcgaccggggagatattccggatctgtcccaagcaccgagcagcctgctggatgccctagaacagcacctggccagcctggagggcaagaagatcaaagattcgaccgctgcgagtagagctacaactctatctaacgcagtctcctcacttgccagtaccggactctccctgaccaaggttgacgaacgggaaaaacaggcagcgctggaagaagagcaggccagactgaaagccctgaaagagcagcgcctcaaagaactcgcaaaaaaaccgcatacgtcccttacaaccgccgcttcacccgtctccacttcagctggtggcattatgacagctcctgcgattgacatcttttcgaccccctcatcctccaactccaccagcaaactcccaaatgacctgctagacctgcagcagccaactttccatccttccgttcaccccatgagcaccgcatctcaagtggccagcacctggggcgaccctttttccgccactgttgacgccgtggatgacgccatacccagcctgaacccatttctgactaagtcgtccggagatgtgcatcttagcataagttcggatgtgagcacattcactactagaacgccaacccacgagatgtttgtcggattcacaccaagccccgttgctcagcctcaccctagcgccggtctgaatgtggatttcgaaagtgtatttggcaacaaatcaactaacgttatagtggattctgggggatttgacgaactgggaggactactgaagcctactgtcgctagtcagaatcagaatctgccagtggccaagctgcccccttccaagttagtctcagacgatctggatagctcccttgctaacctggtgggaaaccttggcattggaaatggaaccacgaaaaatgacgtgaattggtctcagcccggagagaaaaagctcaccgggggaagtaactggcaacccaaggtggcacccacaaccgcttggaatgccgcaacaatggctcccccagtgatggcatatcccgctaccacaccgacaggtatgatcggctatggtatacccccacaaatgggcagtgtccctgtaatgacgcagccaacactgatttacagtcagccagtgatgagaccaccaaaccccttcggaccagtgtctggagcccagatacagtttatgtag

SEQ ID NO: 170667 - DNA, 1959 bp, Artificial Sequence
  derived and/or modified sequence
atgagtggccagagtctcacagatcgaattaccgccgctcagcattcggtgacaggctccgccgtctctaaaacagtgtgtaaggccacaacccatgaaattatgggtccaaagaaaaagcacctagactacctgattcagtgtactaacgaaatgaacgtgaatataccccagttggcggattcgctgttcgaacgaacaacgaactctagttgggtggtggtctttaaatccctgattacgacccaccatctgatggtgtacggcaacgagagatttatccaatacttagcatccagaaatactctctttaacctgtccaacttcttggataagagtggtctccagggctatgacatgtcaacctttatccggagatactctcggtatctgaacgaaaaggcagtttcctatcgccaggtggcctttgattttacaaaagttaagcggggagctgacggcgtgatgagaacaatgaacacggagaagctgcttaagaccgtgccgataattcaaaaccagatggatgccctgttggattttaacgtgaacagtaacgagctaaccaacggggttatcaatgcagcattcatgttactgtttaaagacgcaatcaggctcttcgctgcctataacgagggcattatcaatctcctcgagaagtatttcgacatgaagaagaatcagtgtaaagaagggctggatatctataagaaatttctgacacggatgacccggatcagtgagtttctgaaagtggcagagcaggtgggtatcgacaggggagatatccccgatctttcgcaggccccaagttcactcctcgacgctctggaacagcacctggccagcctcgaaggcaaaaaaattaaagactccacagctgcctctagagcgactactctgtcgaatgccgtcagctctctggccagcactggtctgagcctgaccaaggttgatgaacgagagaagcaggcagccctggaggaggagcaggcacggctcaaggccctgaaagaacaacggcttaaagagttagctaaaaagcctcacacctctcttacaacagcagcttctcctgtcagtacgtccgccggaggcatcatgactgcccctgctattgacatcttctccacacctagctctagtaattccacaagtaaactgccaaatgaccttctcgacctccagcaacccactttccaccccagcgtgcaccctatgagcacagcctcgcaagtggcatccacctggggggatcccttcagtgcaaccgtcgacgcggtcgatgatgccattccttctttgaatcccttcctcactaaatcttcgggtgacgtgcatctgagtatcagcagcgacgtgagcacttttactacccgcacacctacacacgagatgttcgtgggatttacgccgtcccctgtggcacaaccccatccgagcgctgggctgaatgttgattttgagtcagtttttggtaacaagtctaccaatgttatcgtagactcagggggttttgacgagctggggggattgctgaagcccacagttgcctcccaaaatcagaacctccccgtcgctaagctccccccatccaagctggtgtctgatgacctggactccagcctcgccaatctggttggcaatcttggaattggtaatgggaccacaaaaaatgatgtgaactggtcacagcccggagagaagaaactcaccggcggatccaattggcagcctaaagttgccccaacaacggcctggaatgccgctactatggctcctcccgttatggcctatcccgcaaccacccccacaggaatgatcggctacggtatcccaccccagatgggctccgtacctgtgatgacgcagcctactctgatctactcccaacccgtaatgcggcctcccaaccctttcggcccagtcagcggcgctcaaatacagttcatgtag

SEQ ID NO: 170668 - DNA, 1959 bp, Artificial Sequence
  derived and/or modified sequence
atgagcggccagagcctgaccgacagaatcaccgccgcccagcacagcgtgaccggcagcgccgtgagcaagaccgtgtgcaaggccaccacccacgagatcatgggccccaagaagaagcacctggactacctgatccagtgcaccaacgagatgaacgtgaacatcccccagctggccgacagcctgttcgagagaaccaccaacagcagctgggtggtggtgttcaagagcctgatcaccacccaccacctgatggtgtacggcaacgagagattcatccagtacctggccagcagaaacaccctgttcaacctgagcaacttcctggacaagagcggcctgcagggctacgacatgagcaccttcatcagaagatacagcagatacctgaacgagaaggccgtgagctacagacaggtggccttcgacttcaccaaggtgaagagaggcgccgacggcgtgatgagaaccatgaacaccgagaagctgctgaagaccgtgcccatcatccagaaccagatggacgccctgctggacttcaacgtgaacagcaacgagctgaccaacggcgtgatcaacgccgccttcatgctgctgttcaaggacgccatcagactgttcgccgcctacaacgagggcatcatcaacctgctggagaagtacttcgacatgaagaagaaccagtgcaaggagggcctggacatctacaagaagttcctgaccagaatgaccagaatcagcgagttcctgaaggtggccgagcaggtgggcatcgacagaggcgacatccccgacctgagccaggcccccagcagcctgctggacgccctggagcagcacctggccagcctggagggcaagaagatcaaggacagcaccgccgccagcagagccaccaccctgagcaacgccgtgagcagcctggccagcaccggcctgagcctgaccaaggtggacgagagagagaagcaggccgccctggaggaggagcaggccagactgaaggccctgaaggagcagagactgaaggagctggccaagaagccccacaccagcctgaccaccgccgccagccccgtgagcaccagcgccggcggcatcatgaccgcccccgccatcgacatcttcagcacccccagcagcagcaacagcaccagcaagctgcccaacgacctgctggacctgcagcagcccaccttccaccccagcgtgcaccccatgagcaccgccagccaggtggccagcacctggggcgaccccttcagcgccaccgtggacgccgtggacgacgccatccccagcctgaaccccttcctgaccaagagcagcggcgacgtgcacctgagcatcagcagcgacgtgagcaccttcaccaccagaacccccacccacgagatgttcgtgggcttcacccccagccccgtggcccagccccaccccagcgccggcctgaacgtggacttcgagagcgtgttcggcaacaagagcaccaacgtgatcgtggacagcggcggcttcgacgagctgggcggcctgctgaagcccaccgtggccagccagaaccagaacctgcccgtggccaagctgccccccagcaagctggtgagcgacgacctggacagcagcctggccaacctggtgggcaacctgggcatcggcaacggcaccaccaagaacgacgtgaactggagccagcccggcgagaagaagctgaccggcggcagcaactggcagcccaaggtggcccccaccaccgcctggaacgccgccaccatggccccccccgtgatggcctaccccgccaccacccccaccggcatgatcggctacggcatccccccccagatgggcagcgtgcccgtgatgacccagcccaccctgatctacagccagcccgtgatgagaccccccaaccccttcggccccgtgagcggcgcccagatccagttcatgtag

SEQ ID NO: 170669 - DNA, 600 bp, Artificial Sequence
  derived and/or modified sequence
atgaccagactgctgggctacgtggaccccctggaccccagcttcgtggccgccgtgatcaccatcaccttcaaccccctgtactggaacgtggtggccagatgggagcacaagaccagaaagctgagcagagccttcggcagcccctacctggcctgctacagcctgagcgtgaccatcctgctgctgaacttcctgagaagccactgcttcacccaggccatgctgagccagcccagaatggagagcctggacacccccgccgcctacagcctgggcctggccctgctgggcctgggcgtggtgctggtgctgagcagcttcttcgccctgggcttcgccggcaccttcctgggcgactacttcggcatcctgaaggaggccagagtgaccgtgttccccttcaacatcctggacaaccccatgtactggggcagcaccgccaactacctgggctgggccatcatgcacgccagccccaccggcctgctgctgaccgtgctggtggccctgacctacatcgtggccctgctgtacgaggagcccttcaccgccgagatctacagacagaaggccagcggcagccacaagagaagctag

SEQ ID NO: 170670 - DNA, 600 bp, Artificial Sequence
  derived and/or modified sequence
atgaccaggctgctgggctacgtagaccctctggatccctctttcgtggccgctgtgatcacgattacgtttaatcccctctattggaatgtcgttgcaaggtgggagcacaagacacggaaactgtcacgagcctttgggtccccttatctcgcatgctattcactctctgttactattctcctcctcaatttccttcgctctcactgctttacgcaggcaatgctatcccagcctcggatggagtccctagataccccagcagcttattctctgggcctcgctttacttggactaggcgttgtcttggtgttgagttccttcttcgccctgggatttgctggaacgttcctcggagattactttggtatcctgaaggaggcccgcgtaacggtgtttccattcaacatccttgataaccccatgtactggggatccacggccaactacctcggatgggccatcatgcacgcctctccaacgggcctccttctgactgtccttgttgcactgacttacattgtagccctgctctacgaggagccgttcactgccgagatttaccgccagaaagcatccggatctcataaacgatcctag

SEQ ID NO: 170671 - DNA, 600 bp, Artificial Sequence
  derived and/or modified sequence
atgactcgcttgcttggatatgtcgacccgctggacccatctttcgtggctgcggtgataaccattactttcaacccactctactggaacgtcgtcgcgcgctgggaacacaaaacaagaaagcttagcagggctttcggttctccctacttagcttgttacagtttatctgtcactatactactgctaaatttcctgaggtctcactgctttacgcaggccatgctgtctcaaccccggatggagtcactggacactccagcagcttactcgctcgggctggcactgctggggctcggggtggtgttggttctttcatcttttttcgccttggggttcgccggtacatttttgggagactacttcggcatcctgaaggaggctagagtcactgtattcccttttaatatcctcgacaatcctatgtactgggggtccactgcaaattacttgggctgggctataatgcatgcttctcctaccggccttctcctgactgtcctggtggcactgacctacatcgtggcccttctgtacgaggaaccatttacagccgagatctacaggcaaaaggcatcggggtctcataagagatcctag

SEQ ID NO: 170672 - DNA, 600 bp, Artificial Sequence
  derived and/or modified sequence
atgacccggctgctgggctacgtggaccccctggaccccagctttgtggccgccgtcatcaccatcaccttcaaccccctgtactggaatgtggtggcccgctgggagcacaagaccaggaagctgagccgggccttcggcagcccctacctggcctgctacagcctgtctgtgaccatcctgctgctgaacttcctgcggagccactgcttcacccaggccatgctgagccagcccaggatggagagcctggacaccccagctgcctacagcctgggcctggccctgctgggcctgggcgtggtgctggtgctgagcagcttctttgccctgggctttgctggcaccttcctgggggactacttcggcatcctgaaggaggcccgggtgacagtgttccccttcaacatcctggacaaccccatgtactggggcagcacagccaactacctgggctgggccatcatgcacgccagccccaccggcctgctgctgactgtgctggtggccctgacctacatcgtggccctgctgtatgaggagcccttcaccgctgagatctaccggcagaaggccagcggcagccacaagaggagctag

SEQ ID NO: 170673 - DNA, 600 bp, Artificial Sequence
  derived and/or modified sequence
atgacccggctgctgggctacgtggaccccctggaccccagcttcgtggctgccgtgatcacgatcaccttcaatcccttgtattggaatgtggtggctcggtgggagcacaagacacgcaaactgtctcgtgccttcggatcgccctacctcgcgtgctattccctctctgttacgatcctgcttctgaatttcctcaggagccattgctttacgcaggccatgctgtctcagcctcgcatggagagtctggatactcctgcagcttactccctcgggctcgcactcctagggttgggtgttgttctcgtgctgtcttcatttttcgcactgggattcgcgggcacctttctcggagattacttcggcattctgaaggaggcccgcgttaccgtgttcccctttaacatcttggataatcccatgtattggggatcaaccgcgaattacctcggctgggcaatcatgcatgcatcccctacagggctgttgctgacagtgctagtcgcactaacatacattgtggcgcttctgtacgaggagccttttacagctgaaatttacaggcagaaagccagtgggtcccataagagatcttag

SEQ ID NO: 170674 - DNA, 600 bp, Artificial Sequence
  derived and/or modified sequence
atgacccggctgctgggctacgtggaccccctggaccccagcttcgtcgccgccgtcatcactattacattcaaccccctttactggaacgtagtggcccgatgggagcataagacccggaagctttcgcgtgcctttggaagcccctatcttgcctgttatagtctctccgtcacgattctccttcttaactttctccgatcccactgcttcactcaggctatgcttagtcagcctcgcatggaatcactggacactcccgccgcctatagtcttggactagcgctgctcggacttggtgtcgttctggtgctgtcttccttctttgctctgggattcgctggaaccttccttggagattacttcggcatcctgaaggaggcaagagtcactgttttcccttttaatatcttggacaaccctatgtattggggctccacggccaattacttaggctgggcgatcatgcatgcctcccccaccggcctgctgttaaccgtgctggtggcgctgacttacatcgtggcattgctgtacgaagaacctttcactgctgagatctacaggcaaaaagctagtggctcccacaagagaagctag

SEQ ID NO: 170675 - DNA, 600 bp, Artificial Sequence
  derived and/or modified sequence
atgacccgcctgctgggttatgtggaccctctcgacccatcttttgtagccgcagtgatcacgatcacgtttaatcccctctattggaacgttgtcgcaagatgggagcacaaaactcggaaattgtctcgggcattcgggtccccatatctggcttgctactccctcagcgtcacgattctgttactgaatttcctccgcagtcattgcttcacccaggccatgctcagccagccgagaatggagtctctggataccccggcagcttacagcctcgggctggctctcctgggactcggcgtggtgctggttctgagcagcttctttgctctggggtttgcaggaactttcctgggcgattactttggcattcttaaggaagccagagttactgtgttccccttcaacatactggacaacccgatgtactggggttctaccgcaaattatctggggtgggctataatgcacgcaagccctactggattgctgctgaccgtgctggtggctctcacctatatcgtggctctgctatacgaggagcccttcacagccgagatctatcgccaaaaggccagcggaagccataagagaagttag

SEQ ID NO: 170676 - DNA, 600 bp, Artificial Sequence
  derived and/or modified sequence
atgaccagattgctggggtacgtcgacccgctggatccatctttcgtggcggctgtgataactatcaccttcaaccctctctattggaatgtcgttgccagatgggaacataaaaccagaaaattatctcgtgctttcggctccccatacctggcttgctactccctgtctgtgacgattctgctccttaatttcctgaggtctcattgttttactcaggcaatgttgtcccaaccccgaatggagagtctcgacactcccgctgcctacagcttgggcctggccctgctgggtctcggggtagtgttggttctgagctcattcttcgcgcttggtttcgctggcacattcctaggagactattttggcatacttaaggaggctcgcgtgactgtgttcccttttaatatcttggacaatcccatgtattggggctctactgccaactatctgggatgggccatcatgcatgcttccccaaccggacttctcttgacagtgttggtggccctgacttatattgttgccctcttgtacgaagaaccgtttacagcagaaatctatagacagaaagcatctgggtcacacaaacggtcatag

SEQ ID NO: 170677 - protein, 383 aa, Artificial Sequence
  derived and/or modified sequence
MAGIPGLLFLLFFLLCAVGQVSPYSAPWKPTWPAYRLPVVLPQSTLNLAKPDFGAEAKLEVSSSCGPQCHKGTPLPTYEEAKQYLSYETLYANGSRTETQVGIYILSSSGDGAQHRDSGSSGKSRRKRQIYGYDSRFSIFGKDFLLNYPFSTSVKLSTGCTGTLVAEKHVLTAAHCIHDGKTYVKGTQKLRVGFLKPKFKDGGRGANDSTSAMPEQMKFQWIRVKRTHVPKGWIKGNANDIGMDYDYALLELKKPHKRKFMKIGVSPPAKQLPGGRIHFSGYDNDRPGNLVYRFCDVKDETYDLLYQQCDAQPGASGSGVYVRMWKRQQQKWERKIIGIFSGHQWVDMNGSPQDFNVAVRITPLKYAQICYWIKGNYLDCREG

SEQ ID NO: 170678 - protein, 154 aa, Artificial Sequence
  derived and/or modified sequence
MAGIPGLLFLLFFLLCAVGQVSPYSAPWKPTWPAYRLPVVLPQSTLNLAKPDFGAEAKLEVSSSCGPQCHKGTPLPTYEEAKQYLSYETLYANGSRTETQVGIYILSSSGDGAQHRDSGSSGKSRRKRQIYGYDSRFSIFGKDFLLNYPFSTSV

SEQ ID NO: 170679 - DNA, 613 bp, Artificial Sequence
  derived and/or modified sequence
attgcctctgtcagtgtgacaggttccacagagctgtcaccctgcaaactcacccttcctccaggagcacaggcgcagagctgcagtggagggtacctgtgtggcttccttgtctgacacagatttgccttcatctgaacagtgctcggcatggcagggattccagggctcctcttccttctcttctttctgctctgtgctgttgggcaagtgagcccttacagtgccccctggaaacccacttggcctgcataccgcctccctgtcgtcttgccccagtctaccctcaatttagccaagccagactttggagccgaagccaaattagaagtatcttcttcatgtggaccccagtgtcataagggaactccactgcccacttacgaagaggccaagcaatatctgtcttatgaaacgctctatgccaatggcagccgcacagagacgcaggtgggcatctacatcctcagcagtagtggagatggggcccaacaccgagactcagggtcttcaggaaagtctcgaaggaagcggcagatttatggctatgacagcaggttcagcatttttgggaaggacttcctgctcaactaccctttctcaacatcagtga

SEQ ID NO: 170680 - DNA, 4011 bp, Artificial Sequence
  derived and/or modified sequence
cgcgggtcccgggcaggagagcccgccagagccggtgctgcctggcgccgagaggcccggactggcgactgctgccgcgccaccggggcccacctgcgcagggacgctcggcctcaggccctctgggctgctccaccctgctccggccgcaggcgagcggcgaggggaggggggcacggtttatgtgcagtggggcgggcggcgtccgcgcggcttccccgaggccggaggcggggcgggcgggcctcgggtggcgcggggggcggacccgccagctgcctgcgctgctcgccagcttgctcgcactcggctgtgcggcggggcaggcatgggagccgcgcgctctctcccggcgcccacacctgtctgagcggcgcagcgagccgcggcccgggcgggctgctcggcgcggaacagtgctcggcatggcagggattccagggctcctcttccttctcttctttctgctctgtgctgttgggcaagtgagcccttacagtgccccctggaaacccacttggcctgcataccgcctccctgtcgtcttgccccagtctaccctcaatttagccaagccagactttggagccgaagccaaattagaagtatcttcttcatgtggaccccagtgtcataagggaactccactgcccacttacgaagaggccaagcaatatctgtcttatgaaacgctctatgccaatggcagccgcacagagacgcaggtgggcatctacatcctcagcagtagtggagatggggcccaacaccgagactcagggtcttcaggaaagtctcgaaggaagcggcagatttatggctatgacagcaggttcagcatttttgggaaggacttcctgctcaactaccctttctcaacatcagtgaagttatccacgggctgcaccggcaccctggtggcagagaagcatgtcctcacagctgcccactgcatacacgatggaaaaacctatgtgaaaggaacccagaagcttcgagtgggcttcctaaagcccaagtttaaagatggtggtcgaggggccaacgactccacttcagccatgcccgagcagatgaaatttcagtggatccgggtgaaacgcacccatgtgcccaagggttggatcaagggcaatgccaatgacatcggcatggattatgattatgccctcctggaactcaaaaagccccacaagagaaaatttatgaagattggggtgagccctcctgctaagcagctgccagggggcagaattcacttctctggttatgacaatgaccgaccaggcaatttggtgtatcgcttctgtgacgtcaaagacgagacctatgacttgctctaccagcaatgcgatgcccagccaggggccagcgggtctggggtctatgtgaggatgtggaagagacagcagcagaagtgggagcgaaaaattattggcattttttcagggcaccagtgggtggacatgaatggttccccacaggatttcaacgtggctgtcagaatcactcctctcaaatatgcccagatttgctattggattaaaggaaactacctggattgtagggaggggtgacacagtgttccctcctggcagcaattaagggtcttcatgttcttattttaggagaggccaaattgttttttgtcattggcgtgcacacgtgtgtgtgtgtgtgtgtgtgtgtgtaaggtgtcttataatcttttacctatttcttacaattgcaagatgactggctttactatttgaaaactggtttgtgtatcatatcatatatcatttaagcagtttgaaggcatacttttgcatagaaataaaaaaaatactgatttggggcaatgaggaatatttgacaattaagttaatcttcacgtttttgcaaactttgatttttatttcatctgaacttgtttcaaagatttatattaaatatttggcatacaagagatatgaattcttatatgtgtgcatgtgtgttttcttctgagattcatcttggtggtgggtttttttgtttttttaattcagtgcctgatctttaatgcttccataaggcagtgttcccatttaggaactttgacagcatttgttaggcagaatattttggatttggaggcatttgcatggtagtctttgaacagtaaaatgatgtgttgactatactgatacacatattaaactataccttatagtaaaccagtatcccaagctgcttttagttccaaaaatagtttcttttccaaaggttgttgctctactttgtaggaagtctttgcatatggccctcccaactttaaagtcataccagagtggccaagagtgtttatcccaacccttccatttaacaggatttcactcacatttctggaactagctatttttcagaagacaataatcagggcttaattagaacaggctgtatttcctcccagcaaacagttgtggccacactaaaaacaatcatagcattttacccctggattatagcacatctcatgttttatcatttggatggagtaatttaaaatgaattaaattccagagaacaatggaagcattgcctggcagatgtcacaacagaataaccacttgtttggagcctggcacagtcctccagcctgatcaaaaattattctgcatagttttcagtgtgctttctgggagctatgtacttcttcaatttggaaacttttctctctcatttatagtgaaaatacttggaagttactttaagaaaaccagtgtggcctttttccctctagctttaaaagggccgcttttgctggaatgctctaggttatagataaacaattaggtataatagcaaaaatgaaaattggaagaatgcaaaatggatcagaatcatgccttccaataaaggcctttacacatgttttatcaatatgattatcaaatcacagcatatacagaaaagacttggacttattgtatgtttttattttatggctctcggcctaagcacttctttctaaatgtatcggagaaaaaatcaaatggactacaagcacgtgtttgctgtgcttgcaccccaggtaaacctgcattgtagcaatttgtaaggatattcagatggagcactgtcacttagacattctctgggggattttctgcttgtctttcttgagctttttggaaggataattctgataaggcactcaagaaacgtacaaccacagtgctttcttcaaatcatatgagaaatactatgcatagcaaggagatgcagagccgccaggaaaattctgagttccagcacaattttctttggaatctaacaggaatctagcctgaggaagaagggaggtctccatttctatgtctggtatttgggggttttgtttgtttttgctttagcttggtgaaaaaaagttcactgaacaccaagaccagaatggatttttttaaaaaaatagatgttccttttgtgaagcaccttgattccttgattttgattttttgcaaagttagacaatggcacaaagtcaaaatgaaatcaatgtttagttcacaagtagatgtaatttactaaagaatgatacacccatatgctatatacagcttaactcacagaactgtaaaagaaaattataaaataattcaacatgtccatctttttagtgataataaaagaaagcatggtattaaactatcatagaagtagacagaaaaagaaaaaaggactcatggcattattaatataattagtgctttacatgtgttagttatacatattagaagcatatttgcctagtaaggctagtagaaccacatttcccaaagtgtgctccttaaacactcatgccttatgattttctaccaaaagtaaaaagggttgtattaagtcagaggaagatgcctctccattttccctctctttatcagaggttcacatgcctgtctgcacattaaaagctctgggaagacctgttgtaaagggacaagttgaggttgtaaaatctgcatttaaataaacatctttgatcac

SEQ ID NO: 170681 - protein, 2027 aa, Artificial Sequence
  derived and/or modified sequence
MLKFKYGARNPLDAGAAEPIASRASRLNLFFQGKPPFMTQQQMSPLSREGILDALFVLFEECSQPALMKIKHVSNFVRKYSDTIAELQELQPSAKDFEVRSLVGCGHFAEVQVVREKATGDIYAMKVMKKKALLAQEQVSFFEEERNILSRSTSPWIPQLQYAFQDKNHLYLVMEYQPGGDLLSLLNRYEDQLDENLIQFYLAELILAVHSVHLMGYVHRDIKPENILVDRTGHIKLVDFGSAAKMNSNKMVNAKLPIGTPDYMAPEVLTVMNGDGKGTYGLDCDWWSVGVIAYEMIYGRSPFAEGTSARTFNNIMNFQRFLKFPDDPKVSSDFLDLIQSLLCGQKERLKFEGLCCHPFFSKIDWNNIRNSPPPFVPTLKSDDDTSNFDEPEKNSWVSSSPCQLSPSGFSGEELPFVGFSYSKALGILGRSESVVSGLDSPAKTSSMEKKLLIKSKELQDSQDKCHKMEQEMTRLHRRVSEVEAVLSQKEVELKASETQRSLLEQDLATYITECSSLKRSLEQARMEVSQEDDKALQLLHDIREQSRKLQEIKEQEYQAQVEEMRLMMNQLEEDLVSARRRSDLYESELRESRLAAEEFKRKATECQHKLLKAKDQGKPEVGEYAKLEKINAEQQLKIQELQEKLEKAVKASTEATELLQNIRQAKERAERELEKLQNREDSSEGIRKKLVEAEELEEKHREAQVSAQHLEVHLKQKEQHYEEKIKVLDNQIKKDLADKETLENMMQRHEEEAHEKGKILSEQKAMINAMDSKIRSLEQRIVELSEANKLAANSSLFTQRNMKAQEEMISELRQQKFYLETQAGKLEAQNRKLEEQLEKISHQDHSDKNRLLELETRLREVSLEHEEQKLELKRQLTELQLSLQERESQLTALQAARAALESQLRQAKTELEETTAEAEEEIQALTAHRDEIQRKFDALRNSCTVITDLEEQLNQLTEDNAELNNQNFYLSKQLDEASGANDEIVQLRSEVDHLRREITEREMQLTSQKQTMEALKTTCTMLEEQVMDLEALNDELLEKERQWEAWRSVLGDEKSQFECRVRELQRMLDTEKQSRARADQRITESRQVVELAVKEHKAEILALQQALKEQKLKAESLSDKLNDLEKKHAMLEMNARSLQQKLETERELKQRLLEEQAKLQQQMDLQKNHIFRLTQGLQEALDRADLLKTERSDLEYQLENIQVLYSHEKVKMEGTISQQTKLIDFLQAKMDQPAKKKKGLFSRRKEDPALPTQVPLQYNELKLALEKEKARCAELEEALQKTRIELRSAREEAAHRKATDHPHPSTPATARQQIAMSAIVRSPEHQPSAMSLLAPPSSRRKESSTPEEFSRRLKERMHHNIPHRFNVGLNMRATKCAVCLDTVHFGRQASKCLECQVMCHPKCSTCLPATCGLPAEYATHFTEAFCRDKMNSPGLQTKEPSSSLHLEGWMKVPRNNKRGQQGWDRKYIVLEGSKVLIYDNEAREAGQRPVEEFELCLPDGDVSIHGAVGASELANTAKADVPYILKMESHPHTTCWPGRTLYLLAPSFPDKQRWVTALESVVAGGRVSREKAEADAKLLGNSLLKLEGDDRLDMNCTLPFSDQVVLVGTEEGLYALNVLKNSLTHVPGIGAVFQIYIIKDLEKLLMIAGEERALCLVDVKKVKQSLAQSHLPAQPDISPNIFEAVKGCHLFGAGKIENGLCICAAMPSKVVILRYNENLSKYCIRKEIETSEPCSCIHFTNYSILIGTNKFYEIDMKQYTLEEFLDKNDHSLAPAVFAASSNSFPVSIVQVNSAGQREEYLLCFHEFGVFVDSYGRRSRTDDLKWSRLPLAFAYREPYLFVTHFNSLEVIEIQARSSAGTPARAYLDIPNPRYLGPAISSGAIYLASSYQDKLRVICCKGNLVKESGTEHHRGPSTSRSSPNKRGPPTYNEHITKRVASSPAPPEGPSHPREPSTPHRYREGRTELRRDKSPGRPLEREKSPGRMLSTRRERSPGRLFEDSSRGRLPAGAVRTPLSQVNKVWDQSSV
